United States Patent Application Publication US 2010/0291551 A1 - sequence listing, part 5

SEQ ID NO: 7074 - DNA, 1133 bp, Homo sapiens
cacacacagctagctcttcaggccaggcccccagggtttcgtccacctctcacctttgacgacgcgaatgaagaatgaggaggtgctgcgatcgaacgactgcgaggaaacacacccgctctcatggcattcccagtaaactgagaagacgtgattaaacctcaggatctcctactaatagagaaatgtataacgatttagctaccagatctgaatactgaagggttggtaggggaccagagaatagaggaagcattgtaggttctagagtggagaagggaccatccaaaatggagtttgaaagagaattctggcctttgtgtttagagtctggaattgtcaagagtctgaaagcacagaataagactgcagctagagcaatttaggcgccatagtttgtcaaaacaggtaaggggaataaaggggatgacaccaagagatgtgcaaagaatctgaagaattcacctgaaaaggatacaacctcctcctggaaggcagaggagtaaatagggaattggaaattaattccttatttctgcacatgcacagaatctgggcccaggtgacttatggaacctttatagagaccacggtgactgacactcatgggaaagggggtagaggggcaagaactgactgttcatcaaaaattattagatgagtgtgtccacgacaccaggagatatgttgaatcatggacagggaccagcatatccactaagctctatatatcttgatggtgcaggatccaagtgggatggaacaaccaattcctgcccatcctcctgctcaataatacatgtgctcagaatctgttcataatgcatggtggtaagtaagtagtagtccgaaggtccaaggagtacctttctacctcttctttgtgtcaatttctatcctgagaccccaggaaaagaggaagggaaagacccaacaatggattttttccaaaaagggaacccacaagctattttttagagggaagagtctcgggagtgaggcacaggtgaaaatggatctttctggcatggaagggccataacaccacaggggaagggaaagggagaggcccccacggaaggagaggaaggaagggacaggaggcacgtcacaaacttataagatagagggaa

SEQ ID NO: 7075 - protein, 54 aa, Homo sapiens
MSVSTTPGDMLNHGQGPAYPLSSIYLDGAGSKWDGTTNSCPSSCSIIHVLRICS

SEQ ID NO: 7076 - DNA, 1780 bp, Homo sapiens
gcatgcagaatgaagaatgaggaggtgctgcgatcgaacgactgcgaggaaacacacccgctctcatggcattcccagtaaactgagaagacgtgattaaacctcaggatctcctactaatagagaaatgtataacgatttagctaccagatctgaatactgaagggttggtaggggaccagagaatagaggaagcattgtaggttctagagtggagaagggaccatccaaaatggagtttgaaagagaattctggcctttgtgtttagagtctggaattgtcaagagtctgaaagcacagaataagactgcagctagagcaatttaggcgccatagtttgtcaaaacagagacgggatctcactgtgttgcccaggctggtctcgaactgctggactcaagtcatcctcccatcttggcctcccaaagtgctggaattacagtggacaaccttcaatgcactggtactttgtaccctgacctctactgtgatgaacactcaacttgggcaaggaagtgaaattctccaaaggcccagcaccttagcacctgaggctgctacctgagaagtacgcactgttctggcttcatggagaccatgctccatttctgctgttgaagtctttgagagaccaggatcatgggctgagtgcaacctcctccccatgccatctgcagagcctgaagaggaaaacacaaatacaagttgaggccatctcttcccctagggcctaacctctaagcctagcagcacaaactcaggagctgttgtttcatttaataataaatatgcatccttgaattcaacggaggaacatgctcctggaatttagaagcaagaggggctgggcgcggtggctcacacctgtaatcccagcactttgggaggccaacacgggcagatcacgaggtcaggagatcgagaccaccctggctaacatggtaaaaccctgtctctactaaaaatacaaaaaattagccgggcgtggtggcaggcacctgtaatcccagctactcgggaggctgaggcaggagaatggcgtgaacccgggaggcgtagcttgcagtgagcggagatcacgccactgcactccagcccgggtgacagagcgagactccgtctcaaaaaaaaaaagaaacaagaattttagaatatagatagtttactgagtgtccccatcttgcttcatttcatttttgtaaacataatcagcttctgtcagacttaggctcaagacttatagacagaggaaagtatctaacacagtgagttttgttttctaacacagtgattttctaaagtatctgtggtgacaaaggaaattatctccagtctagttcagaatagaaatgatcataataatcatctatcaaacctcctcattttatataacaggaaaatgagttccagggtctgagagtttagtagtttaaccaggattaaaattaaatcctcttgattttcagtacagtactcttaccatctcacctggtgacctcttttactctgagagcaggagctcctcaggaatgttttacatatgtaatgctcttttccccttagcttctctcaaatcatttaaatttctaaacaaccactaaatgcttacctcttttcaaaatctttctagattgttcagttgctctaaactggattggtgactcccaaggggctatccccaatccaactaattaagttttccattccaaaactgtatatgcccctgacctacatttgatacatatgtccatggccaattcatgtcttgatttgatgatt

SEQ ID NO: 7077 - protein, 48 aa, Homo sapiens
MLLEFRSKRGWARWLTPVIPALWEANTGRSRGQEIETTLANMVKPCLY

SEQ ID NO: 7078 - DNA, 2105 bp, Homo sapiens
agatctgaatactgaagggttggtaggggaccagagaatagaggaagcattgtaggttctagagtggagaagggaccatccaaaatggagtttgaaagagaattctggcctttgtgtttagagtctggaattgtcaagagtctgaaagcacagaataagactgcagctagagcaatttaggcgccatagtttgtcaaaacagagacgggatctcactgtgttgcccaggctggtctcgaactgctggactcaagtcatcctcccatcttggcctcccaaagtgctggaattacagtggacaaccttcaatgcactggtactttgtaccctgacctctactgtgatgaacactcaacttgggcaaggaagtgaaattctccaaagcaaggaggagggtgctctgaatagatggaccctgattctacttacaaaactgtgggaagaaaccggagcttcctccctctctgagacaacggtgccactgagactgcgtgagatgcgacgtaaattctctgcactgtactgctcatcctccccacactccctgctgaggcctcggcaaggtgtagccttcaaacacacagacacatacaggcagacacataataccagacttatggttttcccacagacagtatcctcagggtatgggaaagagtaggggaagactcagtagtaatagacacctgaattagatgtattggtaagatagtggccatgtaacaatctcctctaattcaaaagaagcccaatcatagaccttattttcttctgatagccccatatcaccatgcctctgccttatcatcatccctgtcacatctctccataattccttccccaacacaccaccccaggcccagcaccttagcacctgaggctgctacctgagaagtacgcactgttctggcttcatggagaccatgctccatttctgctgttgaagtctttgagagaccaggatcatgggctgagtgcaacctcctccccatgccatctgcagagcctgaagaggaaaacacaaatacaagttgaggccatctcttcccctagggcctaacctctaagcctagcagcacaaactcaggagctgttgtttcatttaataataaatatgcatccttgaattcaacggaggaacatgctcctggaatttagaagcaagaggggctgggcgcggtggctcacacctgtaatcccagcactttgggaggccaacacgggcagatcacgaggtcaggagatcgagaccaccctggctaacatggtaaaaccctgtctctactaaaaatacaaaaaattagccgggcgtggtggcaggcacctgtaatcccagctactcgggaggctgaggcaggagaatggcgtgaacccgggaggcgtagcttgcagtgagcggagatcacgccactgcactccagcccgggtgacagagcgagactccgtctcaaaaaaaaaaagaaacaagaattttagaatatagatagtttactgagtgtccccatcttgcttcatttcatttttgtaaacataatcagcttctgtcagacttaggctcaagacttatagacagaggaaagtatctaacacagtgagttttgttttctaacacagtgattttctaaagtatctgtggtgacaaaggaaattatctccagtctagttcagaatagaaatgatcataataatcatctatcaaacctcctcattttatataacaggaaaatgagttccagggtctgagagtttagtagtttaaccaggattaaaattaaatcctcttgattttcagtacagtactcttaccatctcacctggtgacctcttttactctgagagcaggagctcctcaggaatgttttacatatgtaatgctcttttccccttagcttctctcaaatcatttaaatttctaaacaaccactaaatgcttacctcttttcaaaatctttctagattgttcagttgctctaaactggattggtgactcccaaggggctatccccaatccaactaattaagttttccattccaaaactgtatatgcccctgacctacatttgatacatatgtccatggccaattcatgtcttgatttgatgatt

SEQ ID NO: 7079 - protein, 105 aa, Homo sapiens
MNTQLGQGSEILQSKEEGALNRWTLILLTKLWEETGASSLSETTVPLRLREMRRKFSALYCSSSPHSLLRPRQGVAFKHTDTYRQTHNTRLMVFPQTVSSGYGKE

SEQ ID NO: 7080 - DNA, 2361 bp, Homo sapiens
tctcaaagacttcaacagcagaaatggagcatggtctccatgaagccagaacagtgcgtacttctcaggtagcagcctcaggtgctaaggtgctgggcctggggtggtgtgttggggaaggaattatggagagatgtgacagggatgatgataaggcagaggcatggtgatatggggctatcagaagaaaataaggtctatgattgggcttcttttgaattagaggagattgttacatggccactatcttaccaatacatctaattcaggtgtctattactactgagtcttcccctactctttcccataccctgaggatactgtctgtgggaaaaccataagtctggtattatgtgtctgcctgtatgtgtctgtgtgtttgaaggctacaccttgccgaggcctcagcagggagtgtggggaggatgagcagtacagtgcagagaatttacgtcgcatctcacgcagtctcagtggcaccgttgtctcagagagggaggaagctccggtttcttcccacagttttgattcatcaaacgtgaggaagcctttggaaaccgggcaccgttgttccagctcctcttccctccctgtcatccatgacccttctgtgtttctcctcggtccccaactctaccttccccaaccacagttcctgtccccagatgtcctgatgcccaccatggcaggggagcccaatagactcccaggaacttcaaggagtgtccagcagtttctggctatgtgtgacaggggtgaaacttcccaaggggccaagtacacaggaaggactttgaactaccagagcctcccccatcgctccagaacagacaactcctgggcaccctggtcagagaccaaccagcatattgggaccagattcctgactactccagggtgcaatcctcaactaacctacactgccacactaccagaaagaagcaagggccttcaggttcctcacactcagtcctggagtgatcttttccattcaccctcccaccctcccattgttcatcctgtgtacccaccatctagcagtcttcatgtacccctgaggtcagcttggaattcagatcctgttccagggtcccgaacccctggtcctcgaagagtagatatgcccccagatgatgactggaggcaaagcagttatgcctcccactctggacacaggagaacagtgggagaggggtttctgtttgttctatcagatgctcccagaagagagcagatcagggctagagtcctgcagcacagtcaatggtaaaggttattcctttcctttcctggagctacacctttctttgtaaaactgtactgtgggccgggcgcggtggctcacacctgtaatcccagcactttgggaggctgaggcgggtggatcacgaggtcaggagattgagaccatcctggccaacatggtgaaaccccgtctctaccaaaatacaaaaaattagccaggcgtgacggtgcgtgcctgtagtcccaactactcggaaggctgaggcaggagaattgcttgaacccgggaggcagaggttgcagtgagccgagatcgcaccactgcactccagcttggcaatagagtgagactccatctcaaaaaacaaaacaaaacaacaacaaaataaactactgtggcagcgttggtaccctgcatcactgccatggttgtgctattctcatctcaacatagaattggtgggttctcctaagggtgtcaggaacctctaaaaagatgtgattctttgggaggggatatttgaaattccaacttccattccccctagcaaaaggaagcagctgctgtttaagggttttatctgagccactttaaagatgaatccatggtattactctggatactagccattccttaggattttaaggtcacattttattcctggatgctttatgtccccacctccacctgagccctcatcctctgttccctactatactcccaacttctactctttgttttatccacctatccctattacctgaccctttgtcttccctgtctcccatccttggggggacatgtagccctgtggtcatggttctgatgacatcatcagggcagcccccctgcccaggtattatggcctgtcagcattccctgtgccctccaaaccttaggcctagaatgcggagctgccaacataacattcacccttttgaacagatggagtcaggcacactaacacagccttctgtcctcaataacacagccattattgccacttgctcagtcgtcaatgtaaaccctcagagtcagctgaactattttaggccaaacatactgtttttgtaaagtatttttcattaataaatctataagacagttctatttaa

SEQ ID NO: 7081 - protein, 198 aa, Homo sapiens
MPTMAGEPNRLPGTSRSVQQFLAMCDRGETSQGAKYTGRTLNYQSLPHRSRTDNSWAPWSETNQHIGTRFLTTPGCNPQLTYTATLPERSKGLQVPHTQSWSDLFHSPSHPPIVHPVYPPSSSLHVPLRSAWNSDPVPGSRTPGPRRVDMPPDDDWRQSSYASHSGHRRTVGEGFLFVLSDAPRREQIRARVLQHSQW

SEQ ID NO: 7082 - DNA, 4069 bp, Homo sapiens
ttcaggacacctgactgatagtgaatgtaatcagaaacacacatccaagaaagggtcactgatagagcgcaagaggagctctggtcgggttaggaggaaaggcgatgagccccaggcctcgggataccacagtgaaggagaaacactgaaagagaagcaggctcctagaaatgcctccaaaccatccagcagcaccaacaggctgagagattttaaagagacagtcagcaatatgatccataacagaccatccctggcttctcagaccaatgtaggctctcactgcaggggcagaggaggagaccagcctgacaaaaaacctcctaggaccctgcctttacactctcgtgactgggaaatagagagtaccagcagtgagtcaaaatccagttcttccagcaagtatcgtcccacatggagacccaaacgagaatctctgaatattgacagtatctttagtaaggacaaaaggaagcactgtggctatacccagcttagccccttttctgaggattcagctaaagaatttataccagatgaaccaagcaagccaccttcttacgacattaaatttggtggaccaagcccccagtacaagcgctggggcccagcacggccaggctctcaccttttagagcagcacccccgactaatccagcgaatggaatctggctatgaaagcagtgagaggaacagcagcagccctgtcagcctggatgcagccctgcctgagagctcaaatgtctacagggatccaagtgctaagagatcagctgggttggttccttcctggcgtcatatcccaaagtcgcacagcagtagcatcctggaggtagactccacagcatccatgggtggctggacaaagagtcagcctttctctggtgaggagatatcttctaaaagtgaactggatgaattgcaggaagaggtggccaggagggcgcaggaacaggaacttcgaagaaaacgggagaaggagttagaggcagcgaaagggtttaaccctcatcctagccgcttcatggacttggatgaactgcagaatcaggtgaacagcctatcccgctccaagtattgttaagccaagaggcccaactggaatccggcatggatacagagtttggggccagttctttcttccattcacctgcttcctgccatgagtcacactcatcactatctccagagtcatctgccccacagcacagctcccccagtagatctgccttgaagcttctgacttcggttgaagtagacaacattgaaccctctgcattccacaggcaaggtttacctaaagcaccagggtggactgagaagaattctcatcatagttgggagccattggatgccccagagggtaagctgcaaggctctaggtgtgacaacagcagttgcagcaagctccctccacaagaaggaagaggcattgctcaagaacagctgttccaagaaaagaaggatcctgctaacccctccccggtgatgcctggaatagccacctctgagaggggtgatgaacacagcctaggctgtagtccttcaaattcatcagctcagcccagccttcccctgtatagaacctgccaccccataatgcctgttgcttcttcatttgtgcttcactgtcctgatcctgtgcagaaaactaaccaatgcctccaaggccaaagcctcaaaacttcattgactttaaaagtggacagaggcagtgaggagacctataggccagagtttcccagcacaaaggggcttgtccgttctctggctgagcagttccagaggatgcagggtgtctccatgagggatagtacaggtttcaaggatagaagtttgtcaggtagtctaaggaagaactcttccccttctgattctaagcctcctttctcacagggtcaagagaaaggccactggccatgggcaaagcaacaatcctctctggagggtggggatagaccactttcctgggaagagtccactgaacattcttctcttgccttaaactctgggctgcctaatggtgaaacttctagcggaggacagcccaggttggcagagccagacatataccaagagaagctgtcccaagtgagagatgttaggtctaaggatctgggcagcagtactgacttggggacttccttgcctttggattcctgggtgaatatcacaaggttctgtgattctcagcttaagcatggggcacctaggccaggaatgaagtcctcccctcatgattcccatacgtgtgtaacctatccagagagaaatcacatccttttgcatccacattggaaccaagacacagagcaggagacctcagaattggagtctctgtatcaggccagtcttcaggcttctcaagctggctgttctggatgggggcagcaggataccgcctggcacccacttagccaaacaggctctgcagatggcatggggaggaggttgcactcagcccatgatcctggtctctcaaagacttcaacagcagaaatggagcatggtctccatgaagccagaacagtgcgtacttctcaggattcatcaaacgtgaggaagcctttggaaaccgggcaccgttgttccagctcctcttccctccctgtcatccatgacccttctgtgtttctcctcggtccccaactctaccttccccaaccacagttcctgtccccagatgtcctgatgcccaccatggcaggggagcccaatagactcccaggaacttcaaggagtgtccagcagtttctggctatgtgtgacaggggtgaaacttcccaaggggccaagtacacaggaaggactttgaactaccagagcctcccccatcgctccagaacagacaactcctgggcaccctggtcagagaccaaccagcatattgggaccagattcctgactactccagggtgcaatcctcaactaacctacactgccacactaccagaaagaagcaagggccttcaggttcctcacactcagtcctggagtgatcttttccattcaccctcccaccctcccattgttcatcctgtgtacccaccatctagcagtcttcatgtacccctgaggtcagcttggaattcagatcctgttccagggtcccgaacccctggtcctcgaagagtagatatgcccccagatgatgactggaggcaaagcagttatgcctcccactctggacacaggagaacagtgggagaggggtttctgtttgttctatcagatgctcccagaagagagcagatcagggctagagtcctgcagcacagtcaatggtaaaggttattcctttcctttcctggagctacacctttctttgtaaaactgtactgtgctactgtggcagcgttggtaccctgcatcactgccatggttgtgctattctcatctcaacatagaattggtgggttctcctaagggtgtcaggaacctctaaaaagatgtgattctttgggaggggatatttgaaattccaacttccattccccctagcaaaaggaagcagctgctgtttaagggttttatctgagccactttaaagatgaatccatggtattactctggatactagccattccttaggattttaaggtcacattttattcctggatgctttatgtccccacctccacctgagccctcatcctctgttccctactatactcccaacttctactctttgttttatccacctatccctattacctgaccctttgtcttccctgtctcccatccttggggggacatgtagccctgtggtcatggttctgatgacatcatcagggcagcccccctgcccaggtattatggcctgtcagcattccctgtgccctccaaaccttaggcctagaatgcggagctgccaacataacattcacccttttgaacagatggagtcaggcacactaacacagccttctgtcctcaataacacagccattattgccacttgctcagtcgtcaatgtaaaccctcagagtcagctgaactattttaggccaaacatactgtttttgtaaagtatttttcattaataaatctataagacagttctatttaa

SEQ ID NO: 7083 - protein, 725 aa, Homo sapiens
MDTEFGASSFFHSPASCHESHSSLSPESSAPQHSSPSRSALKLLTSVEVDNIEPSAFHRQGLPKAPGWTEKNSHHSWEPLDAPEGKLQGSRCDNSSCSKLPPQEGRGIAQEQLFQEKKDPANPSPVMPGIATSERGDEHSLGCSPSNSSAQPSLPLYRTCHPIMPVASSFVLHCPDPVQKTNQCLQGQSLKTSLTLKVDRGSEETYRPEFPSTKGLVRSLAEQFQRMQGVSMRDSTGFKDRSLSGSLRKNSSPSDSKPPFSQGQEKGHWPWAKQQSSLEGGDRPLSWEESTEHSSLALNSGLPNGETSSGGQPRLAEPDIYQEKLSQVRDVRSKDLGSSTDLGTSLPLDSWVNITRFCDSQLKHGAPRPGMKSSPHDSHTCVTYPERNHILLHPHWNQDTEQETSELESLYQASLQASQAGCSGWGQQDTAWHPLSQTGSADGMGRRLHSAHDPGLSKTSTAEMEHGLHEARTVRTSQDSSNVRKPLETGHRCSSSSSLPVIHDPSVFLLGPQLYLPQPQFLSPDVLMPTMAGEPNRLPGTSRSVQQFLAMCDRGETSQGAKYTGRTLNYQSLPHRSRTDNSWAPWSETNQHIGTRFLTTPGCNPQLTYTATLPERSKGLQVPHTQSWSDLFHSPSHPPIVHPVYPPSSSLHVPLRSAWNSDPVPGSRTPGPRRVDMPPDDDWRQSSYASHSGHRRTVGEGFLFVLSDAPRREQIRARVLQHSQW

SEQ ID NO: 7084 - DNA, 5655 bp, Homo sapiens
tagtgtgctgctctaacagaggggctttgtgctacagcttcttccagagctccacagatgcatgctgggcgggctcagtcagctttacccctaatacacttgcttcttcctaacaatagcagagcaagactgacaacaataattaaaataagagaataaagaagatgtagtcagaggccattctgaatgcattcagattctcagtgtgtatgaggaaggctgcctgtaattaagagggaatctttaaccagtttcagtgtagtagtgaaaaagtgcttccatctgacactctccgcagtgctctggcaaagactttccaggatgaacaacgtttccagctgggaattatggatgatgctgcagagtgctttgaaaacctcctgatgagaattcacttccacattgctgatgaaaccaaagaggatatatgtactgcccaacactgcatttcccatcagaaatttgcaatgacattgtttgagcagtgtgtatgtactagctgtggtgccacttctgatccgctgcctttcatccagatggtacattatatctccaccacttccctttgcaatcaggctatttgtatgctggaaagacgagagaaaccttcaccaagcatgtttggtgagctgctgcagaatgccagcaccatgggggatctgcggaactgtccaagcaactgtggagagaggatcaggattcgccgtgtgttgatgaatgctccacagattatcacgattgggctggtatgggactcagaccactcagacttagcagaagatgttatccacagcctgggaacctgccttaagctgggtgatctgtttttcagagtgacggatgaccgggccaagcaatctgaactgtacttagttggaatgatctgttactatggcaaacattattctacattcttttttcaaacaaagattcgcaaatggatgtattttgatgatgctcatgtcaaggagattgggcccaaatggaaggatgtggtgaccaaatgcatcaaggggcattatcagcccctgctgctgctttatgcagatccccagggtaccccagtttccacccaggacctgcctccccaagctgagttccagtcatacagcaggacatgctacgacagtgaagattcaggacacctgactgatagtgaatgtaatcagaaacacacatccaagaaagggtcactgatagagcgcaagaggagctctggtcgggttaggaggaaaggcgatgagccccaggcctcgggataccacagtgaaggagaaacactgaaagagaagcaggctcctagaaatgcctccaaaccatccagcagcaccaacaggctgagagattttaaagagacagtcagcaatatgatccataacagaccatccctggcttctcagaccaatgtaggctctcactgcaggggcagaggaggagaccagcctgacaaaaaacctcctaggaccctgcctttacactctcgtgactgggaaatagagagtaccagcagtgagtcaaaatccagttcttccagcaagtatcgtcccacatggagacccaaacgagaatctctgaatattgacagtatctttagtaaggacaaaaggaagcactgtggctatacccagcttagccccttttctgaggattcagctaaagaatttataccagatgaaccaagcaagccaccttcttacgacattaaatttggtggaccaagcccccagtacaagcgctggggcccagcacggccaggctctcaccttttagagcagcacccccgactaatccagcgaatggaatctggctatgaaagcagtgagaggaacagcagcagccctgtcagcctggatgcagccctgcctgagagctcaaatgtctacagggatccaagtgctaagagatcagctgggttggttccttcctggcgtcatatcccaaagtcgcacagcagtagcatcctggaggtagactccacagcatccatgggtggctggacaaagagtcagcctttctctggtgaggagatatcttctaaaagtgaactggatgaattgcaggaagaggtggccaggagggcgcaggaacaggaacttcgaagaaaacgggagaaggagttagaggcagcgaaagggtttaaccctcatcctagccgcttcatggacttggatgaactgcagaatcaggtgaacagcctatcccgctccaagtattgttaagccaagaggcccaactggaatccggcatggatacagagtttggggccagttctttcttccattcacctgcttcctgccatgagtcacactcatcactatctccagagtcatctgccccacagcacagctcccccagtagatctgccttgaagcttctgacttcggttgaagtagacaacattgaaccctctgcattccacaggcaaggtttacctaaagcaccagggtggactgagaagaattctcatcatagttgggagccattggatgccccagagggtaagctgcaaggctctaggtgtgacaacagcagttgcagcaagctccctccacaagaaggaagaggcattgctcaagaacagctgttccaagaaaagaaggatcctgctaacccctccccggtgatgcctggaatagccacctctgagaggggtgatgaacacagcctaggctgtagtccttcaaattcatcagctcagcccagccttcccctgtatagaacctgccaccccataatgcctgttgcttcttcatttgtgcttcactgtcctgatcctgtgcagaaaactaaccaatgcctccaaggccaaagcctcaaaacttcattgactttaaaagtggacagaggcagtgaggagacctataggccagagtttcccagcacaaaggggcttgtccgttctctggctgagcagttccagaggatgcagggtgtctccatgagggatagtacaggtttcaaggatagaagtttgtcaggtagtctaaggaagaactcttccccttctgattctaagcctcctttctcacagggtcaagagaaaggccactggccatgggcaaagcaacaatcctctctggagggtggggatagaccactttcctgggaagagtccactgaacattcttctcttgccttaaactctgggctgcctaatggtgaaacttctagcggaggacagcccaggttggcagagccagacatataccaagagaagctgtcccaagtgagagatgttaggtctaaggatctgggcagcagtactgacttggggacttccttgcctttggattcctgggtgaatatcacaaggttctgtgattctcagcttaagcatggggcacctaggccaggaatgaagtcctcccctcatgattcccatacgtgtgtaacctatccagagagaaatcacatccttttgcatccacattggaaccaagacacagagcaggagacctcagaattggagtctctgtatcaggccagtcttcaggcttctcaagctggctgttctggatgggggcagcaggataccgcctggcacccacttagccaaacaggctctgcagatggcatggggaggaggttgcactcagcccatgatcctggtctctcaaagacttcaacagcagaaatggagcatggtctccatgaagccagaacagtgcgtacttctcaggctacaccttgccgaggcctcagcagggagtgtggggaggatgagcagtacagtgcagagaatttacgtcgcatctcacgcagtctcagtggcaccgttgtctcagagagggaggaagctccggtttcttcccacagttttgattcatcaaacgtgaggaagcctttggaaaccgggcaccgttgttccagctcctcttccctccctgtcatccatgacccttctgtgtttctcctcggtccccaactctaccttccccaaccacagttcctgtccccagatgtcctgatgcccaccatggcaggggagcccaatagactcccaggaacttcaaggagtgtccagcagtttctggctatgtgtgacaggggtgaaacttcccaaggggccaagtacacaggaaggactttgaactaccagagcctcccccatcgctccagaacagacaactcctgggcaccctggtcagagaccaaccagcatattgggaccagattcctgactactccagggtgcaatcctcaactaacctacactgccacactaccagaaagaagcaagggccttcaggttcctcacactcagtcctggagtgatcttttccattcaccctcccaccctcccattgttcatcctgtgtacccaccatctagcagtcttcatgtacccctgaggtcagcttggaattcagatcctgttccagggtcccgaacccctggtcctcgaagagtagatatgcccccagatgatgactggaggcaaagcagttatgcctcccactctggacacaggagaacagtgggagaggggtttctgtttgttctatcagatgctcccagaagagagcagatcagggctagagtcctgcagcacagtcaatggtaaaggttattcctttcctttcctggagctacacctttctttgtaaaactgtactgtgggccgggcgcggtggctcacacctgtaatcccagcactttgggaggctgaggcgggtggatcacgaggtcaggagattgagaccatcctggccaacatggtgaaaccccgtctctaccaaaatacaaaaaattagccaggcgtgacggtgcgtgcctgtagtcccaactactcggaaggctgaggcaggagaattgcttgaacccgggaggcagaggttgcagtgagccgagatcgcaccactgcactccagcttggcaatagagtgagactccatctcaaaaaacaaaacaaaacaacaacaaaataaactactgtggcagcgttggtaccctgcatcactgccatggttgtgctattctcatctcaacatagaattggtgggttctcctaagggtgtcaggaacctctaaaaagatgtgattctttgggaggggatatttgaaattccaacttccattccccctagcaaaaggaagcagctgctgtttaagggttttatctgagccactttaaagatgaatccatggtattactctggatactagccattccttaggattttaaggtcacattttattcctggatgctttatgtccccacctccacctgagccctcatcctctgttccctactatactcccaacttctactctttgttttatccacctatccctattacctgaccctttgtcttccctgtctcccatccttggggggacatgtagccctgtggtcatggttctgatgacatcatcagggcagcccccctgcccaggtattatggcctgtcagcattccctgtgccctccaaaccttaggcctagaatgcggagctgccaacataacattcacccttttgaacagatggagtcaggcacactaacacagccttctgtcctcaataacacagccattattgccacttgctcagtcgtcaatgtaaaccctcagagtcagctgaactattttaggccaaacatactgtttttgtaaagtatttttcattaataaatctataagacagttctatttaa

SEQ ID NO: 7085 - protein, 772 aa, Homo sapiens
MDTEFGASSFFHSPASCHESHSSLSPESSAPQHSSPSRSALKLLTSVEVDNIEPSAFHRQGLPKAPGWTEKNSHHSWEPLDAPEGKLQGSRCDNSSCSKLPPQEGRGIAQEQLFQEKKDPANPSPVMPGIATSERGDEHSLGCSPSNSSAQPSLPLYRTCHPIMPVASSFVLHCPDPVQKTNQCLQGQSLKTSLTLKVDRGSEETYRPEFPSTKGLVRSLAEQFQRMQGVSMRDSTGFKDRSLSGSLRKNSSPSDSKPPFSQGQEKGHWPWAKQQSSLEGGDRPLSWEESTEHSSLALNSGLPNGETSSGGQPRLAEPDIYQEKLSQVRDVRSKDLGSSTDLGTSLPLDSWVNITRFCDSQLKHGAPRPGMKSSPHDSHTCVTYPERNHILLHPHWNQDTEQETSELESLYQASLQASQAGCSGWGQQDTAWHPLSQTGSADGMGRRLHSAHDPGLSKTSTAEMEHGLHEARTVRTSQATPCRGLSRECGEDEQYSAENLRRISRSLSGTVVSEREEAPVSSHSFDSSNVRKPLETGHRCSSSSSLPVIHDPSVFLLGPQLYLPQPQFLSPDVLMPTMAGEPNRLPGTSRSVQQFLAMCDRGETSQGAKYTGRTLNYQSLPHRSRTDNSWAPWSETNQHIGTRFLTTPGCNPQLTYTATLPERSKGLQVPHTQSWSDLFHSPSHPPIVHPVYPPSSSLHVPLRSAWNSDPVPGSRTPGPRRVDMPPDDDWRQSSYASHSGHRRTVGEGFLFVLSDAPRREQIRARVLQHSQW

SEQ ID NO: 7086 - DNA, 957 bp, Homo sapiens
gcttccttttgctagggggaatggaagttggaatttcaaatatcccctcccaaagaatcacatctttttagaggttcctgacacccttaggagaacccaccaattctatgttgagatgagaatagcacaaccatggcagtgatgcagggtaccaacgctgccacagtagtttattttgttgttgttttgttttgttttttgagatggagtctcactctattgccaagctggagtgcagtggtgcgatctcggctcactgcaacctctgcctcccgggttcaagcaattctcctgcctcagccttccgagtagttgggactacaggcacgcaccgtcacgcctggctaattttttgtattttggtagagacggggtttcaccatgttggccaggatggtctcaatctcctgacctcgtgatccacccgcctcagcctcccaaagtgctgggattacaggtgtgagccaccgcgcccggcccacagtacagttttacaaagaaaggtgtagctccaggaaaggaaaggaataacctttaccattgactgtgctgcaggactctagccctgatctgctctcttctgggagcatctgatagaacaaacagaaacccctctcccactgttctcctgtgtccagagtgggaggcataactgctttgcctccagtcatcatctgggggcatatctactcttcgaggaccaggggttcgggaccctggaacaggatctgaattccaagctgacctcaggggtacatgaagactgctagatggtgggtacacaggatgaacaatgggagggtgggagggtgaatggaaaagatcactccaggactgagtgtgaggaacctgaaggcccttgcttctttctggtagtgtggcagtgtaggttagttgaggattgcaccctggagtagtcaggaatctggtcccaatatgctggttggggccccttgg

SEQ ID NO: 7087 - protein, 71 aa, Homo sapiens
MESHSIAKLECSGAISAHCNLCLPGSSNSPASAFRVVGTTGTHRHAWLIFCILVETGFHHVGQDGLNLLTS

SEQ ID NO: 7088 - DNA, 589 bp, Homo sapiens
gatgaacactcaacttgggcaaggaagtgaaattctccaaaggtatgattacctacaaacctagccactgatattatttaagtttgttgatctctaatggcttgggctttcctgcctcttctacttacacattactgcactagtaccatatgaaaattctcaagaaggcttttttcctcttcttgctgatacacatgcatcactttagattgaaaacacactgaattctattcaatcacatactgggggtgagaggaaaaagcaaaccaatactccatcccatttctttccttctttctttgattagtgcagtgggttctgacccaatcagcagcctttgcttctcagattcctctcaaggctttatgactcttctcaccccaggaaaccctacaacacgcacggcctttcagaactgctacatggaatggacattcctctgggctccagctgaatgtttgtaaataaaataatgactgcgtgtccttatttttgctgagtacacagggcctttcctcacattacaaccttcactttctccctgcttcttcacctgcatccagactgggcgatagagtgagaatccaga

SEQ ID NO: 7089 - protein, 32 aa, Homo sapiens
MTLLTPGNPTTRTAFQNCYMEWTFLWAPAECL

SEQ ID NO: 7090 - DNA, 4054 bp, Homo sapiens
agtcccagaagaaagaggagagacttgctgaagatctggatgggacaatagaagtttggggcacattaaaaagaagcagcaagaacatcaacaaaaacctcagatgattcaaacaggcttcttcttggctttgtggaaccttttgcagttgctcagaatttgagtttttgcttcagaggatgatgagacaaggcaatagagggtgaggaggatcatgttggattcttgcttctctgtctgcctctccttccagttggaaaaatcttcagtccataagaagcattatcaacaagcctgaagaacacatcttaccctgatcctggatgctgttggagttgagaattacatccacttcaccaggactttatggaggctgttcaagaaaaatagaaggaagcaatacttaaggatttctctgtttgcattagtcctgtgccatgttacattttggagattgtttggaacaagtgagggagggctctgtcatcttgatctaggaggatacctgagtcccttgactacacagatgatatttggaaggtggctaaatgtgaacaataatgtcttggaagagaaattatttttcagggggtcgtggtagtgtacaagggatgtttgcacctcgaagctcaacctccatagcccccagcaaaggcctcagcaatgagccagggcaaaacagctgcttcctcaacagtgccctgcaggttttgtggcacttggatatcttccgacgtagctttaggcagcttacaactcacaagtgcatgggagattcctgcatcttttgcgctctcaagggaatctttaaccagtttcagtgtagtagtgaaaaagtgcttccatctgacactctccgcagtgctctggcaaagactttccaggatgaacaacgtttccagctgggaattatggatgatgctgcagagtgctttgaaaacctcctgatgagaattcacttccacattgctgatgaaaccaaagaggatatatgtactgcccaacactgcatttcccatcagaaatttgcaatgacattgtttgagcagtgtgtatgtactagctgtggtgccacttctgatccgctgcctttcatccagatggtacattatatctccaccacttccctttgcaatcaggctatttgtatgctggaaagacgagagaaaccttcaccaagcatgtttggtgagctgctgcagaatgccagcaccatgggggatctgcggaactgtccaagcaactgtggagagaggatcaggattcgccgtgtgttgatgaatgctccacagattatcacgattgggctggtatgggactcagaccactcagacttagcagaagatgttatccacagcctgggaacctgccttaagctgggtgatctgtttttcagagtgacggatgaccgggccaagcaatctgaactgtacttagttggaatgatctgttactatggcaaacattattctacattcttttttcaaacaaagattcgcaaatggatgtattttgatgatgctcatgtcaaggagattgggcccaaatggaaggatgtggtgaccaaatgcatcaaggggcattatcagcccctgctgctgctttatgcagatccccagggtaccccagtttccacccaggacctgcctccccaagctgagttccagtcatacagcaggacatgctacgacagtgaagattcagggagggagccctccatctcaagtgacactcgaacagattcctcaacggagagctatccctacaaacattcccaccatgagtctgtggtcagtcacttctcttctgattctcaggggacagtcatctataatgtggaaaatgattccatgtctcagagcagtcgggacacaggacacctgactgatagtgaatgtaatcagaaacacacatccaagaaagggtcactgatagagcgcaagaggagctctggtcgggttaggaggaaaggcgatgagccccaggcctcgggataccacagtgaaggagaaacactgaaagagaagcaggctcctagaaatgcctccaaaccatccagcagcaccaacaggctgagagattttaaagagacagtcagcaatatgatccataacagaccatccctggcttctcagaccaatgtaggctctcactgcaggggcagaggaggagaccagcctgacaaaaaacctcctaggaccctgcctttacactctcgtgactgggaaatagagagtaccagcagtgagtcaaaatccagttcttccagcaagtatcgtcccacatggagacccaaacgagaatctctgaatattgacagtatctttagtaaggacaaaaggaagcactgtggctatacccagcttagccccttttctgaggattcagctaaagaatttataccagatgaaccaagcaagccaccttcttacgacattaaatttggtggaccaagcccccagtacaagcgctggggcccagcacggccaggctctcaccttttagagcagcacccccgactaatccagcgaatggaatctggctatgaaagcagtgagaggaacagcagcagccctgtcagcctggatgcagccctgcctgagagctcaaatgtctacagggatccaagtgctaagagatcagctgggttggttccttcctggcgtcatatcccaaagtcgcacagcagtagcatcctggaggtagactccacagcatccatgggtggctggacaaagagtcagcctttctctggtgaggagatatcttctaaaagtgaactggatgaattgcaggaagaggtggccaggagggcgcaggaacaggaacttcgaagaaaacgggagaaggagttagaggcagcgaaagggtttaaccctcatcctagccgcttcatggacttggatgaactgcagaatcaggggaggagtgacggctttgagaggtccctgcaagaggcagagtcagtgtttgaagagtcactacatctggaacagaaaggagactgtgctgcagctttggctctctgtaatgaagctatctctaaactaagacttgccctgcatggtgccagctgtagcacgcacagcagagccctagtcgataagaagttgcaaatcagtattcgaaaagcacggagcctgcaggatcgcatgcagcagcagcaatcaccacagcagccgtcgcagccctcagcctgcctcccaacacaggcggggactctctctcagccaacaaggtagtgcttgggaaccatgttagtttatgaatgccaggggaagaaatgaccatgagtattctgtagcaagagctctcattgtcttggcgactgaaggggagagaggagtcctctgaaaagattttcttctttcaggtcagacatacagtgaaaagctcattgtactgctggtccttatcttaataattcctaggatgcaaaaagtacagcataataagaccatttgtccacatttcccatgggtaactttagccctggacttgtgtaataacgcgattattatatttgtatatattatgttcttagacatggcaatccaggctacatttcatgttgtagtagctaccatgtgatttattttgggatttcagtgcttcctatccttatggaagcagagaaagcagtctttcttgctctgattgcaccatagagaagagacacaaagattccctttgctttgcttctttatggtcaggactaggaaagaagttccagtagtcattgttgtagttctcacatcttagccctggaatttggcttttacttagaatagatgaatttaaataaacattaatttggaccgttaataattctgagtagttttcaaaatataaattagtaaaagcagttaacattttttttttttttttttttttggagacaggatcttgctttttcacccaggctggagtgcagtggcacgatcacagcttactgcagcctcaacctcctgggttcaatgttcaaaaggcaaatgttcaaaaatagttaactgctaggcatggtagctcacgcctgtaatcccagaattttggg

SEQ ID NO: 7091 - protein, 893 aa, Homo sapiens
MSWKRNYFSGGRGSVQGMFAPRSSTSIAPSKGLSNEPGQNSCFLNSALQVLWHLDIFRRSFRQLTTHKCMGDSCIFCALKGIFNQFQCSSEKVLPSDTLRSALAKTFQDEQRFQLGIMDDAAECFENLLMRIHFHIADETKEDICTAQHCISHQKFAMTLFEQCVCTSCGATSDPLPFIQMVHYISTTSLCNQAICMLERREKPSPSMFGELLQNASTMGDLRNCPSNCGERIRIRRVLMNAPQIITIGLVWDSDHSDLAEDVIHSLGTCLKLGDLFFRVTDDRAKQSELYLVGMICYYGKHYSTFFFQTKIRKWMYFDDAHVKEIGPKWKDVVTKCIKGHYQPLLLLYADPQGTPVSTQDLPPQAEFQSYSRTCYDSEDSGREPSISSDTRTDSSTESYPYKHSHHESVVSHFSSDSQGTVIYNVENDSMSQSSRDTGHLTDSECNQKHTSKKGSLIERKRSSGRVRRKGDEPQASGYHSEGETLKEKQAPRNASKPSSSTNRLRDFKETVSNMIHNRPSLASQTNVGSHCRGRGGDQPDKKPPRTLPLHSRDWEIESTSSESKSSSSSKYRPTWRPKRESLNIDSIFSKDKRKHCGYTQLSPFSEDSAKEFIPDEPSKPPSYDIKFGGPSPQYKRWGPARPGSHLLEQHPRLIQRMESGYESSERNSSSPVSLDAALPESSNVYRDPSAKRSAGLVPSWRHIPKSHSSSILEVDSTASMGGWTKSQPFSGEEISSKSELDELQEEVARRAQEQELRRKREKELEAAKGFNPHPSRFMDLDELQNQGRSDGFERSLQEAESVFEESLHLEQKGDCAAALALCNEAISKLRLALHGASCSTHSRALVDKKLQISIRKARSLQDRMQQQQSPQQPSQPSACLPTQAGTLSQPTR

SEQ ID NO: 7092 - DNA, 509 bp, Homo sapiens
cttgccccacagataccctcgtgattagaggtcttttgctggaggttgactgtgctgtctggctaaatgtgaacaataatgtcttggaagagaaattatttttcagggggtcgtggtagtgtacaagggatgtttgcacctcgaagctcaacctccatagcccccagcaaaggcctcagcaatgagccagggcaaaacagctgcttcctcaacagtgccctgcaggttttgtggcacttggatatcttccgacgtagctttaggcagcttacaactcacaagtgcatgggagattcctgcatcttttgcgctctcaagggaatctttaaccagtttcagtgtagtagtgaaaaagtgcttccatctgacactctccgcagtgctctggcaaagactttccaggatgaacaacgtttccagctgggaattatggatgatgctgcagagtgctttctgtttttcagagtgacggatgaccgggccaagcaatctgaactgtacttagttgg

SEQ ID NO: 7093 - protein, 142 aa, Homo sapiens
MSWKRNYFSGGRGSVQGMFAPRSSTSIAPSKGLSNEPGQNSCFLNSALQVLWHLDIFRRSFRQLTTHKCMGDSCIFCALKGIFNQFQCSSEKVLPSDTLRSALAKTFQDEQRFQLGIMDDAAECFLFFRVTDDRAKQSELYL

SEQ ID NO: 7094 - DNA, 1039 bp, Homo sapiens
aacaaagaggtgaatgagcagaatgggtcatgtacatcccactgatgtgtgctgatgtgacaaagagagaaggcaggtagaagagctatctgaacgttgctaacagagggcctggggaggagggacgggcacgaccgcatctgctcctctgtcctgtgtgcgtgtttggccacctgatgccaactccatgatggcacatttgtcttattaagtgagttggcttcctggtctgaaccctccataagccctggctgggaattttcctcactgtgaccttgtgagcagtccctggttaccctcaaggattgtgccaagcaggctctgggttaacatcttggagagtacagagtaggctgataatcagcctatgctcaacagcacacccaagagttgaagatttctgatggcatccctggggtgctcagcagtggcctttgtctgcacccatcttcattacatgttaataccaccagagacactttgaggtcactggaaggactgagcgcattcaggagcctggaggaactcatcttggacaacaatcagctgggggacgaccttgtgttgccagggttacccagactgcataccttaaccctcaacaagaaccgaatcactgatttggagaacctgctggatcacttggcagaagtgacaccagctctggagtacctcagtctgctgggcaacgtggcctgtcccaacgagctggtcagcttggaaaaggatgaggaagactacaagagatacagatgctttgttctgtacaagctgcccaacttgaaatttctggatgcccagaaagtaaccagacaagaacgagaggaggcgttggtcagaggagtcttcatgaaggtggtgaagcccaaggtgagaggtgtcctggggaagtgtcgctacgtttactatgggaaaaactcagagggcaacaggtttatccgagatgaccagctctgaagccaacttctgtataccttcacccatttcatgaaaataaaatcaaaagggaaatcaaaaataaagaaaacgctaaagaaaa

SEQ ID NO: 7095 - protein, 64 aa, Homo sapiens
MLCSVQAAQLEISGCPESNQTRTRGGVGQRSLHEGGEAQGERCPGEVSLRLLWEKLRGQQVYPR

SEQ ID NO: 7096 - DNA, 816 bp, Homo sapiens
gttgaagaaagaggatctggctgaaagacccgcaactttcacttgttgagaacctttagccagcgccggcgtgcatgtgttttagttttattctttttcccttgcccccaaagccgtggagtacctgctgttgctctcatgcctcttgccaacagtggcatctgctcagtgtagccatcaagaatttgaatgtcaatatctttgccttgaaatgaatggaaaagtatttgtcactcagcggcaatcattcttcaaataaaaggtcactggaaggactgagcgcattcaggagcctggaggaactcatcttggacaacaatcagctgggggacgaccttgtgttgccagggttacccagactgcataccttaaccctcaacaagaaccgaatcactgatttggagaacctgctggatcacttggcagaagtgacaccagctctggagtacctcagtctgctgggcaacgtggcctgtcccaacgagctggtcagcttggaaaaggatgaggaagactacaagagatacagatgctttgttctgtacaagctgcccaacttgaaatttctggatgcccagaaagtaaccagacaagaacgagaggaggcgttggtcagaggagtcttcatgaaggtggtgaagcccaaggtgagaggtgtcctggggaagtgtcgctacgtttactatgggaaaaactcagagggcaacaggtttatccgagatgaccagctctgaagccaacttctgtataccttcacccatttcatgaaaataaaatcaaaagggaaatcaaaaataaagaaaacgctaaagaaaa

SEQ ID NO: 7097 - protein, 172 aa, Homo sapiens
MEKYLSLSGNHSSNKRSLEGLSAFRSLEELILDNNQLGDDLVLPGLPRLHTLTLNKNRITDLENLLDHLAEVTPALEYLSLLGNVACPNELVSLEKDEEDYKRYRCFVLYKLPNLKFLDAQKVTRQEREEALVRGVFMKVVKPKVRGVLGKCRYVYYGKNSEGNRFIRDDQL

SEQ ID NO: 7098 - DNA, 3923 bp, Homo sapiens
agatgccactgtgggcactggcagaactgggccccctgtagatcagatagaaacaaatgggaagctctgggccattgccttcaaaaggctttcttattccagagaggtttttgacataatcctcccctccccaccagcctctgctgtgaccagcttcttacttgaattacccttcagctccctcgctcagcttcatgctcagcatttgcccagactctgacctcttctccattgggatctttttcttggtctcttggttccagactcaccctcatccctaccttgccttttgttttcctcccaatttcttggcttctggctctagacaggatatggctgttcctgctttcaaacctgtctattattcccaacttaatctgtctgtcagtgacaccttctctcttgctttactgaaaggcatggcaccttaatctgtgagaggggtgggaagcttcagccttctacctggttctttagtttctctaacttaatccttcagaagatggcaagtctttacttttggattctggcaatgtggcccacactttcgtgttgaattacagtcatggtatgtagttttttttttgtttgtttgagacagagtctggctctgtcgcccaggctggagtggagtggcacgatctcggctcactgcaagctccgcctcctgggctcacgccattctcctgccttagcctccagaatagctgggactacaggcacccgccaccatgcctggagaagtttttgtatttttagtggagacagggtttcaccatgttaaccaggatggtctcgatctcctgacctcgtgatccacccgtctcggcctcccaaagtgctgggattacaggcgtgagccactgcgcccagcccatggcttctagtgaggacgttgccagctccccggagcgccactacacgcccttgccttctgcttccagggaactcaccagtcaccaaggtgtcctggggaagtgtcgctacgtttactatgggaaaaactcagagggcaacaggtttatccgagatgaccagctctgaagccaacttctgtataccttcacccatttcatgaaaataaaatcaaaagggaaatcaaaaataaagaaaacgctaaagaaaaaacaatagcccacattgcctctctttgggaaaagctatgacttcagcttttggtaccttccgctgactttgccaggcctgtcaagatgatccttctgccttagactgagtggtcacatagagattgacatgattgcccttaagcaggtctcatccaccagggtgacagacagcggtggcaaagcaacagggctgacagcatgaacaccatgatagattgcctggtcctgccactgctcacaggggagcagaggtcacacctggggcctccctggacatgctcagtggctgcagtcaagtgagaaagactgtcctcagctcgcctattgaattgaaatccctctgataccatcgtgctgtgggcttatttttagtgaaatagtcacagtttaggggatggccattctccctcactccttttaaatcttaacgtcctgtattctgcatatacatagctcccgtctcttcccctccaccttcctttagcatcgattttatgacaggtggtgcatttcagtttgcagtttttcggagaacaaggtataacttcccagccaggtcatacatttatggctggcttcatgttgctacaatccctttattggcgtaaatagctttccctaaatccctgactacaaaagcgtggacttttatcttgtttcattcaactctaaatccacttcttgccctgaatatgatgcagtgtaaggcataaggcatctttctcagcatgagggtttggttgcaccagggactcttatttattaatttatttttaaccgtacacacttccagtgatgcctgtggccatacttgtgcgtggggctggcttgctcctttgggtgctatttaaagggagtgaggtgatgaaagatagagtgaagggtcaggaggttaaaaaacaaaattaagactgttgaaaacacccaccagaccaaagagtttttatagaaggcacaaaccttttggattttgcatctttgtcatgacctctcagaaatcaaatccacaggttgtgagacagtgctctgtcttcctgtatgcttggctgtgcactagcactaatgtcacaaggaacataagtgtgatcattgctagttgggtgactcaaagtttatctaacttgctggtgcaccagtcaaatcactctagaagatgttcaaaaggttgattgattgttcttgacacgatagtgtttatttttctgcttcttccatttagaccaagtgttcattgtcctcccagtattaggtcagtttgatgacagcaaaacctgaaagagaatccctccaagttatagatactgagggactaggagctgctattgtaaaactatggggactcagaatccctaagctgcccaaggagaacctactttctcagctctagcccgtttacatagcctctggcccactgagtcaacacaggccttgaatgacatgtattgaggctggcaggagtccctgtttgagattacacaacctttgttaatcagttctttagacaagttaacattaaaatcctcaaaaccatgaaaaattggagaatgttgaatgtttgcatttatctctcaaatccattagtaactggatttgagtaccttttctctgtttgatctacaaaacagcactggaaaaatgctttaaattatctgcatttggtcccaccctgggtcattgtttagaagcatcaacacatgttttctccctggcataatatgggcagccagaattctgtgcaagggcagctagacgagtcagatgtcatatccaatctagccacacatatatccttgtctttataaaaggctttaaccctgcctcaaacaataaaaaagcacttgtgaactgaccacagaatttttccatctttatttttcttacttgtttactttttttaatgtcagaaccatttgtatcatgcgcaggaatgtctccctcaatgtgagctttggaggcaaaacatatttttggagtgagttattgaccacattgtttccctctctttgggttgtttattttcttccagaatggtgtaataactttaattaagattagctttaattataaattacctaaaggccatcactaaggtatattcatcttattgatagaattatagtcagctttgtttctcttaagcagggatagtgataatgaagtgctgggttggttacagttccactgtgtgttaaccaaaatttgctgtgctagagctagactttggtctgaattggcagaggtagaacccatgttgcatgtttatcctaaatctgtaggaatttcccaaaccttgtttttcaaagttgagaagtagaaagtaataaattcaatcagggcccagacatgttttgtaccccctttaccctttggtctttcttccttttatcctattccactgagcttgttctttggggattgtggtgcctgacatcactgtctttcctcccctaggacactgacttgagtggagagacctcggcaattcaaggctgtcctgcagctctctgttgcctcagcaatgtcaggacgactgtctctttcctaagtaacataattttaaagaacaatttgttcctcagggaataatgtcttggattgtggggaatcctattaaaagtacaactattgcagtcatttgcttttacttttaccagcctcactcataaaccctccatctgtttgttgctttaaatagaagcacattataagagattatcacttgatcaggctgcatgtctgagtgttgtgtgttttcacatactcatgtatactaaggaataaaagaaagcaaaccac

SEQ ID NO: 7099 - protein, 55 aa, Homo sapiens
MASSEDVASSPERHYTPLPSASRELTSHQGVLGKCRYVYYGKNSEGNRFIRDDQL

SEQ ID NO: 7100 - DNA, 672 bp, Homo sapiens
ggaacaagcttgaaatagccaagagctagacacaaaagccagtgctgcagtagcctagagactgtggaagagaggaggcttggggcatttactaagtgcagacgtggaaatgttggcatgtggatagaccctgtaccaaaaacccagcagaagattcagagtccctgagatgcttcctcctcatcttcttcgccaagcacctcttgtcactgatcttggaagttagaggtgggaaaaggcaggtgtcctggggaagtgtcgctacgtttactatgggaaaaactcagagggcaacaggtttatccgagatgaccagctctgaagccaacttctgtataccttcacccatttcatgaaaataaaatcaaaagggaaatcaaaaataaagaaaacgctaaagaaaaaacaatagcccacattgcctctctttgggaaaagctatgacttcagcttttggtaccttccgctgactttgccaggcctgtcaagatgatccttctgccttagactgagtggtcacatagagattgacatgattgcccttaagcaggtctcatccaccagggtgacagacagcggtggcaaagcaacagggctgacagcatgaacaccatgatagattgcctggtcctgccactgctcacaggggagcagaggtcacacctggggcct

SEQ ID NO: 7101 - protein, 32 aa, Homo sapiens
SWKLEVGKGRCPGEVSLRLLWEKLRGQQVYPR

SEQ ID NO: 7102 - DNA, 355 bp, Homo sapiens
tgcagacgtggaaatgttggcatgtggatagaccctgtaccaaaaacccagcagaagattcagagtccctgagatgcttcctcctcatcttcttcgccaagcacctcttgtcactgatcttggaagttagaggtgggaaaaggcagccccagccctgagattgctccagcctgttcttcacctgcagtgccaggtgtcctggggaagtgtcgctacgtttactatgggaaaaactcagagggcaacaggtttatccgagatgaccagctctgaagccaacttctgtataccttcacccatttcatgaaaataaaatcaaaagggaaatcaaaaataaagaaaacgctaaagaaaa

SEQ ID NO: 7103 - protein, 51 aa, Homo sapiens
SWKLEVGKGSPSPEIAPACSSPAVPGVLGKCRYVYYGKNSEGNRFIRDDQL

SEQ ID NO: 7104 - DNA, 570 bp, Homo sapiens
agctgaaagaggaggtggtgttcaatgggaatcacaaaggctatggtagaagtgagtaatgagagctgggctcgagccctggtctgagttcagtgtggatgtttaaaggcgaccattcttaagaggcaagagaattcgatactgggttcaaatctcaattttattttaaaagtgcatcagtaacttgtagctcatttgatggcctgcagcccagcttgtttagaaatcccttctattctctctggtactccaagtcccaaagaatctgttctgatggtgtggttacacaaccagccaagcacagccttaggttgctctcaactcagaactcaccctatcacacgttgacgaatgcaagagcctgttagagacactggaacccaagatggtgtcctggggaagtgtcgctacgtttactatgggaaaaactcagagggcaacaggtttatccgagatgaccagctctgaagccaacttctgtataccttcacccatttcatgaaaataaaatcaaaagggaaatcaaaaataaagaaaacgctaaagaaaaaacaatagcccacattgcct

SEQ ID NO: 7105 - protein, 38 aa, Homo sapiens
MQEPVRDTGTQDGVLGKCRYVYYGKNSEGNRFIRDDQL

SEQ ID NO: 7106 - DNA, 276 bp, Homo sapiens
aatgggtgtgaatctctgtgtgctcatatacatatgcttgattatatgatcatctcgtggaggacatgtgacacgggaagacaatagggcacatgatatgctctttgatctaaggtgtcctggggaagtgtcgctacgtttactatgggaaaaactcagagggcaacaggtttatccgagatgaccagctctgaagccaacttctgtataccttcacccatttcatgaaaataaaatcaaaagggaaatcaaaaataaagaaaacgctaaagaaaa

SEQ ID NO: 7107 - DNA, 370 bp, Homo sapiens
atacaccccaaagaactgaaaacaagaactcaaacagatacttgtacacctatgttcatagcagccttattcacatggacaaaagatgaagtttcattcttgtcgcccaggctggagtgcagtggtgcgttctcggctcactgcaacctccgcctccccggctcaagcgattctcctgtctcagcctcccaagtagctggaaatacaggtgtcctggggaagtgtcgctacgtttactatgggaaaaactcagagggcaacaggtttatccgagatgaccagctctgaagccaacttctgtataccttcacccatttcatgaaaataaaatcaaaagggaaatcaaaaataaagaaaacgctaaagaaaa

SEQ ID NO: 7108 - protein, 78 aa, Homo sapiens
MFIAALFTWTKDEVSFLSPRLECSGAFSAHCNLRLPGSSDSPVSASQVAGNTGVLGKCRYVYYGKNSEGNRFIRDDQL

SEQ ID NO: 7109 - DNA, 672 bp, Homo sapiens
taaaataggtttttctaaaaatagaagaaaataaaaatgcaggtggcaaaaacaaaacagatttttccttgataatcctacagagctttcataataactatggaagtgatttcttatgggcatttagaataaataatgagttgattaaaaagttcaaccctattgtaggggcatttttcattgttaagtctcctacaatctccttgaatgagaggagagccttatacggagccacagagttacttaaagtaaaactgaaaatggaaatcaaatgcattctgaccagagaaagagagttcaggattcctgtaagaagccatttaatgggaggctcttgttcctgtccatgtggtgtttttttttgtttttgtttttttgtttttttgagacggtgtctctccctgtcgcccaggctggagtgcactggcgcgatctcggctcactgcaagctccacctcccgggttcacgccattctcctgcctcagcctcccgagtagctgggactacaggtgtcctggggaagtgtcgctacgtttactatgggaaaaactcagagggcaacaggtttatccgagatgaccagctctgaagccaacttctgtataccttcacccatttcatgaaaataaaatcaaaagggaaatcaaaaataaagaaaacgctaaagaaaa

SEQ ID NO: 7110 - protein, 109 aa, Homo sapiens
MEIKCILTREREFRIPVRSHLMGGSCSCPCGVFFCFCFFVFLRRCLSLSPRLECTGAISAHCKLHLPGSRHSPASASRVAGTTGVLGKCRYVYYGKNSEGNRFIRDDQL

SEQ ID NO: 7111 - DNA, 592 bp, Homo sapiens
acattccaagatactctagaagaattagcatgtgcttatatgataatatgcacaaataacacaatttatgacctatcccaaccacaaagtgacaaattaacacttagcattataattacccaaaggatgggaactcccaatgctgggaaatttcaggtagacttgtaggaagacaatattttgaacagtggttgtggctttcaatgttctttgggtcatttgaggggttgctgatgcattagaagaagtaatacacaacactgtaccacaagccgatggtccagttgtcatataaacaggttttgctgtcatcaaactgacctaatactgggaggacaatgaacacttggtctaaatggaagaagcagaaaaataaacactatcgtgtcaagaacaatcaatcaaccttttgaacatcttctagagtgatttgactggtgcaccagcaagttagataaactttgagtcacccaactagcaatgatcacacttatgttccttgtgacattagtgctagtgcacagccaagcatacaggaagacagagcactgtctcacaacctgtggatttgatttctgagaggtcatgacaa

SEQ ID NO: 7112 - protein, 42 aa, Homo sapiens
MIICTNNTIYDLSQPQSDKLTLSIIITQRMGTPNAGKFQVDL

SEQ ID NO: 7113 - DNA, 6397 bp, Homo sapiens
cgcagcccggggcgagcggggcgcgggccggggagggggagctgcccgcgcactccatccccctcccccccgggcgggcggcggcggctcgctgtatatatctcggcgcaccccgccaggtcgcgcacagcgccccgagcccaggcgcctccccgcccccctcccgcgctccgcggcggcggcggcggcggcagcagtagcagcaatatggctgttgatgggtgtttggggtggcgctggcggcgggaggagctcccccgagcccctgcgccggctgcccgttgctagctatggcaaatggtggcggcggcggcggcggcagcagcggcggcggcggcggcggcggaggcagcagtcttagaatgagtagcaatatccacgcgaaccatctcagcctagacgcgtcctcctcctcctcctcctcctcttcctcttcttcttcttcctcctcctcttcctcctcgtcctcggtccacgagcccaagatggatgcgctcatcatcccggtgaccatggaggtgccgtgcgacagccggggccaacgcatgtggtgggctttcctggcctcctccatggtgactttcttcgggggcctcttcatcatcttgctctggcggacgctcaagtacctgtggaccgtgtgctgccactgcgggggcaagacgaaggaggcccagaagattaacaatggctcaagccaggcggatggcactctcaaaccagtggatgaaaaagaggaggcagtggccgccgaggtcggctggatgacctccgtgaaggactgggcgggggtgatgatatccgcccagacactgactggcagagtcctggttgtcttagtctttgctctcagcatcggtgcacttgtaatatacttcatagattcatcaaacccaatagaatcctgccagaatttctacaaagatttcacattacagatcgacatggctttcaacgtgttcttccttctctacttcggcttgcggtttattgcagccaacgataaattgtggttctggctggaagtgaactctgtagtggatttcttcacggtgccccccgtgtttgtgtctgtgtacttaaacagaagttggcttggtttgagatttttaagagctctgagactgatacagttttcagaaattttgcagtttctgaatattcttaaaacaagtaattccatcaagctggtgaatctgctctccatatttatcagcacgtggctgactgcagccgggttcatccatttggtggagaattcaggggacccatgggaaaatttccaaaacaaccaggctctcacctactgggaatgtgtctatttactcatggtcacaatgtccaccgttggttatggggatgtttatgcaaaaaccacacttgggcgcctcttcatggtcttcttcatcctcgggggactggccatgtttgccagctacgtccctgaaatcatagagttaataggaaaccgcaagaaatacgggggctcctatagtgcggttagtggaagaaagcacattgtggtctgcggacacatcactctggagagtgtttccaacttcctgaaggactttctgcacaaggaccgggatgacgtcaatgtggagatcgtttttcttcacaacatctcccccaacctggagcttgaagctctgttcaaacgacattttactcaggtggaattttatcagggttccgtcctcaatccacatgatcttgcaagagtcaagatagagtcagcagatgcatgcctgatccttgccaacaagtactgcgctgacccggatgcggaggatgcctcgaatatcatgagagtaatctccataaagaactaccatccgaagataagaatcatcactcaaatgctgcagtatcacaacaaggcccatctgctaaacatcccgagctggaattggaaagaaggtgatgacgcaatctgcctcgcagagttgaagttgggcttcatagcccagagctgcctggctcaaggcctctccaccatgcttgccaacctcttctccatgaggtcattcataaagattgaggaagacacatggcagaaatactacttggaaggagtctcaaatgaaatgtacacagaatatctctccagtgccttcgtgggtctgtccttccctactgtttgtgagctgtgttttgtgaagctcaagctcctaatgatagccattgagtacaagtctgccaaccgagagagccgtatattaattaatcctggaaaccatcttaagatccaagaaggtactttaggatttttcatcgcaagtgatgccaaagaagttaaaagggcatttttttactgcaaggcctgtcatgatgacatcacagatcccaaaagaataaaaaaatgtggctgcaaacggcccaagatgtccatctacaagagaatgagacgggcatgttgttttgattgcggacgttctgagcgtgactgctcatgcatgtcaggccgtgtgcgtggtaacgtggacacccttgagagagccttcccactttcttctgtctctgttaatgattgctccaccagtttccgtgcctttgaagatgagcagccgtcaacactatcaccaaaaaaaaagcaacggaatggaggcatgcggaactcacccaacacctcgcctaagctgatgaggcatgaccccttgttaattcctggcaatgatcagattgacaacatggactccaatgtgaagaagtacgactctactgggatgtttcactggtgtgcacccaaggagatagagaaagtcatcctgactcgaagtgaagctgccatgaccgtcctgagtggccatgtcgtggtctgcatctttggcgacgtcagctcagccctgatcggcctccggaacctggtgatgccgctccgtgccagcaactttcattaccatgagctcaagcacattgtgtttgtgggctctattgagtacctcaagcgggaatgggagacgcttcataacttccccaaagtgtccatattgcctggtacgccattaagtcgggctgatttaagggctgtcaacatcaacctctgtgacatgtgcgttatcctgtcagccaatcagaataatattgatgatacttcgctgcaggacaaggaatgcatcttggcgtcactcaacatcaaatctatgcagtttgatgacagcatcggagtcttgcaggctaattcccaagggttcacacctccaggaatggatagatcctctccagataacagcccagtgcacgggatgttacgtcaaccatccatcacaactggggtcaacatccccatcatcactgaactagtgaacgatactaatgttcagtttttggaccaagacgatgatgatgaccctgatacagaactgtacctcacgcagccctttgcctgtgggacagcatttgccgtcagtgtcctggactcactcatgagcgcgacgtacttcaatgacaatatcctcaccctgatacggaccctggtgaccggaggagccacgccggagctggaggctctgattgctgaggaaaacgcccttagaggtggctacagcaccccgcagacactggccaatagggaccgctgccgcgtggcccagttagctctgctcgatgggccatttgcggacttaggggatggtggttgttatggtgatctgttctgcaaagctctgaaaacatataatatgctttgttttggaatttaccggctgagagatgctcacctcagcacccccagtcagtgcacaaagaggtatgtcatcaccaacccgccctatgagtttgagctcgtgccgacggacctgatcttctgcttaatgcagtttgaccacaatgccggccagtcccgggccagcctgtcccattcctcccactcgtcgcagtcctccagcaagaagagctcctctgttcactccatcccatccacagcaaaccgacagaaccggcccaagtccagggagtcccgggacaaacagaagtacgtgcaggaagagcggctttgatatgtgtatccaccgccactgtgtgaaactgtatctgccactcatttccccagttggtgtttccaacaaagtaactttccctgttttcccctgtagtccccccctttttttttacacatatttgcatatgtatgatagtgtgcatgtggttgtcatttttatttcaccaccataaaacccttgagcacaacagcaaataagcagacggaccaaaagttatttatgattctgggggaaaaataacccaaaggcatgctccagacataaatagctcactgcaggaacgagttcacagattagaagggagcacttgtgatcaacgtcagttaggcagagcaagtttatttaatgtaaaagaaaagttgattctgatttatcaggattatcagggtgctttgggttttgattttgttgttgttgttgttttcctttctttctttttttatacacacaataagttagcacatgtttatttgaaacaagcaaccaaacagcaatgaaaacatattgattgtttccagtctctgggccgaagtattgcgaagcatttgaaaagctttcacgatttgtgtagatgattatgaaggacctgcttgttgcaagagaacatcagtgatttttttagttactcaccaaggccttttgtcccagagccagttccctctgggagttcttatgaacatttctcaccttaatatggaggagagaatagtattccaatcatggatgtatcaaattctagtcatttagtttaagtgaaaagaggtttgattgcatattaaattgttattctgtctccttatgttgccatatgaatagctattttttttctttcacttttgacatttgggatgaaaagccatatgtatcataaatatcagatgtaagtcattaaaaactgccttcctgggacttttacatcttttaaaaggtgaattacttaccttatgtacagaataaataatgctcaggaaagagcaagtatttttccatgcattctcaggggatctttttactcccctttgtttgattagttagggccccaatgccaggtaggaggaagggctggggcaatggtagagtgagaggaagacaaacccagctgcagatcatgcttttctaggagccgacatgctaaataaattagaatgtaggaggatcagccacagttgactcaacaaagacaaaagccagccaccaccttcaactgttggcacagctgtgcggtgctggctgtcccaatgcagaaagctggtgggaaggaattcctcatcatcactttctttaatgtagccaatttaggcagggtaatgacggcaatagagagctgctccttgtcattatgagacgtgggataagaagagtgcaacagtgagccaaacacattttggtatagttatttttttcttcttttgttttctttcttttttaacacttagtaagcatgagaggagaggtagaaaaatacccttttttcaacatatagttgtcagatgctttgtgcatgcaaatcatgctttaggcagtgcggtatttcttaaaaactggccaattcaccataaccaatttcccttatggatggactaggctggtatatacatatttgaaaagttttacttcaaagaattccatcgaatagaataggggtaaaagggaggaggaaaacatgtcacagctgtaccatctctaaaaaggtgtttttatggtgaatgttttggatttagattttggatcccccgtcccctcaagcatgatagttttggatatttgcttgctgtgtgaattgacaagcacttttactgacaaatggtgaggctcagtcagaacctccaccctcccccacaccaaagacaggggcagcgtagtattcaaaccagtattgtggtggggaataattgtatacatgtaaattatcaagccctatgagtggaagaattttttcaaattatttttgtccctctatatattgatttatattatgtataactatctctttatataaactatatataattatatatatataactatataattatatatatataactatatatataactatatatatgtatcccctagtattggatcatgaagagctcttcatgcattctttgcaaaggaggttataaagttacgccctcagaacatttataactataagaatgtgccagttaaagtgctcaacaggaaatatgacagtttaaaagcattgtaaaactcacatagcttacttctctctctaaagtgcaacaaggatgaatagaatgggccaaggtatgacaattaatggttctgcatgacctagccactgctgggggttttcttctataacgttgtccttgtgaaaacttttgtgaaattaaaaaaaaaggagttacaaattttattctgtt

SEQ ID NO: 7114 - protein, 1236 aa, Homo sapiens
MANGGGGGGGSSGGGGGGGGSSLRMSSNIHANHLSLDASSSSSSSSSSSSSSSSSSSSSSVHEPKMDALIIPVTMEVPCDSRGQRMWWAFLASSMVTFFGGLFIILLWRTLKYLWTVCCHCGGKTKEAQKINNGSSQADGTLKPVDEKEEAVAAEVGWMTSVKDWAGVMISAQTLTGRVLVVLVFALSIGALVIYFIDSSNPIESCQNFYKDFTLQIDMAFNVFFLLYFGLRFIAANDKLWFWLEVNSVVDFFTVPPVFVSVYLNRSWLGLRFLRALRLIQFSEILQFLNILKTSNSIKLVNLLSIFISTWLTAAGFIHLVENSGDPWENFQNNQALTYWECVYLLMVTMSTVGYGDVYAKTTLGRLFMVFFILGGLAMFASYVPEIIELIGNRKKYGGSYSAVSGRKHIVVCGHITLESVSNFLKDFLHKDRDDVNVEIVFLHNISPNLELEALFKRHFTQVEFYQGSVLNPHDLARVKIESADACLILANKYCADPDAEDASNIMRVISIKNYHPKIRIITQMLQYHNKAHLLNIPSWNWKEGDDAICLAELKLGFIAQSCLAQGLSTMLANLFSMRSFIKIEEDTWQKYYLEGVSNEMYTEYLSSAFVGLSFPTVCELCFVKLKLLMIAIEYKSANRESRILINPGNHLKIQEGTLGFFIASDAKEVKRAFFYCKACHDDITDPKRIKKCGCKRPKMSIYKRMRRACCFDCGRSERDCSCMSGRVRGNVDTLERAFPLSSVSVNDCSTSFRAFEDEQPSTLSPKKKQRNGGMRNSPNTSPKLMRHDPLLIPGNDQIDNMDSNVKKYDSTGMFHWCAPKEIEKVILTRSEAAMTVLSGHVVVCIFGDVSSALIGLRNLVMPLRASNFHYHELKHIVFVGSIEYLKREWETLHNFPKVSILPGTPLSRADLRAVNINLCDMCVILSANQNNIDDTSLQDKECILASLNIKSMQFDDSIGVLQANSQGFTPPGMDRSSPDNSPVHGMLRQPSITTGVNIPIITELVNDTNVQFLDQDDDDDPDTELYLTQPFACGTAFAVSVLDSLMSATYFNDNILTLIRTLVTGGATPELEALIAEENALRGGYSTPQTLANRDRCRVAQLALLDGPFADLGDGGCYGDLFCKALKTYNMLCFGIYRLRDAHLSTPSQCTKRYVITNPPYEFELVPTDLIFCLMQFDHNAGQSRASLSHSSHSSQSSSKKSSSVHSIPSTANRQNRPKSRESRDKQKYVQEERL

SEQ ID NO: 7115 - DNA, 6346 bp, Homo sapiens
cgcagcccggggcgagcggggcgcgggccggggagggggagctgcccgcgcactccatccccctcccccccgggcgggcggcggcggctcgctgtatatatctcggcgcaccccgccaggtcgcgcacagcgccccgagcccaggcgcctccccgcccccctcccgcgctccgcggcggcggcggcggcggcagcagtagcagcaatatggctgttgatgggtgtttggggtggcgctggcggcgggaggagctcccccgagcccctgcgccggctgcccgttgctagctatggcaaatggtggcggcggcggcggcggcagcagcggcggcggcggcggcggcggaggcagcagtcttagaatgagtagcaatatccacgcgaaccatctcagcctagacgcgtcctcctcctcctcctcctcctcttcctcttcttcttcttcctcctcctcttcctcctcgtcctcggtccacgagcccaagatggatgcgctcatcatcccggtgaccatggaggtgccgtgcgacagccggggccaacgcatgtggtgggctttcctggcctcctccatggtgactttcttcgggggcctcttcatcatcttgctctggcggacgctcaagtacctgtggaccgtgtgctgccactgcgggggcaagacgaaggaggcccagaagattaacaatggctcaagccaggcggatggcactctcaaaccagtggatgaaaaagaggaggcagtggccgccgaggtcggctggatgacctccgtgaaggactgggcgggggtgatgatatccgcccagacactgactggcagagtcctggttgtcttagtctttgctctcagcatcggtgcacttgtaatatacttcatagattcatcaaacccaatagaatcctgccagaatttctacaaagatttcacattacagatcgacatggctttcaacgtgttcttccttctctacttcggcttgcggtttattgcagccaacgataaattgtggttctggctggaagtgaactctgtagtggatttcttcacggtgccccccgtgtttgtgtctgtgtacttaaacagaagttggcttggtttgagatttttaagagctctgagactgatacagttttcagaaattttgcagtttctgaatattcttaaaacaagtaattccatcaagctggtgaatctgctctccatatttatcagcacgtggctgactgcagccgggttcatccatttggtggagaattcaggggacccatgggaaaatttccaaaacaaccaggctctcacctactgggaatgtgtctatttactcatggtcacaatgtccaccgttggttatggggatgtttatgcaaaaaccacacttgggcgcctcttcatggtcttcttcatcctcgggggactggccatgtttgccagctacgtccctgaaatcatagagttaataggaaaccgcaagaaatacgggggctcctatagtgcggttagtggaagaaagcacattgtggtctgcggacacatcactctggagagtgtttccaacttcctgaaggactttctgcacaaggaccgggatgacgtcaatgtggagatcgtttttcttcacaacatctcccccaacctggagcttgaagctctgttcaaacgacattttactcaggtggaattttatcagggttccgtcctcaatccacatgatcttgcaagagtcaagatagagtcagcagatgcatgcctgatccttgccaacaagtactgcgctgacccggatgcggaggatgcctcgaatatcatgagagtaatctccataaagaactaccatccgaagataagaatcatcactcaaatgctgcagtatcacaacaaggcccatctgctaaacatcccgagctggaattggaaagaaggtgatgacgcaatctgcctcgcagagttgaagttgggcttcatagcccagagctgcctggctcaaggcctctccaccatgcttgccaacctcttctccatgaggtcattcataaagattgaggaagacacatggcagaaatactacttggaaggagtctcaaatgaaatgtacacagaatatctctccagtgccttcgtgggtctgtccttccctactgtttgtgagctgtgttttgtgaagctcaagctcctaatgatagccattgagtacaagtctgccaaccgagagagccgtatattaattaatcctggaaaccatcttaagatccaagaaggtactttaggatttttcatcgcaagtgatgccaaagaagttaaaagggcatttttttactgcaaggcctgtcatgatgacatcacagatcccaaaagaataaaaaaatgtggctgcaaacggcttgaagatgagcagccgtcaacactatcaccaaaaaaaaagcaacggaatggaggcatgcggaactcacccaacacctcgcctaagctgatgaggcatgaccccttgttaattcctggcaatgatcagattgacaacatggactccaatgtgaagaagtacgactctactgggatgtttcactggtgtgcacccaaggagatagagaaagtcatcctggtcacaggctggatgccgtatctgggacctagggttttaatgacttgcctggatattggtgtagtatgcatgccaactgatattcaatcaacatctcctgccagcataaaaaagtttaaggagactcgaagtgaagctgccatgaccgtcctgagtggccatgtcgtggtctgcatctttggcgacgtcagctcagccctgatcggcctccggaacctggtgatgccgctccgtgccagcaactttcattaccatgagctcaagcacattgtgtttgtgggctctattgagtacctcaagcgggaatgggagacgcttcataacttccccaaagtgtccatattgcctggtacgccattaagtcgggctgatttaagggctgtcaacatcaacctctgtgacatgtgcgttatcctgtcagccaatcagaataatattgatgatacttcgctgcaggacaaggaatgcatcttggcgtcactcaacatcaaatctatgcagtttgatgacagcatcggagtcttgcaggctaattcccaagggttcacacctccaggaatggatagatcctctccagataacagcccagtgcacgggatgttacgtcaaccatccatcacaactggggtcaacatccccatcatcactgaactagtgaacgatactaatgttcagtttttggaccaagacgatgatgatgaccctgatacagaactgtacctcacgcagccctttgcctgtgggacagcatttgccgtcagtgtcctggactcactcatgagcgcgacgtacttcaatgacaatatcctcaccctgatacggaccctggtgaccggaggagccacgccggagctggaggctctgattgctgaggaaaacgcccttagaggtggctacagcaccccgcagacactggccaatagggaccgctgccgcgtggcccagttagctctgctcgatgggccatttgcggacttaggggatggtggttgttatggtgatctgttctgcaaagctctgaaaacatataatatgctttgttttggaatttaccggctgagagatgctcacctcagcacccccagtcagtgcacaaagaggtatgtcatcaccaacccgccctatgagtttgagctcgtgccgacggacctgatcttctgcttaatgcagtttgaccacaatgccggccagtcccgggccagcctgtcccattcctcccactcgtcgcagtcctccagcaagaagagctcctctgttcactccatcccatccacagcaaaccgacagaaccggcccaagtccagggagtcccgggacaaacagaagtacgtgcaggaagagcggctttgatatgtgtatccaccgccactgtgtgaaactgtatctgccactcatttccccagttggtgtttccaacaaagtaactttccctgttttcccctgtagtccccccctttttttttacacatatttgcatatgtatgatagtgtgcatgtggttgtcatttttatttcaccaccataaaacccttgagcacaacagcaaataagcagacggaccaaaagttatttatgattctgggggaaaaataacccaaaggcatgctccagacataaatagctcactgcaggaacgagttcacagattagaagggagcacttgtgatcaacgtcagttaggcagagcaagtttatttaatgtaaaagaaaagttgattctgatttatcaggattatcagggtgctttgggttttgattttgttgttgttgttgttttcctttctttctttttttatacacacaataagttagcacatgtttatttgaaacaagcaaccaaacagcaatgaaaacatattgattgtttccagtctctgggccgaagtattgcgaagcatttgaaaagctttcacgatttgtgtagatgattatgaaggacctgcttgttgcaagagaacatcagtgatttttttagttactcaccaaggccttttgtcccagagccagttccctctgggagttcttatgaacatttctcaccttaatatggaggagagaatagtattccaatcatggatgtatcaaattctagtcatttagtttaagtgaaaagaggtttgattgcatattaaattgttattctgtctccttatgttgccatatgaatagctattttttttctttcacttttgacatttgggatgaaaagccatatgtatcataaatatcagatgtaagtcattaaaaactgccttcctgggacttttacatcttttaaaaggtgaattacttaccttatgtacagaataaataatgctcaggaaagagcaagtatttttccatgcattctcaggggatctttttactcccctttgtttgattagttagggccccaatgccaggtaggaggaagggctggggcaatggtagagtgagaggaagacaaacccagctgcagatcatgcttttctaggagccgacatgctaaataaattagaatgtaggaggatcagccacagttgactcaacaaagacaaaagccagccaccaccttcaactgttggcacagctgtgcggtgctggctgtcccaatgcagaaagctggtgggaaggaattcctcatcatcactttctttaatgtagccaatttaggcagggtaatgacggcaatagagagctgctccttgtcattatgagacgtgggataagaagagtgcaacagtgagccaaacacattttggtatagttatttttttcttcttttgttttctttcttttttaacacttagtaagcatgagaggagaggtagaaaaatacccttttttcaacatatagttgtcagatgctttgtgcatgcaaatcatgctttaggcagtgcggtatttcttaaaaactggccaattcaccataaccaatttcccttatggatggactaggctggtatatacatatttgaaaagttttacttcaaagaattccatcgaatagaataggggtaaaagggaggaggaaaacatgtcacagctgtaccatctctaaaaaggtgtttttatggtgaatgttttggatttagattttggatcccccgtcccctcaagcatgatagttttggatatttgcttgctgtgtgaattgacaagcacttttactgacaaatggtgaggctcagtcagaacctccaccctcccccacaccaaagacaggggcagcgtagtattcaaaccagtattgtggtggggaataattgtatacatgtaaattatcaagccctatgagtggaagaattttttcaaattatttttgtccctctatatattgatttatattatgtataactatctctttatataaactatatataattatatatatataactatataattatatatatataactatatatataactatatatatgtatcccctagtattggatcatgaagagctcttcatgcattctttgcaaaggaggttataaagttacgccctcagaacatttataactataagaatgtgccagttaaagtgctcaacaggaaatatgacagtttaaaagcattgtaaaactcacatagcttacttctctctctaaagtgcaacaaggatgaatagaatgggccaaggtatgacaattaatggttctgcatgacctagccactgctgggggttttcttctataacgttgtccttgtgaaaacttttgtgaaattaaaaaaaaaggagttacaaattttattctgtt

SEQ ID NO: 7116 - protein, 1219 aa, Homo sapiens
MANGGGGGGGSSGGGGGGGGSSLRMSSNIHANHLSLDASSSSSSSSSSSSSSSSSSSSSSVHEPKMDALIIPVTMEVPCDSRGQRMWWAFLASSMVTFFGGLFIILLWRTLKYLWTVCCHCGGKTKEAQKINNGSSQADGTLKPVDEKEEAVAAEVGWMTSVKDWAGVMISAQTLTGRVLVVLVFALSIGALVIYFIDSSNPIESCQNFYKDFTLQIDMAFNVFFLLYFGLRFIAANDKLWFWLEVNSVVDFFTVPPVFVSVYLNRSWLGLRFLRALRLIQFSEILQFLNILKTSNSIKLVNLLSIFISTWLTAAGFIHLVENSGDPWENFQNNQALTYWECVYLLMVTMSTVGYGDVYAKTTLGRLFMVFFILGGLAMFASYVPEIIELIGNRKKYGGSYSAVSGRKHIVVCGHITLESVSNFLKDFLHKDRDDVNVEIVFLHNISPNLELEALFKRHFTQVEFYQGSVLNPHDLARVKIESADACLILANKYCADPDAEDASNIMRVISIKNYHPKIRIITQMLQYHNKAHLLNIPSWNWKEGDDAICLAELKLGFIAQSCLAQGLSTMLANLFSMRSFIKIEEDTWQKYYLEGVSNEMYTEYLSSAFVGLSFPTVCELCFVKLKLLMIAIEYKSANRESRILINPGNHLKIQEGTLGFFIASDAKEVKRAFFYCKACHDDITDPKRIKKCGCKRLEDEQPSTLSPKKKQRNGGMRNSPNTSPKLMRHDPLLIPGNDQIDNMDSNVKKYDSTGMFHWCAPKEIEKVILVTGWMPYLGPRVLMTCLDIGVVCMPTDIQSTSPASIKKFKETRSEAAMTVLSGHVVVCIFGDVSSALIGLRNLVMPLRASNFHYHELKHIVFVGSIEYLKREWETLHNFPKVSILPGTPLSRADLRAVNINLCDMCVILSANQNNIDDTSLQDKECILASLNIKSMQFDDSIGVLQANSQGFTPPGMDRSSPDNSPVHGMLRQPSITTGVNIPIITELVNDTNVQFLDQDDDDDPDTELYLTQPFACGTAFAVSVLDSLMSATYFNDNILTLIRTLVTGGATPELEALIAEENALRGGYSTPQTLANRDRCRVAQLALLDGPFADLGDGGCYGDLFCKALKTYNMLCFGIYRLRDAHLSTPSQCTKRYVITNPPYEFELVPTDLIFCLMQFDHNAGQSRASLSHSSHSSQSSSKKSSSVHSIPSTANRQNRPKSRESRDKQKYVQEERL

SEQ ID NO: 7117 - DNA, 6894 bp, Homo sapiens
ggcgcttgccgggccgctgccgaggggccctgcccacccctgcccagcccggagcccaggcgagccagcgcggcgagcctcctcccctcccgcctgggtcgtcctgagtccgcgcccgctccagttgctgcagctgctgctgctggcggctgcggggagcgcggggcgcgcgccgaagaggcttgggcggcgaggacggggacgaggaggagtcggaggcggcaaggaggaagagcgagcggaggccgaggggctcagcggcgtggcgacaggactagggggtcccgagaacatgggctagcaggcggccacgggccggcggccggacgcggtgaacctgccgcggccgggcgcgcactggcgcggcgagccggagccgagcgcagccgggggaggagggctggcgcaggggcgcccgggcggagggggccgattatccattattaacgagttaccacctaataagcggagagcggctcgttagccgcgcgggaggcgctcggggaagggggtcaccggccgagcgcagcgcacacccgtggcgcacggcgggcggcgcggcgccgaggacacccgggaccgcgcgcggagccggggcgggcccgggggcggcgcagaccccgggcgcgggcggcccgcggcgccccctggctctcggcgctcggggccagcgcagcccggggcgagcggggcgcgggccggggagggggagctgcccgcgcactccatccccctcccccccgggcgggcggcggcggctcgctgtatatatctcggcgcaccccgccaggtcgcgcacagcgccccgagcccaggcgcctccccgcccccctcccgcgctccgcggcggcggcggcggcggcagcagtagcagcaatatggctgttgatgggtgtttggggtggcgctggcggcgggaggagctcccccgagcccctgcgccggctgcccgttgctagctatggcaaatggtggcggcggcggcggcggcagcagcggcggcggcggcggcggcggaggcagcagtcttagaatgagtagcaatatccacgcgaaccatctcagcctagacgcgtcctcctcctcctcctcctcctcttcctcttcttcttcttcctcctcctcttcctcctcgtcctcggtccacgagcccaagatggatgcgctcatcatcccggtgaccatggaggtgccgtgcgacagccggggccaacgcatgtggtgggctttcctggcctcctccatggtgactttcttcgggggcctcttcatcatcttgctctggcggacgctcaagtacctgtggaccgtgtgctgccactgcgggggcaagacgaaggaggcccagaagattaacaatggctcaagccaggcggatggcactctcaaaccagtggatgaaaaagaggaggcagtggccgccgaggtcggctggatgacctccgtgaaggactgggcgggggtgatgatatccgcccagacactgactggcagagtcctggttgtcttagtctttgctctcagcatcggtgcacttgtaatatacttcatagattcatcaaacccaatagaatcctgccagaatttctacaaagatttcacattacagatcgacatggctttcaacgtgttcttccttctctacttcggcttgcggtttattgcagccaacgataaattgtggttctggctggaagtgaactctgtagtggatttcttcacggtgccccccgtgtttgtgtctgtgtacttaaacagaagttggcttggtttgagatttttaagagctctgagactgatacagttttcagaaattttgcagtttctgaatattcttaaaacaagtaattccatcaagctggtgaatctgctctccatatttatcagcacgtggctgactgcagccgggttcatccatttggtggagaattcaggggacccatgggaaaatttccaaaacaaccaggctctcacctactgggaatgtgtctatttactcatggtcacaatgtccaccgttggttatggggatgtttatgcaaaaaccacacttgggcgcctcttcatggtcttcttcatcctcgggggactggccatgtttgccagctacgtccctgaaatcatagagttaataggaaaccgcaagaaatacgggggctcctatagtgcggttagtggaagaaagcacattgtggtctgcggacacatcactctggagagtgtttccaacttcctgaaggactttctgcacaaggaccgggatgacgtcaatgtggagatcgtttttcttcacaacatctcccccaacctggagcttgaagctctgttcaaacgacattttactcaggtggaattttatcagggttccgtcctcaatccacatgatcttgcaagagtcaagatagagtcagcagatgcatgcctgatccttgccaacaagtactgcgctgacccggatgcggaggatgcctcgaatatcatgagagtaatctccataaagaactaccatccgaagataagaatcatcactcaaatgctgcagtatcacaacaaggcccatctgctaaacatcccgagctggaattggaaagaaggtgatgacgcaatctgcctcgcagagttgaagttgggcttcatagcccagagctgcctggctcaaggcctctccaccatgcttgccaacctcttctccatgaggtcattcataaagattgaggaagacacatggcagaaatactacttggaaggagtctcaaatgaaatgtacacagaatatctctccagtgccttcgtgggtctgtccttccctactgtttgtgagctgtgttttgtgaagctcaagctcctaatgatagccattgagtacaagtctgccaaccgagagagccgtatattaattaatcctggaaaccatcttaagatccaagaaggtactttaggatttttcatcgcaagtgatgccaaagaagttaaaagggcatttttttactgcaaggcctgtcatgatgacatcacagatcccaaaagaataaaaaaatgtggctgcaaacggcttgaagatgagcagccgtcaacactatcaccaaaaaaaaagcaacggaatggaggcatgcggaactcacccaacacctcgcctaagctgatgaggcatgaccccttgttaattcctggcaatgatcagattgacaacatggactccaatgtgaagaagtacgactctactgggatgtttcactggtgtgcacccaaggagatagagaaagtcatcctgactcgaagtgaagctgccatgaccgtcctgagtggccatgtcgtggtctgcatctttggcgacgtcagctcagccctgatcggcctccggaacctggtgatgccgctccgtgccagcaactttcattaccatgagctcaagcacattgtgtttgtgggctctattgagtacctcaagcgggaatgggagacgcttcataacttccccaaagtgtccatattgcctggtacgccattaagtcgggctgatttaagggctgtcaacatcaacctctgtgacatgtgcgttatcctgtcagccaatcagaataatattgatgatacttcgctgcaggacaaggaatgcatcttggcgtcactcaacatcaaatctatgcagtttgatgacagcatcggagtcttgcaggctaattcccaagggttcacacctccaggaatggatagatcctctccagataacagcccagtgcacgggatgttacgtcaaccatccatcacaactggggtcaacatccccatcatcactgaactagtgaacgatactaatgttcagtttttggaccaagacgatgatgatgaccctgatacagaactgtacctcacgcagccctttgcctgtgggacagcatttgccgtcagtgtcctggactcactcatgagcgcgacgtacttcaatgacaatatcctcaccctgatacggaccctggtgaccggaggagccacgccggagctggaggctctgattgctgaggaaaacgcccttagaggtggctacagcaccccgcagacactggccaatagggaccgctgccgcgtggcccagttagctctgctcgatgggccatttgcggacttaggggatggtggttgttatggtgatctgttctgcaaagctctgaaaacatataatatgctttgttttggaatttaccggctgagagatgctcacctcagcacccccagtcagtgcacaaagaggtatgtcatcaccaacccgccctatgagtttgagctcgtgccgacggacctgatcttctgcttaatgcagtttgaccacaatgccggccagtcccgggccagcctgtcccattcctcccactcgtcgcagtcctccagcaagaagagctcctctgttcactccatcccatccacagcaaaccgacagaaccggcccaagtccagggagtcccgggacaaacagaagtacgtgcaggaagagcggctttgatatgtgtatccaccgccactgtgtgaaactgtatctgccactcatttccccagttggtgtttccaacaaagtaactttccctgttttcccctgtagtccccccctttttttttacacatatttgcatatgtatgatagtgtgcatgtggttgtcatttttatttcaccaccataaaacccttgagcacaacagcaaataagcagacggaccaaaagttatttatgattctgggggaaaaataacccaaaggcatgctccagacataaatagctcactgcaggaacgagttcacagattagaagggagcacttgtgatcaacgtcagttaggcagagcaagtttatttaatgtaaaagaaaagttgattctgatttatcaggattatcagggtgctttgggttttgattttgttgttgttgttgttttcctttctttctttttttatacacacaataagttagcacatgtttatttgaaacaagcaaccaaacagcaatgaaaacatattgattgtttccagtctctgggccgaagtattgcgaagcatttgaaaagctttcacgatttgtgtagatgattatgaaggacctgcttgttgcaagagaacatcagtgatttttttagttactcaccaaggccttttgtcccagagccagttccctctgggagttcttatgaacatttctcaccttaatatggaggagagaatagtattccaatcatggatgtatcaaattctagtcatttagtttaagtgaaaagaggtttgattgcatattaaattgttattctgtctccttatgttgccatatgaatagctattttttttctttcacttttgacatttgggatgaaaagccatatgtatcataaatatcagatgtaagtcattaaaaactgccttcctgggacttttacatcttttaaaaggtgaattacttaccttatgtacagaataaataatgctcaggaaagagcaagtatttttccatgcattctcaggggatctttttactcccctttgtttgattagttagggccccaatgccaggtaggaggaagggctggggcaatggtagagtgagaggaagacaaacccagctgcagatcatgcttttctaggagccgacatgctaaataaattagaatgtaggaggatcagccacagttgactcaacaaagacaaaagccagccaccaccttcaactgttggcacagctgtgcggtgctggctgtcccaatgcagaaagctggtgggaaggaattcctcatcatcactttctttaatgtagccaatttaggcagggtaatgacggcaatagagagctgctccttgtcattatgagacgtgggataagaagagtgcaacagtgagccaaacacattttggtatagttatttttttcttcttttgttttctttcttttttaacacttagtaagcatgagaggagaggtagaaaaatacccttttttcaacatatagttgtcagatgctttgtgcatgcaaatcatgctttaggcagtgcggtatttcttaaaaactggccaattcaccataaccaatttcccttatggatggactaggctggtatatacatatttgaaaagttttacttcaaagaattccatcgaatagaataggggtaaaagggaggaggaaaacatgtcacagctgtaccatctctaaaaaggtgtttttatggtgaatgttttggatttagattttggatcccccgtcccctcaagcatgatagttttggatatttgcttgctgtgtgaattgacaagcacttttactgacaaatggtgaggctcagtcagaacctccaccctcccccacaccaaagacaggggcagcgtagtattcaaaccagtattgtggtggggaataattgtatacatgtaaattatcaagccctatgagtggaagaattttttcaaattatttttgtccctctatatattgatttatattatgtataactatctctttatataaactatatataattatatatatataactatataattatatatatataactatatatataactatatatatgtatcccctagtattggatcatgaagagctcttcatgcattctttgcaaaggaggttataaagttacgccctcagaacatttataactataagaatgtgccagttaaagtgctcaacaggaaatatgacagtttaaaagcattgtaaaactcacatagcttacttctctctctaaagtgcaacaaggatgaatagaatgggccaaggtatgacaattaatggttctgcatgacctagccactgctgggggttttcttctataacgttgtccttgtgaaaacttttgtgaaattaaaaaaaaaggagttacaaattttattctgtt

SEQ ID NO: 7118 - protein, 1178 aa, Homo sapiens
MANGGGGGGGSSGGGGGGGGSSLRMSSNIHANHLSLDASSSSSSSSSSSSSSSSSSSSSSVHEPKMDALIIPVTMEVPCDSRGQRMWWAFLASSMVTFFGGLFIILLWRTLKYLWTVCCHCGGKTKEAQKINNGSSQADGTLKPVDEKEEAVAAEVGWMTSVKDWAGVMISAQTLTGRVLVVLVFALSIGALVIYFIDSSNPIESCQNFYKDFTLQIDMAFNVFFLLYFGLRFIAANDKLWFWLEVNSVVDFFTVPPVFVSVYLNRSWLGLRFLRALRLIQFSEILQFLNILKTSNSIKLVNLLSIFISTWLTAAGFIHLVENSGDPWENFQNNQALTYWECVYLLMVTMSTVGYGDVYAKTTLGRLFMVFFILGGLAMFASYVPEIIELIGNRKKYGGSYSAVSGRKHIVVCGHITLESVSNFLKDFLHKDRDDVNVEIVFLHNISPNLELEALFKRHFTQVEFYQGSVLNPHDLARVKIESADACLILANKYCADPDAEDASNIMRVISIKNYHPKIRIITQMLQYHNKAHLLNIPSWNWKEGDDAICLAELKLGFIAQSCLAQGLSTMLANLFSMRSFIKIEEDTWQKYYLEGVSNEMYTEYLSSAFVGLSFPTVCELCFVKLKLLMIAIEYKSANRESRILINPGNHLKIQEGTLGFFIASDAKEVKRAFFYCKACHDDITDPKRIKKCGCKRLEDEQPSTLSPKKKQRNGGMRNSPNTSPKLMRHDPLLIPGNDQIDNMDSNVKKYDSTGMFHWCAPKEIEKVILTRSEAAMTVLSGHVVVCIFGDVSSALIGLRNLVMPLRASNFHYHELKHIVFVGSIEYLKREWETLHNFPKVSILPGTPLSRADLRAVNINLCDMCVILSANQNNIDDTSLQDKECILASLNIKSMQFDDSIGVLQANSQGFTPPGMDRSSPDNSPVHGMLRQPSITTGVNIPIITELVNDTNVQFLDQDDDDDPDTELYLTQPFACGTAFAVSVLDSLMSATYFNDNILTLIRTLVTGGATPELEALIAEENALRGGYSTPQTLANRDRCRVAQLALLDGPFADLGDGGCYGDLFCKALKTYNMLCFGIYRLRDAHLSTPSQCTKRYVITNPPYEFELVPTDLIFCLMQFDHNAGQSRASLSHSSHSSQSSSKKSSSVHSIPSTANRQNRPKSRESRDKQKYVQEERL

SEQ ID NO: 7119 - DNA, 3178 bp, Homo sapiens
gcatgtccagagggttgagccctactcagcctcatctgggtactgactgggggccaggactcaggtccagccagtttcacagcagagcctgtgctcttggccatgatgataatggcactttcccacccagtccttttttttttcaaatttatttattttgagtgctgcattctctaccttttatagttaagaatgttttcaaggtctggtgggaggttttcgtgttttgcatccatgaatgcagtcagtgtttgcctgtaaatagggagggtcaattctcttgggctcctctgctgtgcacctcattgcccatagaatgctactctcggatcttgcactagagcactggatgatgaagtgaagccttgcagagacctgtgagtctgggggaggaaaccaagactccagggtggagtgattggctgtatgtttcacctgcagccacgcgaggcccagaagtcttccagtgctttggaggttcacaagaaatatggtgactcaactggaaccacattagaggaggcccagaagattaacaatggctcaagccaggcggatggcactctcaaaccagtggatgaaaaagaggaggcagtggccgccgaggtcggctggatgacctccgtgaaggactgggcgggggtgatgatatccgcccagacactgactggcagagtcctggttgtcttagtctttgctctcagcatcggtgcacttgtaatatacttcatagattcatcaaagtgagtattcaaatatactttcttgccctcgtttcataaacaatcatgagcctttacattgatccatttatttaccttgacaccaacctttgcaagaccttctgagtgcagaagattttggaggaagctagtgctgtactgtactgattttctaaatgggaaagaaagttctcagaaggaaggctattttgagtctgctggcataggagggtgaggtatatgaggtcaagtcttcttgctgggtattacttatttttaaagagctgtttcctaatgatgtatttgcactgaagatgtcaagtagttaagatgacttgatgggaatttgcaacttctgggagggtgacagtttcccacagatgagggtctgagccattcttgctatggttgtaggatccttttctcaattgggtttccaatgctttgatcttactggaggtcagattagaaagcatgatgctatcctttcacctgccaatcgggtattcagctgaagcattgcacgctggtgcttcttgacttgtgaaggtaaggagatggatggaggagttcatcatgacccccagaggtggaggccctggccatttgaggacttctagagtggacactcatgcagactccttgggtgccagccgaatggactggtgctccagagtgagcctgggtgacagatgataaagaccttgcagaaggatgaagagggcacagactagaactgcaatgttgcagccagttctgccctgattcctgcaggtgccaaccctgaggaaataatttgttccaactatactattgcaaatcatgaagttgatggcatctgggaaacaagctggagtctaactcattttctgttgtggcgtgaacttggcaactctggtgacaatggccttgagcttgttgcctttattgtccactgtgtgagtgttttgaactttaaactctatccctggcatggttggctactagactttgatactaggaaacctgcttggtgtgcctgttggctcagactctggtgtgcctgaattctgagcttagtgctcctttcctgtggcttgggatggtggtaatttcatgcacagctaaactcagaatttctcagagccatctggtcaccggccaaggattttgtgcatttgggtggagaggccaaaatgtcagtcagggaaaacaaagcaaatatctcctttaataacctgtctctgggaatcagccaagtttaagcctatcagaggtccttcagcccaccccacatgcgaggctgggctgccctcacccatctcagatggagagtcctttaaacgctgtcaggagacaagattccacatgctccctccatcagctctcccgagccaagaaagagaagagcttgtttaagtttggaagactcccattggcatgtcattgaaggtaagcccccttttaaatatttactgttaatgattctggatcctatttgtattgaactgaagatcctctaaagcccctggtcttatttctccaatctctctccaggggtgttcttacatgtcgtggggtgcagaccctgccaacttccatgctgagactcaggaaagaggtttgggcttgaagcttgtatgtcccagagaaagaaaaccctaatgtggaggtgagtgtgttgatgggttagaagtccagatgcctcagccagcaccttccttcccttttcgtttttttattttttttatttttttaaccttttgtccctctgtatttctcagaaataaaatgctctttagatggatttggattgtgtctttttttacagtctactatgaggcagtcttttgttctgtagatcctggtgttctctgtttccgtgtgagaagatgaaaaggaatgaaattccccaatgcaccctcttcccctaatgtcctacaccatctcaatgtcctttggctttaattgtgatccttctaggccttggcgaagatggcactgggagtcctctctgattctggtttcttttatgaacttgcaaatagtctatcccaaggatggaacttcagtcctgtcctcaccttttcctggcaaaaatgcccataaggttagaaacaaggctattcccattctgcctgaggactgtcgtagcctcatcccagctttagcctttcttctctgttgctaaactgtgtgatttggcatagcaaggctttgtttataagaagaccttctggttatttatatagaaacttttcattttcatgacttcattttgttctgagagcatatccgaagattctgtccggtggcaggcccaatcagtggattcagcacaagggagttttccatcttccttgggaaagacggcaagcaagctcagttttagtttgggagagaattagtgtagaatctctaaagccatctctatggtaagtccatagatttccaggaataaaacacagtgaaaccta

SEQ ID NO: 7120 - protein, 106 aa, Homo sapiens
MFHLQPREAQKSSSALEVHKKYGDSTGTTLEEAQKINNGSSQADGTLKPVDEKEEAVAAEVGWMTSVKDWAGVMISAQTLTGRVLVVLVFALSIGALVIYFIDSSK

SEQ ID NO: 7121 - DNA, 422 bp, Homo sapiens
caggttgcaacctattagtggaccatgagatcagtttcatgagtcctgaccgtcattttataaatgaaatgagaatggaatgaaatgaagtggagtggagtgggatggaatgagatggaactagcaggaaataatagaatattccagaatagaaactatcaaagtacatcacatgtagtaaaggattagaaagcaaaagcaatctgaagattgaaagtcagaagcaaagttagaatggtgatttttttcccccaacccaacttggaagaatttgtctttggagaaccaacctaatcaaataaagtagcatcaatttactggagacataatccaacttgcataattgtcctggctggtttacaccacagctgttcatatgacatggttcattaaataataaagtcttcatcaggctctcctgc

SEQ ID NO: 7122 - protein, 34 aa, Homo sapiens
MKWSGVGWNEMELAGNNRIFQNRNYQSTSHVVKD

SEQ ID NO: 7123 - DNA, 1991 bp, Homo sapiens
ccgcgccccgcccccgccgctcggacggcccgagtcgcgccctcccgccccgcgccgcggaacttgctctaacttcctcggccgagccgggccgcgccgccgctgccgccgccgcgcgcggattctgcttctcagaagatgcactattatagatactctaacgccaaggtcagctgctggtacaagtacctccttttcagctacaacatcatcttctggttggctggagttgtcttccttggagtcgggctgtgggcatggagcgaaaagggtgtgctgtccgacctcaccaaagtgacccggatgcatggaatcgaccctgtggtgctggtcctgatggtgggcgtggtgatgttcaccctggggttcgccggctgcgtgggggctctgcgggagaatatctgcttgctcaactttttctgtggcaccatcgtgctcatcttcttcctggagctggctgtggccgtgctggccttcctgttccaggactgggtgagggaccggttccgggagttcttcgagagcaacatcaagtcctaccgggacgatatcgatctgcaaaacctcatcgactcccttcagaaagctaaccagtgctgtggcgcatatggccctgaagactgggacctcaacgtctacttcaattgcagcggtgccagctacagccgagagaagtgcggggtccccttctcctgctgcgtgccagatcctgcgcaaaaagttgtgaacacacagtgtggatatgatgtcaggattcagctgaagagcaagtgggatgagtccatcttcacgaaaggctgcatccaggcgctggaaagctggctcccgcggaacatttacattgtggctggcgtcttcatcgccatctcgctgttgcagatatttggcatcttcctggcaaggacgctgatctcagacatcgaggcagtgaaggccggccatcacttctgaggagcagagttgagggagccgagctgagccacgctgggaggccagagcctttctctgccatcagccctacgtccagagggagaggagccgacacccccagagccagtgccccatcttaagcatcagcgtgacgtgacctctctgtttctgcttgctggtgctgaagaccaagggtcccccttgttacctgcccaaacttgtgactgcatccctctggagtctacccagagacagagaatgtgtctttatgtgggagtggtgactctgaaagacagagagggctcctgtggctgccaggagggcttgactcagaccccctgcagctcaagcatgtctgcaggacaccctggtcccctctccactggcatccaggcatctctctccatcaagcaaagcagcatgggggcctgcccgtaacgggaggcggacgtggccccgctgggcctctgagtgccagcgcagtctgctgggacatgcacatatcaggggttgtttgcagggctcctcttgtggccatgtacccagggctggctggcctgccatttgcctctccccggagacagccgttcttctgcaaccacaccccgtgcctagccacaaccccaggctgcagctgctcagaagctccaggcattttgtttctggtgaccgcccctaatgggatatcggtgatcactggtccacccttcctgtcagggcttttctggggctgctcttggaaatgaagtcttaagtactgaataactcccctggggatagctggggcatttgtctagctgggctactttctaacactttgccatagctcagaccacttctcatcgttcagggatggactgcaaccttaatttacttgccggagtgtacattctagtgtggtgtatactggtggctgttgatgatgatttttttttttttacacaattctctgtagactaggagaagaatgcttgtgtttttcggaagtgtgatgcttctctttgactgccaaactcttttatggaatatatctttatattaatgctgttttggtcattttt

SEQ ID NO: 7124 - protein, 270 aa, Homo sapiens
MHYYRYSNAKVSCWYKYLLFSYNIIFWLAGVVFLGVGLWAWSEKGVLSDLTKVTRMHGIDPVVLVLMVGVVMFTLGFAGCVGALRENICLLNFFCGTIVLIFFLELAVAVLAFLFQDWVRDRFREFFESNIKSYRDDIDLQNLIDSLQKANQCCGAYGPEDWDLNVYFNCSGASYSREKCGVPFSCCVPDPAQKVVNTQCGYDVRIQLKSKWDESIFTKGCIQALESWLPRNIYIVAGVFIAISLLQIFGIFLARTLISDIEAVKAGHHF

SEQ ID NO: 7125 - DNA, 1273 bp, Homo sapiens
ccgcgccccgcccccgccgctcggacggcccgagtcgcgccctcccgccccgcgccgcggaacttgctctaacttcctcggccgagccgggccgcgccgccgctgccgccgccgcgcgcggattctgcttctcagaagatgcactattatagatactctaacgccaaggtcagctgctggtacaagtacctccttttcagctacaacatcatcttctggttggctggagttgtcttccttggagtcgggctgtgggcatggagcgaaaagggtgtgctgtccgacctcaccaaagtgacccggatgcatggaatcgaccctgtggtgctggtcctgatggtgggcgtggtgatgttcaccctggggttcgccggctgcgtgggggctctgcgggagaatatctgcttgctcaactttttctgtggcaccatcgtgctcatcttcttcctggagctggctgtggccgtgctggccttcctgttccaggactgggtgagggaccggttccgggagttcttcgagagcaacatcaagtcctaccgggacgatatcgatctgcaaaacctcatcgactcccttcagaaagctaaccagtgctgtggcgcatatggcctcactgtcttctggtcttggtgctactgaaattgtcacccagaatttgaatcctgaccctccccactgcaagcccagggagccccagcccaagatggccagcctgaaactgttggccagggctcctcttgtggccatgtacccagggctggctggcctgccatttgcctctccccggagacagccgttcttctgcaaccacaccccgtgcctagccacaaccccaggctgcagctgctcagaagctccaggcattttgtttctggtgaccgcccctaatgggatatcggtgatcactggtccacccttcctgtcagggcttttctggggctgctcttggaaatgaagtcttaagtactgaataactcccctggggatagctggggcatttgtctagctgggctactttctaacactttgccatagctcagaccacttctcatcgttcagggatggactgcaaccttaatttacttgccggagtgtacattctagtgtggtgtatactggtggctgttgatgatgatttttttttttttacacaattctctgtagactaggagaagaatgcttgtgtttttcggaagtgtgatgcttctctttgactgccaaactcttttatggaatatatctttatattaatgctgttttggtcattttt

SEQ ID NO: 7126 - protein, 167 aa, Homo sapiens
MHYYRYSNAKVSCWYKYLLFSYNIIFWLAGVVFLGVGLWAWSEKGVLSDLTKVTRMHGIDPVVLVLMVGVVMFTLGFAGCVGALRENICLLNFFCGTIVLIFFLELAVAVLAFLFQDWVRDRFREFFESNIKSYRDDIDLQNLIDSLQKANQCCGAYGLTVFWSWCY

SEQ ID NO: 7127 - DNA, 2624 bp, Homo sapiens
ccgcgccccgcccccgccgctcggacggcccgagtcgcgccctcccgccccgcgccgcggaacttgctctaacttcctcggccgagccgggccgcgccgccgctgccgccgccgcgcgcggattctgcttctcagaagatgcactattatagatactctaacgccaaggtcagctgctggtacaagtacctccttttcagctacaacatcatcttctggttggctggagttgtcttccttggagtcgggctgtgggcatggagcgaaaagggtgtgctgtccgacctcaccaaagtgacccggatgcatggaatcgaccctgtggtgctggtcctgatggtgggcgtggtgatgttcaccctggggttcgccggctgcgtgggggctctgcgggagaatatctgcttgctcaactttttctgtggcaccatcgtgctcatcttcttcctggagctggctgtggccgtgctggccttcctgttccaggactgggtgagggaccggttccgggagttcttcgagagcaacatcaagtcctaccgggacgatatcgatctgcaaaacctcatcgactcccttcagaaagctaaccagtgctgtggcgcatatggccctgaagactgggacctcaacgtctacttcaattgcagcggtgccagctacagccgagagaagtgcggggtccccttctcctgctgcgtgccagatcctgcgcaaaaagttgtgaacacacagtgtggatatgatgtcaggattcagctgaagagcaagtgggatgagtccatcttcacgaaaggctgcatccaggcgctggaaagctggctcccgcggaacatttacattgtggctggcgtcttcatcgccatctcgctgttgcagatatttggcatcttcctggcaaggacgctgatctcagacatcgaggcagtgaaggccggccatcacttctgaggagcagagttgagggagccgagctgagccacgctgggaggccagagcctttctctgccatcagccctacgtccagagggagaggagccgacacccccagagccagtgccccatcttaagcatcagcgtgacgtgacctctctgtttctgcttgctggtgctgaagaccaagggtcccccttgttacctgcccaaacttgtgactgcatccctctggagtctacccagagacagagaatgtgtctttatgtgggagtggtgactctgaaagacagagagggctcctgtggctgccaggagggcttgactcagaccccctgcagctcaagcatgtctgcaggacaccctggtcccctctccactggcatccagacatctgctttgggtcatccacatctgtgggtgggccgtgggtagagggacccacaggcgtggacagggcatctctctccatcaagcaaagcagcatgggggcctgcccgtaacgggaggcggacgtggccccgctgggcctctgagtgccagcgcagtctgctgggacatgcacatatcaggggttgtttgcaggatcctcagccatgttcaagtgaagtaagcctgagccagtgcgtggactggtgccacgggagtgccttgtccactgtccccctgtgtccaccagctattctcctggcgccggaactgcctctggtcttgatagcattaagccctgatggcgccggtggcgcggtgggcatggttcttcactgagagccggctctccttttcttaaagtgtgtaaatagtttatttataggggtaagaatgttctcacaccatttcacttcctcttcctctcctccagcattctcctctgagcagccttagatagtgtccatggctggagccgaccctttgagtccccttgagtgtcttaagaaccagcccacaacagcctctctttctcctccacatactgcagcctccctccatgcatcccacatacaagcactcccccactccccagcgtggcctcactgtcttctggtcttggtgctactgaaattgtcacccagaatttgaatcctgaccctccccactgcaagcccagggagccccagcccaagatggccagcctgaaactgttggccagggctcctcttgtggccatgtacccagggctggctggcctgccatttgcctctccccggagacagccgttcttctgcaaccacaccccgtgcctagccacaaccccaggctgcagctgctcagaagctccaggcattttgtttctggtgaccgcccctaatgggatatcggtgatcactggtccacccttcctgtcagggcttttctggggctgctcttggaaatgaagtcttaagtactgaataactcccctggggatagctggggcatttgtctagctgggctactttctaacactttgccatagctcagaccacttctcatcgttcagggatggactgcaaccttaatttacttgccggagtgtacattctagtgtggtgtatactggtggctgttgatgatgatttttttttttttacacaattctctgtagactaggagaagaatgcttgtgtttttcggaagtgtgatgcttctctttgactgccaaactcttttatggaatatatctttatattaatgctgttttggtcattttt

SEQ ID NO: 7128 - protein, 270 aa, Homo sapiens; identical to SEQ ID NO: 7124

SEQ ID NO: 7129 - DNA, 2694 bp, Homo sapiens
ccgcgccccgcccccgccgctcggacggcccgagtcgcgccctcccgccccgcgccgcggaacttgctctaacttcctcggccgagccgggccgcgccgccgctgccgccgccgcgcgcggattctgcttctcagaagatgcactattatagatactctaacgccaaggtcagctgctggtacaagtacctccttttcagctacaacatcatcttctggttggctggagttgtcttccttggagtcgggctgtgggcatggagcgaaaagggtgtgctgtccgacctcaccaaagtgacccggatgcatggaatcgaccctgtggtgctggtcctgatggtgggcgtggtgatgttcaccctggggttcgccggctgcgtgggggctctgcgggagaatatctgcttgctcaactttttctgtggcaccatcgtgctcatcttcttcctggagctggctgtggccgtgctggccttcctgttccaggactgggtgagggaccggttccgggagttcttcgagagcaacatcaagtcctaccgggacgatatcgatctgcaaaacctcatcgactcccttcagaaagctaaccagtgctgtggcgcatatggcctcactgtcttctggtcttggtgctactgaaattgtcacccagaatttgaatcctgaccctccccactgcaagcccagggagccccagcccaagatggccagcctgaaactgttggccagggctcctcttgtggccatgtacccagggctggctggcctgccatttgcctctccccggagacagccgttcttctgcaaccacaccccgtgcctagccacaaccccaggctgcagctgctcagaagctccaggcattttgtttctggtgaccgcccctaatgggatatcggtgatcactggtccacccttcctgtcagggcttttctggggctgctcttggaaatgaagtcttaagtactgaataactcccctggggatagctggggcatttgtctagctgggctactttctaacactttgccatagctcagaccacttctcatcgttcagggatggactgcaaccttaatttacttgccggagtgtacattctagtgtggtgtatactggtggctgttgatgatgatttttttttttttacacaattctctgtagactaggagaagaatgcttgtgtttttcggaagtgtgatgcttctctttgactgccaaactcttttatggaatatatctttatattaatgctgttttggtcatttttgtttggggtcactattgagatattgctaagcatctcagtggtaaacgcggctgccagaggaaccaagggatagggtatgtagaccttacagaaggatggatggtaaaggcagtccatcatcagcacaatctgacttacatttcattgagtaattttttttttttttaagattctgtatggcagcactttcagttgcccttgtgtgccggccacagccgcacaagttggcttgtggtttatcccccgctataagtgagagctggagaaacttcaactccataggtctagaggaaacattgttttaggttatttctgtccacccctgtgcgatactatttattgatccaagcagaagagcttggggacactgagtcgaagtggggacatgggattgaagcctgggcactgctgctgcatgagctgtgtgtcctgggtgtgccggcctttctgtgaagggggttggtggcagtgcccacctcactagatgcctctgacccagcctcccctgggggagtgggtggccacagaccctccctgccagagctcctggaaggctcctgcaggcctgacccatctattcctgtagacctggtttaggatgaagtctcggtgcgatttttgcagagttgggtttatctttcaactatagacccttctggctgttctcagccatatcatgtgactctgaatagttggatgaggaatggaaagaaagcaaggatgagagccggtcacgtggcagtctccgcccagcatcggctgtccgcacagaggcacagggcaggcctcctgtgcactccccacctagcactggcctgtcctgaatccccgccttccctggttggaggccagctgtggcatttgcaccctcttctcacctcaccatgcacatgctaactttaaagccttggggtctttcctgtaccccctcctcaaccctggtccaccccctctcaggatcttgtcaacgttatttttcctgtcccgtcttcctatcgctggccttcctttcccatcctaaaaacttgccgaggccctatggctccctccctttctttcccaggcagcttcttatctgggctgtctgtaccccttcctttgcaccacccaccatgccccacgtagctgaaagctgcttatcccaattgtcaactctggccttcttcagcctctgtagcaccagacactgcacctcctgaatgtcctctgcttctctgcttcagaggcccaggctcgccagttctctgacctctcccatatgtctgcttaggactctgctgcagctgtcctcaccagcctccggggaatcccactacccacagggcagggctgtgggctgggctgaaaaaccatctgcatggtccacaagaagcctggcactgggtttccccatgaataacaatgaaaattaatggatgcac

SEQ ID NO: 7130 - protein, 167 aa, Homo sapiens; identical to SEQ ID NO: 7126

SEQ ID NO: 7131 - DNA, 4809 bp, Homo sapiens
ccgcgccccgcccccgccgctcggacggcccgagtcgcgccctcccgccccgcgccgcggaacttgctctaacttcctcggccgagccgggccgcgccgccgctgccgccgccgcgcgcggattctgcttctcagaagatgcactattatagatactctaacgccaaggtcagctgctggtacaagtacctccttttcagctacaacatcatcttctggttggctggagttgtcttccttggagtcgggctgtgggcatggagcgaaaagggtgtgctgtccgacctcaccaaagtgacccggatgcatggaatcgaccctgtggtgctggtcctgatggtgggcgtggtgatgttcaccctggggttcgccggctgcgtgggggctctgcgggagaatatctgcttgctcaactttttctgtggcaccatcgtgctcatcttcttcctggagctggctgtggccgtgctggccttcctgttccaggactgggtgagggaccggttccgggagttcttcgagagcaacatcaagtcctaccgggacgatatcgatctgcaaaacctcatcgactcccttcagaaagctaaccagtgctgtggcgcatatggcctcactgtcttctggtcttggtgctactgaaattgtcacccagaatttgaatcctgaccctccccactgcaagcccagggagccccagcccaagatggccagcctgaaactgttggccagggctcctcttgtggccatgtacccagggctggctggcctgccatttgcctctccccggagacagccgttcttctgcaaccacaccccgtgcctagccacaaccccaggctgcagctgctcagaagctccaggcattttgtttctggtgaccgcccctaatgggatatcggtgatcactggtccacccttcctgtcagggcttttctggggctgctcttggaaatgaagtcttaagtactgaataactcccctggggatagctggggcatttgtctagctgggctactttctaacactttgccatagctcagaccacttctcatcgttcagggatggactgcaaccttaatttacttgccggagtgtacattctagtgtggtgtatactggtggctgttgatgatgatttttttttttttacacaattctctgtagactaggagaagaatgcttgtgtttttcggaagtgtgatgcttctctttgactgccaaactcttttatggaatatatctttatattaatgctgttttggtcatttttgtttggggtcactattgagatattgctaagcatctcagtggtaaacgcggctgccagaggaaccaagggatagggtatgtagaccttacagaaggatggatggtaaaggcagtccatcatcagcacaatctgacttacatttcattgagtaattttttttttttttaagattctgtatggcagcactttcagttgcccttgtgtgccggccacagccgcacaagttggcttgtggtttatcccccgctataagtgagagctggagaaacttcaactccataggtctagaggaaacattgttttaggttatttctgtccacccctgtgcgatactatttattgatccaagcagaagagcttggggacactgagtcgaagtggggacatgggattgaagcctgggcactgctgctgcatgagctgtgtgtcctgggtgtgccggcctttctgtgaagggggttggtggcagtgcccacctcactagatgcctctgacccagcctcccctgggggagtgggtggccacagaccctccctgccagagctcctggaaggctcctgcaggcctgacccatctattcctgtagacctggtttaggatgaagtctcggtgcgatttttgcagagttgggtttatctttcaactatagacccttctggctgttctcagccatatcatgtgactctgaatagttggatgaggaatggaaagaaagcaaggatgagagccggtcacgtggcagtctccgcccagcatcggctgtccgcacagaggcacagggcaggcctcctgtgcactccccacctagcactggcctgtcctgaatccccgccttccctggttggaggccagctgtggcatttgcaccctcttctcacctcaccatgcacatgctaactttaaagccttggggtctttcctgtaccccctcctcaaccctggtccaccccctctcaggatcttgtcaacgttatttttcctgtcccgtcttcctatcgctggccttcctttcccatcctaaaaacttgccgaggccctatggctccctccctttctttcccaggcagcttcttatctgggctgtctgtaccccttcctttgcaccacccaccatgccccacgtagctgaaagctgcttatcccaattgtcaactctggccttcttcagcctctgtagcaccagacactgcacctcctgaatgtcctctgcttctctgcttcagaggcccaggctcgccagttctctgacctctcccatatgtctgcttaggactctgctgcagctgtcctcaccagcctccggggaatcccactacccacagggcagggctgtgggctgggctgaaaaaccatctgcatggtccacaagaagcctggcactgggtttccccatgaataacaatgaaaattaatggatgcacaaccttcctggaacgtggaatttctctgggagattccatgcagaggccactggggaggtggcaggcatgcatgtgactgtaggtggctgcagtgttggaaggctcccagcagagcagagagggtgtcagtctcatcagggaacccacctgatggcttctcagccagcagtctcagaggaacatagacgactgctgagaaaggagggaggcagcagtggtcccagcacctgaggcatcctgctgtcatgggaaggtctccgcccaaatgtcagatgcatcagcctgtcacccgctggtccagagctttcagctgtactggtagggggtgggtggtggagtgctgaatgaccttcacaggtgggcctttccagctctagggtcttacgggtgtcggtccacagaaccacggtttttaggttgtgtgtccggggctatgggaacctgtcccccatgatggatcttggtagagacacttccctctgtcatcgtgcccaggaggatgctgcaggtgactacctgcagccctgttctcattcatttggatgccctccagaaatctggggagccatacacctttagagccttttttgctccttatcaagttggcaaggcttggccaattcctgttcaaggctgcattaaaggcatgttcaccatcctggctaatacggtgaaaccccttctctactaaaaatacaaaaaaattagccgggcttggtggcgggtgcctgtagtcccagctactccggaggctgaggcaggggaatggtgtgaacccaggaggcggagcttgcagtgagccgagatcacaccactgcactccagcctgggctcaaaaaagaaaaaaaaaaaaaaaaaaaggcccgttcattctcaaatgcttttggcgtctccagggtgcctcaggaaaacatgaagtgggcattgtagaacttggggctactgtgtaactttggaagaaaaagttaagggtacttttaagtggatactgttttgatgaaattgccaacttcagggagcccagcttggagaaggaggacgtgagtattccttacaaggctccgaaacaattctttcttcacttagttttctttctgtgctctgcatcttatattccagcagggtcttccaatgcatggtttaataactactagaactggccaggtgcagtggctcacgcctgtaatcccagaactttgggaggctaagacaggcagatcacttgaggccaggagttcgagaccagcctggacaacatggtgatacccagtttctactaaaaatacaaaaattagtcgggcatggtgatgtgcacctgtagtcccagctgctcgggaggctgaggcaggagaatcgcttgaacccgggagacagaggttgcaacgagccaagatcgagccactgcgctccggcctgggtgacaggagactccatctcaaaaaataaaattaaaaaaaaactactacaataaattatcaccttggactgtataaaacaacttttaaactagtctttttaaaaagtacacttaaataaaaatctaaacataagagaatgtaaagtgaaaagtgaaagtatgtcttctgttacgcagaggtaactactattaggaatccttcctgaaaatgtccatgcatctactcaggtcatcacacccatggaatcattttacatactattttatgagtgttacttaatatactgatccacagtgcgttttcacggtcacgccatcagttgtaggagtgtgccaagaacagatgggccttgcctttgtaccagaggagtccatttacagttgcaggtaatagaaaacccaattcagactggcctaaacaatgaggggaggttttggctcttgaaactggaaagtcccaaggtggggtgagtttcaggtttgggttgatccaagtggctcagtgacgtcaacaggatcttgtttccatttctctgccttccacagcctccccttcatctatggtggagggaaggagtctaccacagacaaaccccgagcctccccctgatgggtggtgtggtggtgaagccagcaagggaagggatccccggacacacccctcctcatgctttatcccactgaaaccatgcggctgt

SEQ ID NO: 7132 - protein, 167 aa, Homo sapiens; identical to SEQ ID NO: 7126

SEQ ID NO: 7133 - DNA, 2241 bp, Homo sapiens
cgccgctcggacggcccgagtcgcgccctcccgccccgcgccgcggaacttgctctaacttcctcggccgagccgggccgcgccgccgctgccgccgccgcgcgcggattctgcttctcagaagatgcactattatagatactctaacgccaaggtcagctgctggtacaagtacctccttttcagctacaacatcatcttctggaaccagtgctgtggcgcatatggccctgaagactgggacctcaacgtctacttcaattgcagcggtgccagctacagccgagagaagtgcggggtccccttctcctgctgcgtgccagatcctgcgcaaaaagttgtgaacacacagtgtggatatgatgtcaggattcagctgaagagcaagtgggatgagtccatcttcacgaaaggctgcatccaggcgctggaaagctggctcccgcggaacatttacattgtggctggcgtcttcatcgccatctcgctgttgcagatatttggcatcttcctggcaaggacgctgatctcagacatcgaggcagtgaaggccggccatcacttctgaggagcagagttgagggagccgagctgagccacgctgggaggccagagcctttctctgccatcagccctacgtccagagggagaggagccgacacccccagagccagtgccccatcttaagcatcagcgtgacgtgacctctctgtttctgcttgctggtgctgaagaccaagggtcccccttgttacctgcccaaacttgtgactgcatccctctggagtctacccagagacagagaatgtgtctttatgtgggagtggtgactctgaaagacagagagggctcctgtggctgccaggagggcttgactcagaccccctgcagctcaagcatgtctgcaggacaccctggtcccctctccactggcatccagacatctgctttgggtcatccacatctgtgggtgggccgtgggtagagggacccacaggcgtggacagggcatctctctccatcaagcaaagcagcatgggggcctgcccgtaacgggaggcggacgtggccccgctgggcctctgagtgccagcgcagtctgctgggacatgcacatatcaggggttgtttgcaggatcctcagccatgttcaagtgaagtaagcctgagccagtgcgtggactggtgccacgggagtgccttgtccactgtccccctgtgtccaccagctattctcctggcgccggaactgcctctggtcttgatagcattaagccctgatggcgccggtggcgcggtgggcatggttcttcactgagagccggctctccttttcttaaagtgtgtaaatagtttatttataggggtaagaatgttctcacaccatttcacttcctcttcctctcctccagcattctcctctgagcagccttagatagtgtccatggctggagccgaccctttgagtccccttgagtgtcttaagaaccagcccacaacagcctctctttctcctccacatactgcagcctccctccatgcatcccacatacaagcactcccccactccccagcgtggcctcactgtcttctggtcttggtgctactgaaattgtcacccagaatttgaatcctgaccctccccactgcaagcccagggagccccagcccaagatggccagcctgaaactgttggccagggctcctcttgtggccatgtacccagggctggctggcctgccatttgcctctccccggagacagccgttcttctgcaaccacaccccgtgcctagccacaaccccaggctgcagctgctcagaagctccaggcattttgtttctggtgaccgcccctaatgggatatcggtgatcactggtccacccttcctgtcagggcttttctggggctgctcttggaaatgaagtcttaagtactgaataactcccctggggatagctggggcatttgtctagctgggctactttctaacactttgccatagctcagaccacttctcatcgttcagggatggactgcaaccttaatttacttgccggagtgtacattctagtgtggtgtatactggtggctgttgatgatgatttttttttttttacacaattctctgtagactaggagaagaatgcttgtgtttttcggaagtgtgatgcttctctttgactgccaaactcttttatggaatatatctttatattaatgctgttttggtcattttt

SEQ ID NO: 7134 - protein, 147 aa, Homo sapiens
MHYYRYSNAKVSCWYKYLLFSYNIIFWNQCCGAYGPEDWDLNVYFNCSGASYSREKCGVPFSCCVPDPAQKVVNTQCGYDVRIQLKSKWDESIFTKGCIQALESWLPRNIYIVAGVFIAISLLQIFGIFLARTLISDIEAVKAGHHF

SEQ ID NO: 7135 - DNA, 3662 bp, Homo sapiens
cgccgctcggacggcccgagtcgcgccctcccgccccgcgccgcggaacttgctctaacttcctcggccgagccgggccgcgccgccgctgccgccgccgcgcgcggattctgcttctcagaagatgcactattatagatactctaacgccaaggtcagctgctggtacaagtacctccttttcagctacaacatcatcttctggaaccagtgctgtggcgcatatggccctgaagactgggacctcaacgtctacttcaattgcagcggtgccagctacagccgagagaagtgcggggtccccttctcctgctgcgtgccagatcctgcgcaaaaagttgtgaacacacagtgtggatatgatgtcaggattcagctgaagagcaagtgggatgagtccatcttcacgaaaggctgcatccaggcgctggaaagctggctcccgcggaacatttacattgtggctggcgtcttcatcgccatctcgctgttgcagatatttggcatcttcctggcaaggacgctgatctcagacatcgaggcagtgaaggccggccatcacttctgaggagcagagttgagggagccgagctgagccacgctgggaggccagagcctttctctgccatcagccctacgtccagagggagaggagccgacacccccagagccagtgccccatcttaagcatcagcgtgacgtgacctctctgtttctgcttgctggtgctgaagaccaagggtcccccttgttacctgcccaaacttgtgactgcatccctctggagtctacccagagacagagaatgtgtctttatgtgggagtggtgactctgaaagacagagagggctcctgtggctgccaggagggcttgactcagaccccctgcagctcaagcatgtctgcaggacaccctggtcccctctccactggcatccagacatctgctttgggtcatccacatctgtgggtgggccgtgggtagagggacccacaggcgtggacagggcatctctctccatcaagcaaagcagcatgggggcctgcccgtaacgggaggcggacgtggccccgctgggcctctgagtgccagcgcagtctgctgggacatgcacatatcaggggttgtttgcaggatcctcagccatgttcaagtgaagtaagcctgagccagtgcgtggactggtgccacgggagtgccttgtccactgtccccctgtgtccaccagctattctcctggcgccggaactgcctctggtcttgatagcattaagccctgatggcgccggtggcgcggtgggcatggttcttcactgagagccggctctccttttcttaaagtgtgtaaatagtttatttataggggtaagaatgttctcacaccatttcacttcctcttcctctcctccagcattctcctctgagcagccttagatagtgtccatggctggagccgaccctttgagtccccttgagtgtcttaagaaccagcccacaacagcctctctttctcctccacatactgcagcctccctccatgcatcccacatacaagcactcccccactccccagcgtggcctcactgtcttctggtcttggtgctactgaaattgtcacccagaatttgaatcctgaccctccccactgcaagcccagggagccccagcccaagatggccagcctgaaactgttggccagggctcctcttgtggccatgtacccagggctggctggcctgccatttgcctctccccggagacagccgttcttctgcaaccacaccccgtgcctagccacaaccccaggctgcagctgctcagaagctccaggcattttgtttctggtgaccgcccctaatgggatatcggtgatcactggtccacccttcctgtcagggcttttctggggctgctcttggaaatgaagtcttaagtactgaataactcccctggggatagctggggcatttgtctagctgggctactttctaacactttgccatagctcagaccacttctcatcgttcagggatggactgcaaccttaatttacttgccggagtgtacattctagtgtggtgtatactggtggctgttgatgatgatttttttttttttacacaattctctgtagactaggagaagaatgcttgtgtttttcggaagtgtgatgcttctctttgactgccaaactcttttatggaatatatctttatattaatgctgttttggtcatttttgtttggggtcactattgagatattgctaagcatctcagtggtaaacgcggctgccagaggaaccaagggatagggtatgtagaccttacagaaggatggatggtaaaggcagtccatcatcagcacaatctgacttacatttcattgagtaattttttttttttttaagattctgtatggcagcactttcagttgcccttgtgtgccggccacagccgcacaagttggcttgtggtttatcccccgctataagtgagagctggagaaacttcaactccataggtctagaggaaacattgttttaggttatttctgtccacccctgtgcgatactatttattgatccaagcagaagagcttggggacactgagtcgaagtggggacatgggattgaagcctgggcactgctgctgcatgagctgtgtgtcctgggtgtgccggcctttctgtgaagggggttggtggcagtgcccacctcactagatgcctctgacccagcctcccctgggggagtgggtggccacagaccctccctgccagagctcctggaaggctcctgcaggcctgacccatctattcctgtagacctggtttaggatgaagtctcggtgcgatttttgcagagttgggtttatctttcaactatagacccttctggctgttctcagccatatcatgtgactctgaatagttggatgaggaatggaaagaaagcaaggatgagagccggtcacgtggcagtctccgcccagcatcggctgtccgcacagaggcacagggcaggcctcctgtgcactccccacctagcactggcctgtcctgaatccccgccttccctggttggaggccagctgtggcatttgcaccctcttctcacctcaccatgcacatgctaactttaaagccttggggtctttcctgtaccccctcctcaaccctggtccaccccctctcaggatcttgtcaacgttatttttcctgtcccgtcttcctatcgctggccttcctttcccatcctaaaaacttgccgaggccctatggctccctccctttctttcccaggcagcttcttatctgggctgtctgtaccccttcctttgcaccacccaccatgccccacgtagctgaaagctgcttatcccaattgtcaactctggccttcttcagcctctgtagcaccagacactgcacctcctgaatgtcctctgcttctctgcttcagaggcccaggctcgccagttctctgacctctcccatatgtctgcttaggactctgctgcagctgtcctcaccagcctccggggaatcccactacccacagggcagggctgtgggctgggctgaaaaaccatctgcatggtccacaagaagcctggcactgggtttccccatgaataacaatgaaaattaatggatgcac

SEQ ID NO: 7136 - protein, 147 aa, Homo sapiens; identical to SEQ ID NO: 7134

SEQ ID NO: 7137 - DNA, 5777 bp, Homo sapiens
cgccgctcggacggcccgagtcgcgccctcccgccccgcgccgcggaacttgctctaacttcctcggccgagccgggccgcgccgccgctgccgccgccgcgcgcggattctgcttctcagaagatgcactattatagatactctaacgccaaggtcagctgctggtacaagtacctccttttcagctacaacatcatcttctggaaccagtgctgtggcgcatatggccctgaagactgggacctcaacgtctacttcaattgcagcggtgccagctacagccgagagaagtgcggggtccccttctcctgctgcgtgccagatcctgcgcaaaaagttgtgaacacacagtgtggatatgatgtcaggattcagctgaagagcaagtgggatgagtccatcttcacgaaaggctgcatccaggcgctggaaagctggctcccgcggaacatttacattgtggctggcgtcttcatcgccatctcgctgttgcagatatttggcatcttcctggcaaggacgctgatctcagacatcgaggcagtgaaggccggccatcacttctgaggagcagagttgagggagccgagctgagccacgctgggaggccagagcctttctctgccatcagccctacgtccagagggagaggagccgacacccccagagccagtgccccatcttaagcatcagcgtgacgtgacctctctgtttctgcttgctggtgctgaagaccaagggtcccccttgttacctgcccaaacttgtgactgcatccctctggagtctacccagagacagagaatgtgtctttatgtgggagtggtgactctgaaagacagagagggctcctgtggctgccaggagggcttgactcagaccccctgcagctcaagcatgtctgcaggacaccctggtcccctctccactggcatccagacatctgctttgggtcatccacatctgtgggtgggccgtgggtagagggacccacaggcgtggacagggcatctctctccatcaagcaaagcagcatgggggcctgcccgtaacgggaggcggacgtggccccgctgggcctctgagtgccagcgcagtctgctgggacatgcacatatcaggggttgtttgcaggatcctcagccatgttcaagtgaagtaagcctgagccagtgcgtggactggtgccacgggagtgccttgtccactgtccccctgtgtccaccagctattctcctggcgccggaactgcctctggtcttgatagcattaagccctgatggcgccggtggcgcggtgggcatggttcttcactgagagccggctctccttttcttaaagtgtgtaaatagtttatttataggggtaagaatgttctcacaccatttcacttcctcttcctctcctccagcattctcctctgagcagccttagatagtgtccatggctggagccgaccctttgagtccccttgagtgtcttaagaaccagcccacaacagcctctctttctcctccacatactgcagcctccctccatgcatcccacatacaagcactcccccactccccagcgtggcctcactgtcttctggtcttggtgctactgaaattgtcacccagaatttgaatcctgaccctccccactgcaagcccagggagccccagcccaagatggccagcctgaaactgttggccagggctcctcttgtggccatgtacccagggctggctggcctgccatttgcctctccccggagacagccgttcttctgcaaccacaccccgtgcctagccacaaccccaggctgcagctgctcagaagctccaggcattttgtttctggtgaccgcccctaatgggatatcggtgatcactggtccacccttcctgtcagggcttttctggggctgctcttggaaatgaagtcttaagtactgaataactcccctggggatagctggggcatttgtctagctgggctactttctaacactttgccatagctcagaccacttctcatcgttcagggatggactgcaaccttaatttacttgccggagtgtacattctagtgtggtgtatactggtggctgttgatgatgatttttttttttttacacaattctctgtagactaggagaagaatgcttgtgtttttcggaagtgtgatgcttctctttgactgccaaactcttttatggaatatatctttatattaatgctgttttggtcatttttgtttggggtcactattgagatattgctaagcatctcagtggtaaacgcggctgccagaggaaccaagggatagggtatgtagaccttacagaaggatggatggtaaaggcagtccatcatcagcacaatctgacttacatttcattgagtaattttttttttttttaagattctgtatggcagcactttcagttgcccttgtgtgccggccacagccgcacaagttggcttgtggtttatcccccgctataagtgagagctggagaaacttcaactccataggtctagaggaaacattgttttaggttatttctgtccacccctgtgcgatactatttattgatccaagcagaagagcttggggacactgagtcgaagtggggacatgggattgaagcctgggcactgctgctgcatgagctgtgtgtcctgggtgtgccggcctttctgtgaagggggttggtggcagtgcccacctcactagatgcctctgacccagcctcccctgggggagtgggtggccacagaccctccctgccagagctcctggaaggctcctgcaggcctgacccatctattcctgtagacctggtttaggatgaagtctcggtgcgatttttgcagagttgggtttatctttcaactatagacccttctggctgttctcagccatatcatgtgactctgaatagttggatgaggaatggaaagaaagcaaggatgagagccggtcacgtggcagtctccgcccagcatcggctgtccgcacagaggcacagggcaggcctcctgtgcactccccacctagcactggcctgtcctgaatccccgccttccctggttggaggccagctgtggcatttgcaccctcttctcacctcaccatgcacatgctaactttaaagccttggggtctttcctgtaccccctcctcaaccctggtccaccccctctcaggatcttgtcaacgttatttttcctgtcccgtcttcctatcgctggccttcctttcccatcctaaaaacttgccgaggccctatggctccctccctttctttcccaggcagcttcttatctgggctgtctgtaccccttcctttgcaccacccaccatgccccacgtagctgaaagctgcttatcccaattgtcaactctggccttcttcagcctctgtagcaccagacactgcacctcctgaatgtcctctgcttctctgcttcagaggcccaggctcgccagttctctgacctctcccatatgtctgcttaggactctgctgcagctgtcctcaccagcctccggggaatcccactacccacagggcagggctgtgggctgggctgaaaaaccatctgcatggtccacaagaagcctggcactgggtttccccatgaataacaatgaaaattaatggatgcacaaccttcctggaacgtggaatttctctgggagattccatgcagaggccactggggaggtggcaggcatgcatgtgactgtaggtggctgcagtgttggaaggctcccagcagagcagagagggtgtcagtctcatcagggaacccacctgatggcttctcagccagcagtctcagaggaacatagacgactgctgagaaaggagggaggcagcagtggtcccagcacctgaggcatcctgctgtcatgggaaggtctccgcccaaatgtcagatgcatcagcctgtcacccgctggtccagagctttcagctgtactggtagggggtgggtggtggagtgctgaatgaccttcacaggtgggcctttccagctctagggtcttacgggtgtcggtccacagaaccacggtttttaggttgtgtgtccggggctatgggaacctgtcccccatgatggatcttggtagagacacttccctctgtcatcgtgcccaggaggatgctgcaggtgactacctgcagccctgttctcattcatttggatgccctccagaaatctggggagccatacacctttagagccttttttgctccttatcaagttggcaaggcttggccaattcctgttcaaggctgcattaaaggcatgttcaccatcctggctaatacggtgaaaccccttctctactaaaaatacaaaaaaattagccgggcttggtggcgggtgcctgtagtcccagctactccggaggctgaggcaggggaatggtgtgaacccaggaggcggagcttgcagtgagccgagatcacaccactgcactccagcctgggctcaaaaaagaaaaaaaaaaaaaaaaaaaggcccgttcattctcaaatgcttttggcgtctccagggtgcctcaggaaaacatgaagtgggcattgtagaacttggggctactgtgtaactttggaagaaaaagttaagggtacttttaagtggatactgttttgatgaaattgccaacttcagggagcccagcttggagaaggaggacgtgagtattccttacaaggctccgaaacaattctttcttcacttagttttctttctgtgctctgcatcttatattccagcagggtcttccaatgcatggtttaataactactagaactggccaggtgcagtggctcacgcctgtaatcccagaactttgggaggctaagacaggcagatcacttgaggccaggagttcgagaccagcctggacaacatggtgatacccagtttctactaaaaatacaaaaattagtcgggcatggtgatgtgcacctgtagtcccagctgctcgggaggctgaggcaggagaatcgcttgaacccgggagacagaggttgcaacgagccaagatcgagccactgcgctccggcctgggtgacaggagactccatctcaaaaaataaaattaaaaaaaaactactacaataaattatcaccttggactgtataaaacaacttttaaactagtctttttaaaaagtacacttaaataaaaatctaaacataagagaatgtaaagtgaaaagtgaaagtatgtcttctgttacgcagaggtaactactattaggaatccttcctgaaaatgtccatgcatctactcaggtcatcacacccatggaatcattttacatactattttatgagtgttacttaatatactgatccacagtgcgttttcacggtcacgccatcagttgtaggagtgtgccaagaacagatgggccttgcctttgtaccagaggagtccatttacagttgcaggtaatagaaaacccaattcagactggcctaaacaatgaggggaggttttggctcttgaaactggaaagtcccaaggtggggtgagtttcaggtttgggttgatccaagtggctcagtgacgtcaacaggatcttgtttccatttctctgccttccacagcctccccttcatctatggtggagggaaggagtctaccacagacaaaccccgagcctccccctgatgggtggtgtggtggtgaagccagcaagggaagggatccccggacacacccctcctcatgctttatcccactgaaaccatgcggctgt

SEQ ID NO: 7138 - protein, 147 aa, Homo sapiens; identical to SEQ ID NO: 7134

SEQ ID NO: 7139 - DNA, 825 bp, Homo sapiens
aacttgctctaacttcctcggccgagccgggccgcgccgccgctgccgccgccgcgcgcggattctgcttctcagaagatgcactattatagatactctaacgccaaggtcagctgctggtacaagtacctccttttcagctacaacatcatcttctggttggctggagtttcttctggtcttggtgctactgaaattgtcacccagaatttgaatcctgaccctccccactgcaagcccagggagccccagcccaagatggccagcctgaaactgttggccagggctcctcttgtggccatgtacccagggctggctggcctgccatttgcctctccccggagacagccgttcttctgcaaccacaccccgtgcctagccacaaccccaggctgcagctgctcagaagctccaggcattttgtttctggtgaccgcccctaatgggatatcggtgatcactggtccacccttcctgtcagggcttttctggggctgctcttggaaatgaagtcttaagtactgaataactcccctggggatagctggggcatttgtctagctgggctactttctaacactttgccatagctcagaccacttctcatcgttcagggatggactgcaaccttaatttacttgccggagtgtacattctagtgtggtgtatactggtggctgttgatgatgatttttttttttttacacaattctctgtagactaggagaagaatgcttgtgtttttcggaagtgtgatgcttctctttgactgccaaactcttttatggaatatatctttatattaatgctgttttggtcattttt

SEQ ID NO: 7140 - protein, 143 aa, Homo sapiens
MHYYRYSNAKVSCWYKYLLFSYNIIFWLAGVSSGLGATEIVTQNLNPDPPHCKPREPQPKMASLKLLARAPLVAMYPGLAGLPFASPRRQPFFCNHTPCLATTPGCSCSEAPGILFLVTAPNGISVITGPPFLSGLFWGCSWK

SEQ ID NO: 7141 - DNA, 2246 bp, Homo sapiens
aacttgctctaacttcctcggccgagccgggccgcgccgccgctgccgccgccgcgcgcggattctgcttctcagaagatgcactattatagatactctaacgccaaggtcagctgctggtacaagtacctccttttcagctacaacatcatcttctggttggctggagtttcttctggtcttggtgctactgaaattgtcacccagaatttgaatcctgaccctccccactgcaagcccagggagccccagcccaagatggccagcctgaaactgttggccagggctcctcttgtggccatgtacccagggctggctggcctgccatttgcctctccccggagacagccgttcttctgcaaccacaccccgtgcctagccacaaccccaggctgcagctgctcagaagctccaggcattttgtttctggtgaccgcccctaatgggatatcggtgatcactggtccacccttcctgtcagggcttttctggggctgctcttggaaatgaagtcttaagtactgaataactcccctggggatagctggggcatttgtctagctgggctactttctaacactttgccatagctcagaccacttctcatcgttcagggatggactgcaaccttaatttacttgccggagtgtacattctagtgtggtgtatactggtggctgttgatgatgatttttttttttttacacaattctctgtagactaggagaagaatgcttgtgtttttcggaagtgtgatgcttctctttgactgccaaactcttttatggaatatatctttatattaatgctgttttggtcatttttgtttggggtcactattgagatattgctaagcatctcagtggtaaacgcggctgccagaggaaccaagggatagggtatgtagaccttacagaaggatggatggtaaaggcagtccatcatcagcacaatctgacttacatttcattgagtaattttttttttttttaagattctgtatggcagcactttcagttgcccttgtgtgccggccacagccgcacaagttggcttgtggtttatcccccgctataagtgagagctggagaaacttcaactccataggtctagaggaaacattgttttaggttatttctgtccacccctgtgcgatactatttattgatccaagcagaagagcttggggacactgagtcgaagtggggacatgggattgaagcctgggcactgctgctgcatgagctgtgtgtcctgggtgtgccggcctttctgtgaagggggttggtggcagtgcccacctcactagatgcctctgacccagcctcccctgggggagtgggtggccacagaccctccctgccagagctcctggaaggctcctgcaggcctgacccatctattcctgtagacctggtttaggatgaagtctcggtgcgatttttgcagagttgggtttatctttcaactatagacccttctggctgttctcagccatatcatgtgactctgaatagttggatgaggaatggaaagaaagcaaggatgagagccggtcacgtggcagtctccgcccagcatcggctgtccgcacagaggcacagggcaggcctcctgtgcactccccacctagcactggcctgtcctgaatccccgccttccctggttggaggccagctgtggcatttgcaccctcttctcacctcaccatgcacatgctaactttaaagccttggggtctttcctgtaccccctcctcaaccctggtccaccccctctcaggatcttgtcaacgttatttttcctgtcccgtcttcctatcgctggccttcctttcccatcctaaaaacttgccgaggccctatggctccctccctttctttcccaggcagcttcttatctgggctgtctgtaccccttcctttgcaccacccaccatgccccacgtagctgaaagctgcttatcccaattgtcaactctggccttcttcagcctctgtagcaccagacactgcacctcctgaatgtcctctgcttctctgcttcagaggcccaggctcgccagttctctgacctctcccatatgtctgcttaggactctgctgcagctgtcctcaccagcctccggggaatcccactacccacagggcagggctgtgggctgggctgaaaaaccatctgcatggtccacaagaagcctggcactgggtttccccatgaataacaatgaaaattaatggatgcac

SEQ ID NO: 7142 - protein, 143 aa, Homo sapiens; identical to SEQ ID NO: 7140

SEQ ID NO: 7143 - DNA, 2865 bp, Homo sapiens
aacttgctctaacttcctcggccgagccgggccgcgccgccgctgccgccgccgcgcgcggattctgcttctcagaagatgcactattatagatactctaacgccaaggtcagctgctggtacaagtacctccttttcagctacaacatcatcttctggttggctggagttgtcttccttggagtcgggctgtgggcatggagcgaaaagggtgtgctgtccgacctcaccaaagtgacccggatgcatggaatcgaccctgtggtgctggtccaccccctctcaggatcttgtcaacgttatttttcctgtcccgtcttcctatcgctggccttcctttcccatcctaaaaacttgccgaggccctatggctccctccctttctttcccaggcagcttcttatctgggctgtctgtaccccttcctttgcaccacccaccatgccccacgtagctgaaagctgcttatcccaattgtcaactctggccttcttcagcctctgtagcaccagacactgcacctcctgaatgtcctctgcttctctgcttcagaggcccaggctcgccagttctctgacctctcccatatgtctgcttaggactctgctgcagctgtcctcaccagcctccggggaatcccactacccacagggcagggctgtgggctgggctgaaaaaccatctgcatggtccacaagaagcctggcactgggtttccccatgaataacaatgaaaattaatggatgcacaaccttcctggaacgtggaatttctctgggagattccatgcagaggccactggggaggtggcaggcatgcatgtgactgtaggtggctgcagtgttggaaggctcccagcagagcagagagggtgtcagtctcatcagggaacccacctgatggcttctcagccagcagtctcagaggaacatagacgactgctgagaaaggagggaggcagcagtggtcccagcacctgaggcatcctgctgtcatgggaaggtctccgcccaaatgtcagatgcatcagcctgtcacccgctggtccagagctttcagctgtactggtagggggtgggtggtggagtgctgaatgaccttcacaggtgggcctttccagctctagggtcttacgggtgtcggtccacagaaccacggtttttaggttgtgtgtccggggctatgggaacctgtcccccatgatggatcttggtagagacacttccctctgtcatcgtgcccaggaggatgctgcaggtgactacctgcagccctgttctcattcatttggatgccctccagaaatctggggagccatacacctttagagccttttttgctccttatcaagttggcaaggcttggccaattcctgttcaaggctgcattaaaggcatgttcaccatcctggctaatacggtgaaaccccttctctactaaaaatacaaaaaaattagccgggcttggtggcgggtgcctgtagtcccagctactccggaggctgaggcaggggaatggtgtgaacccaggaggcggagcttgcagtgagccgagatcacaccactgcactccagcctgggctcaaaaaagaaaaaaaaaaaaaaaaaaaggcccgttcattctcaaatgcttttggcgtctccagggtgcctcaggaaaacatgaagtgggcattgtagaacttggggctactgtgtaactttggaagaaaaagttaagggtacttttaagtggatactgttttgatgaaattgccaacttcagggagcccagcttggagaaggaggacgtgagtattccttacaaggctccgaaacaattctttcttcacttagttttctttctgtgctctgcatcttatattccagcagggtcttccaatgcatggtttaataactactagaactggccaggtgcagtggctcacgcctgtaatcccagaactttgggaggctaagacaggcagatcacttgaggccaggagttcgagaccagcctggacaacatggtgatacccagtttctactaaaaatacaaaaattagtcgggcatggtgatgtgcacctgtagtcccagctgctcgggaggctgaggcaggagaatcgcttgaacccgggagacagaggttgcaacgagccaagatcgagccactgcgctccggcctgggtgacaggagactccatctcaaaaaataaaattaaaaaaaaactactacaataaattatcaccttggactgtataaaacaacttttaaactagtctttttaaaaagtacacttaaataaaaatctaaacataagagaatgtaaagtgaaaagtgaaagtatgtcttctgttacgcagaggtaactactattaggaatccttcctgaaaatgtccatgcatctactcaggtcatcacacccatggaatcattttacatactattttatgagtgttacttaatatactgatccacagtgcgttttcacggtcacgccatcagttgtaggagtgtgccaagaacagatgggccttgcctttgtaccagaggagtccatttacagttgcaggtaatagaaaacccaattcagactggcctaaacaatgaggggaggttttggctcttgaaactggaaagtcccaaggtggggtgagtttcaggtttgggttgatccaagtggctcagtgacgtcaacaggatcttgtttccatttctctgccttccacagcctccccttcatctatggtggagggaaggagtctaccacagacaaaccccgagcctccccctgatgggtggtgtggtggtgaagccagcaagggaagggatccccggacacacccctcctcatgctttatcccactgaaaccatgcggctgt

SEQ ID NO: 7144 - protein, 149 aa, Homo sapiens
MHYYRYSNAKVSCWYKYLLFSYNIIFWLAGVVFLGVGLWAWSEKGVLSDLTKVTRMHGIDPVVLVHPLSGSCQRYFSCPVFLSLAFLSHPKNLPRPYGSLPFFPRQLLIWAVCTPSFAPPTMPHVAESCLSQLSTLAFFSLCSTRHCTS

SEQ ID NO: 7145 - DNA, 4361 bp, Homo sapiens
aacttgctctaacttcctcggccgagccgggccgcgccgccgctgccgccgccgcgcgcggattctgcttctcagaagatgcactattatagatactctaacgccaaggtcagctgctggtacaagtacctccttttcagctacaacatcatcttctggttggctggagtttcttctggtcttggtgctactgaaattgtcacccagaatttgaatcctgaccctccccactgcaagcccagggagccccagcccaagatggccagcctgaaactgttggccagggctcctcttgtggccatgtacccagggctggctggcctgccatttgcctctccccggagacagccgttcttctgcaaccacaccccgtgcctagccacaaccccaggctgcagctgctcagaagctccaggcattttgtttctggtgaccgcccctaatgggatatcggtgatcactggtccacccttcctgtcagggcttttctggggctgctcttggaaatgaagtcttaagtactgaataactcccctggggatagctggggcatttgtctagctgggctactttctaacactttgccatagctcagaccacttctcatcgttcagggatggactgcaaccttaatttacttgccggagtgtacattctagtgtggtgtatactggtggctgttgatgatgatttttttttttttacacaattctctgtagactaggagaagaatgcttgtgtttttcggaagtgtgatgcttctctttgactgccaaactcttttatggaatatatctttatattaatgctgttttggtcatttttgtttggggtcactattgagatattgctaagcatctcagtggtaaacgcggctgccagaggaaccaagggatagggtatgtagaccttacagaaggatggatggtaaaggcagtccatcatcagcacaatctgacttacatttcattgagtaattttttttttttttaagattctgtatggcagcactttcagttgcccttgtgtgccggccacagccgcacaagttggcttgtggtttatcccccgctataagtgagagctggagaaacttcaactccataggtctagaggaaacattgttttaggttatttctgtccacccctgtgcgatactatttattgatccaagcagaagagcttggggacactgagtcgaagtggggacatgggattgaagcctgggcactgctgctgcatgagctgtgtgtcctgggtgtgccggcctttctgtgaagggggttggtggcagtgcccacctcactagatgcctctgacccagcctcccctgggggagtgggtggccacagaccctccctgccagagctcctggaaggctcctgcaggcctgacccatctattcctgtagacctggtttaggatgaagtctcggtgcgatttttgcagagttgggtttatctttcaactatagacccttctggctgttctcagccatatcatgtgactctgaatagttggatgaggaatggaaagaaagcaaggatgagagccggtcacgtggcagtctccgcccagcatcggctgtccgcacagaggcacagggcaggcctcctgtgcactccccacctagcactggcctgtcctgaatccccgccttccctggttggaggccagctgtggcatttgcaccctcttctcacctcaccatgcacatgctaactttaaagccttggggtctttcctgtaccccctcctcaaccctggtccaccccctctcaggatcttgtcaacgttatttttcctgtcccgtcttcctatcgctggccttcctttcccatcctaaaaacttgccgaggccctatggctccctccctttctttcccaggcagcttcttatctgggctgtctgtaccccttcctttgcaccacccaccatgccccacgtagctgaaagctgcttatcccaattgtcaactctggccttcttcagcctctgtagcaccagacactgcacctcctgaatgtcctctgcttctctgcttcagaggcccaggctcgccagttctctgacctctcccatatgtctgcttaggactctgctgcagctgtcctcaccagcctccggggaatcccactacccacagggcagggctgtgggctgggctgaaaaaccatctgcatggtccacaagaagcctggcactgggtttccccatgaataacaatgaaaattaatggatgcacaaccttcctggaacgtggaatttctctgggagattccatgcagaggccactggggaggtggcaggcatgcatgtgactgtaggtggctgcagtgttggaaggctcccagcagagcagagagggtgtcagtctcatcagggaacccacctgatggcttctcagccagcagtctcagaggaacatagacgactgctgagaaaggagggaggcagcagtggtcccagcacctgaggcatcctgctgtcatgggaaggtctccgcccaaatgtcagatgcatcagcctgtcacccgctggtccagagctttcagctgtactggtagggggtgggtggtggagtgctgaatgaccttcacaggtgggcctttccagctctagggtcttacgggtgtcggtccacagaaccacggtttttaggttgtgtgtccggggctatgggaacctgtcccccatgatggatcttggtagagacacttccctctgtcatcgtgcccaggaggatgctgcaggtgactacctgcagccctgttctcattcatttggatgccctccagaaatctggggagccatacacctttagagccttttttgctccttatcaagttggcaaggcttggccaattcctgttcaaggctgcattaaaggcatgttcaccatcctggctaatacggtgaaaccccttctctactaaaaatacaaaaaaattagccgggcttggtggcgggtgcctgtagtcccagctactccggaggctgaggcaggggaatggtgtgaacccaggaggcggagcttgcagtgagccgagatcacaccactgcactccagcctgggctcaaaaaagaaaaaaaaaaaaaaaaaaaggcccgttcattctcaaatgcttttggcgtctccagggtgcctcaggaaaacatgaagtgggcattgtagaacttggggctactgtgtaactttggaagaaaaagttaagggtacttttaagtggatactgttttgatgaaattgccaacttcagggagcccagcttggagaaggaggacgtgagtattccttacaaggctccgaaacaattctttcttcacttagttttctttctgtgctctgcatcttatattccagcagggtcttccaatgcatggtttaataactactagaactggccaggtgcagtggctcacgcctgtaatcccagaactttgggaggctaagacaggcagatcacttgaggccaggagttcgagaccagcctggacaacatggtgatacccagtttctactaaaaatacaaaaattagtcgggcatggtgatgtgcacctgtagtcccagctgctcgggaggctgaggcaggagaatcgcttgaacccgggagacagaggttgcaacgagccaagatcgagccactgcgctccggcctgggtgacaggagactccatctcaaaaaataaaattaaaaaaaaactactacaataaattatcaccttggactgtataaaacaacttttaaactagtctttttaaaaagtacacttaaataaaaatctaaacataagagaatgtaaagtgaaaagtgaaagtatgtcttctgttacgcagaggtaactactattaggaatccttcctgaaaatgtccatgcatctactcaggtcatcacacccatggaatcattttacatactattttatgagtgttacttaatatactgatccacagtgcgttttcacggtcacgccatcagttgtaggagtgtgccaagaacagatgggccttgcctttgtaccagaggagtccatttacagttgcaggtaatagaaaacccaattcagactggcctaaacaatgaggggaggttttggctcttgaaactggaaagtcccaaggtggggtgagtttcaggtttgggttgatccaagtggctcagtgacgtcaacaggatcttgtttccatttctctgccttccacagcctccccttcatctatggtggagggaaggagtctaccacagacaaaccccgagcctccccctgatgggtggtgtggtggtgaagccagcaagggaagggatccccggacacacccctcctcatgctttatcccactgaaaccatgcggctgt

SEQ ID NO: 7146 - protein, 143 aa, Homo sapiens; identical to SEQ ID NO: 7140

SEQ ID NO: 7147 - DNA, 1644 bp, Homo sapiens
acttgctctaacttcctcggccgagccgggccgcgccgccgctgccgccgccgcgcgcggcgttacatccttactattcaaagtgccatccacagacctgctgatgggcagcatgagcatcacctgggagcttgctgcgctgtagaatcttgaggggtctccatccagatcagctgaatcagagtttgcattgttaacaagattctgcttctcagaagatgcactattatagatactctaacgccaaggtcagctgctggtacaagtacctccttttcagctacaacatcatcttctggttggctggagttgtcttccttggagtcgggctgtgggcatggagcgaaaagggtgtgctgtccgacctcaccaaagtgacccggatgcatggaatcgaccctgtggtgctggtcctgatggtgggcgtggtgatgttcaccctggggttcgccggctgcgtgggggctctgcgggagaatatctgcttgctcaactttttctgtggcaccatcgtgctcatcttcttcctggagctggctgtggccgtgctggccttcctgttccaggactgggtgagggaccggttccgggagttcttcgagagcaacatcaagtcctaccgggacgatatcgatctgcaaaacctcatcgactcccttcagaaagctgtaagcacctccccagcgggcccccgatagagcatgcacctccctgtgctgcctggagctgagtctagcaggggcatcaggccttctctgtgggttgtctgcctgcagcttggcagacagcagggaggccgtggaacaagccactccacctctggtctgttccactttgccggcttgtggttgcctggtgggccagccctttcccattgggattgggcaggcaagtccagctgtacccgaggccacccaccccccacgtgcccggccctcctctttcggccccagatctttccaatcctgcccaatagccataccagctgcaatcctccttaggcgctgcataccgtaaggcacagcttcttccccccggctcatgactcaccatctgacgctattcctatccccttcctccccgggaccttttccccttcctccctgggaccttttccccttcctgtttaagaagccagggctgcctggaggaagctttgtcagatctagtggaatgtgacctccctggaatatgtgcccaggggtttgtctaagcagttccaggctatggcctttactccatctggtccccatccctcttatctctctcatgtgtggctgcacctggacgcttggaccatagctgtcacagccccctggggaggaacccactccttggccatgtcagcctgtgcaatgcaaggctcttgtttgatctgtgtgctgacagaaagcccagcttccttaagaacttttcatgtggaacactttggttttgagaagaaaataaatcagaaaccattaaaaatctatgattcactctcattattaaccaaaacttgttcacctttatttcatgtattatgggatccagcaaaacccatttatgggaccaaagaccctgcctgtattgttattactaatgtgtattagtctgtgaaagtcaccaaatccccgccatgttttgatgcctctcctttctttt

SEQ ID NO: 7148 - protein, 159 aa, Homo sapiens
MHYYRYSNAKVSCWYKYLLFSYNIIFWLAGVVFLGVGLWAWSEKGVLSDLTKVTRMHGIDPVVLVLMVGVVMFTLGFAGCVGALRENICLLNFFCGTIVLIFFLELAVAVLAFLFQDWVRDRFREFFESNIKSYRDDIDLQNLIDSLQKAVSTSPAGPR

SEQ ID NO: 7149 - DNA, 1488 bp, Homo sapiens
ctcggccgagccgggccgcgccgccgctgccgccgccgcgcgcggattctgcttctcagaagatgcactattatagatactctaacgccaaggtcagctgctggtacaagtacctccttttcagctacaacatcatcttctggttggctggagttgtcttccttggagtcgggctgtgggcatggagcgaaaagggtgtgctgtccgacctcaccaaagtgacccggatgcatggaatcgaccctgtggtgctggtcctgatggtgggcgtggtgatgttcaccctggggttcgccggctgcgtgggggctctgcgggagaatatctgcttgctcaactttttctgtggcaccatcgtgctcatcttcttcctggagctggctgtggccgtgctggccttcctgttccaggactgggtgagggaccggttccgggagttcttcgagagcaacatcaagtcctaccgggacgatatcgatctgcaaaacctcatcgactcccttcagaaagctgtaagcacctccccagcgggcccccgatagagcatgcacctccctgtgctgcctggagctgagtctagcaggggcatcaggccttctctgtgggttgtctgcctgcagcttggcagacagcagggaggccgtggaacaagccactccacctctggtctgttccactttgccggcttgtggttgcctggtgggccagccctttcccattgggattgggcaggcaagtccagctgtacccgaggccacccaccccccacgtgcccggccctcctctttcggccccagatctttccaatcctgcccaatagccataccagctgcaatcctccttaggcgctgcataccgtaaggcacagcttcttccccccggctcatgactcaccatctgacgctattcctatccccttcctccccgggaccttttccccttcctccctgggaccttttccccttcctgtttaagaagccagggctgcctggaggaagctttgtcagatctagtggaatgtgacctccctggaatatgtgcccaggggtttgtctaagcagttccaggctatggcctttactccatctggtccccatccctcttatctctctcatgtgtggctgcacctggacgcttggaccatagctgtcacagccccctggggaggaacccactccttggccatgtcagcctgtgcaatgcaaggctcttgtttgatctgtgtgctgacagaaagcccagcttccttaagaacttttcatgtggaacactttggttttgagaagaaaataaatcagaaaccattaaaaatctatgattcactctcattattaaccaaaacttgttcacctttatttcatgtattatgggatccagcaaaacccatttatgggaccaaagaccctgcctgtattgttattactaatgtgtattagtctgtgaaagtcaccaaatccccgccatgttttgatgcctctcctttctttt

SEQ ID NO: 7150 - protein, 159 aa, Homo sapiens; identical to SEQ ID NO: 7148

SEQ ID NO: 7151 - DNA, 2230 bp, Homo sapiens
ctcggccgagccgggccgcgccgccgctgccgccgccgcgcgcggattctgcttctcagaagatgcactattatagatactctaacgccaaggtcagctgctggtacaagtacctccttttcagctacaacatcatcttctggttggctggagttgtcttccttggagtcgggctgtgggcatggagcgaaaagaaccagtgctgtggcgcatatggccctgaagactgggacctcaacgtctacttcaattgcagcggtgccagctacagccgagagaagtgcggggtccccttctcctgctgcgtgccagatcctgcgcaaaaagttgtgaacacacagtgtggatatgatgtcaggattcagctgaagagcaagtgggatgagtccatcttcacgaaaggctgcatccaggcgctggaaagctggctcccgcggaacatttacattgtggctggcgtcttcatcgccatctcgctgttgcagatatttggcatcttcctggcaaggacgctgatctcagacatcgaggcagtgaaggccggccatcacttctgaggagcagagttgagggagccgagctgagccacgctgggaggccagagcctttctctgccatcagccctacgtccagagggagaggagccgacacccccagagccagtgccccatcttaagcatcagcgtgacgtgacctctctgtttctgcttgctggtgctgaagaccaagggtcccccttgttacctgcccaaacttgtgactgcatccctctggagtctacccagagacagagaatgtgtctttatgtgggagtggtgactctgaaagacagagagggctcctgtggctgccaggagggcttgactcagaccccctgcagctcaagcatgtctgcaggacaccctggtcccctctccactggcatccagacatctgctttgggtcatccacatctgtgggtgggccgtgggtagagggacccacaggcgtggacagggcatctctctccatcaagcaaagcagcatgggggcctgcccgtaacgggaggcggacgtggccccgctgggcctctgagtgccagcgcagtctgctgggacatgcacatatcaggggttgtttgcaggatcctcagccatgttcaagtgaagtaagcctgagccagtgcgtggactggtgccacgggagtgccttgtccactgtccccctgtgtccaccagctattctcctggcgccggaactgcctctggtcttgatagcattaagccctgatggcgccggtggcgcggtgggcatggttcttcactgagagccggctctccttttcttaaagtgtgtaaatagtttatttataggggtaagaatgttctcacaccatttcacttcctcttcctctcctccagcattctcctctgagcagccttagatagtgtccatggctggagccgaccctttgagtccccttgagtgtcttaagaaccagcccacaacagcctctctttctcctccacatactgcagcctccctccatgcatcccacatacaagcactcccccactccccagcgtggcctcactgtcttctggtcttggtgctactgaaattgtcacccagaatttgaatcctgaccctccccactgcaagcccagggagccccagcccaagatggccagcctgaaactgttggccagggctcctcttgtggccatgtacccagggctggctggcctgccatttgcctctccccggagacagccgttcttctgcaaccacaccccgtgcctagccacaaccccaggctgcagctgctcagaagctccaggcattttgtttctggtgaccgcccctaatgggatatcggtgatcactggtccacccttcctgtcagggcttttctggggctgctcttggaaatgaagtcttaagtactgaataactcccctggggatagctggggcatttgtctagctgggctactttctaacactttgccatagctcagaccacttctcatcgttcagggatggactgcaaccttaatttacttgccggagtgtacattctagtgtggtgtatactggtggctgttgatgatgatttttttttttttacacaattctctgtagactaggagaagaatgcttgtgtttttcggaagtgtgatgcttctctttgactgccaaactcttttatggaatatatctttatattaatgctgttttggtcattttt

SEQ ID NO: 7152 - protein, 164 aa, Homo sapiens
MHYYRYSNAKVSCWYKYLLFSYNIIFWLAGVVFLGVGLWAWSEKNQCCGAYGPEDWDLNVYFNCSGASYSREKCGVPFSCCVPDPAQKVVNTQCGYDVRIQLKSKWDESIFTKGCIQALESWLPRNIYIVAGVFIAISLLQIFGIFLARTLISDIEAVKAGHHF

SEQ ID NO: 7153 - DNA, 3651 bp, Homo sapiens
ctcggccgagccgggccgcgccgccgctgccgccgccgcgcgcggattctgcttctcagaagatgcactattatagatactctaacgccaaggtcagctgctggtacaagtacctccttttcagctacaacatcatcttctggttggctggagttgtcttccttggagtcgggctgtgggcatggagcgaaaagaaccagtgctgtggcgcatatggccctgaagactgggacctcaacgtctacttcaattgcagcggtgccagctacagccgagagaagtgcggggtccccttctcctgctgcgtgccagatcctgcgcaaaaagttgtgaacacacagtgtggatatgatgtcaggattcagctgaagagcaagtgggatgagtccatcttcacgaaaggctgcatccaggcgctggaaagctggctcccgcggaacatttacattgtggctggcgtcttcatcgccatctcgctgttgcagatatttggcatcttcctggcaaggacgctgatctcagacatcgaggcagtgaaggccggccatcacttctgaggagcagagttgagggagccgagctgagccacgctgggaggccagagcctttctctgccatcagccctacgtccagagggagaggagccgacacccccagagccagtgccccatcttaagcatcagcgtgacgtgacctctctgtttctgcttgctggtgctgaagaccaagggtcccccttgttacctgcccaaacttgtgactgcatccctctggagtctacccagagacagagaatgtgtctttatgtgggagtggtgactctgaaagacagagagggctcctgtggctgccaggagggcttgactcagaccccctgcagctcaagcatgtctgcaggacaccctggtcccctctccactggcatccagacatctgctttgggtcatccacatctgtgggtgggccgtgggtagagggacccacaggcgtggacagggcatctctctccatcaagcaaagcagcatgggggcctgcccgtaacgggaggcggacgtggccccgctgggcctctgagtgccagcgcagtctgctgggacatgcacatatcaggggttgtttgcaggatcctcagccatgttcaagtgaagtaagcctgagccagtgcgtggactggtgccacgggagtgccttgtccactgtccccctgtgtccaccagctattctcctggcgccggaactgcctctggtcttgatagcattaagccctgatggcgccggtggcgcggtgggcatggttcttcactgagagccggctctccttttcttaaagtgtgtaaatagtttatttataggggtaagaatgttctcacaccatttcacttcctcttcctctcctccagcattctcctctgagcagccttagatagtgtccatggctggagccgaccctttgagtccccttgagtgtcttaagaaccagcccacaacagcctctctttctcctccacatactgcagcctccctccatgcatcccacatacaagcactcccccactccccagcgtggcctcactgtcttctggtcttggtgctactgaaattgtcacccagaatttgaatcctgaccctccccactgcaagcccagggagccccagcccaagatggccagcctgaaactgttggccagggctcctcttgtggccatgtacccagggctggctggcctgccatttgcctctccccggagacagccgttcttctgcaaccacaccccgtgcctagccacaaccccaggctgcagctgctcagaagctccaggcattttgtttctggtgaccgcccctaatgggatatcggtgatcactggtccacccttcctgtcagggcttttctggggctgctcttggaaatgaagtcttaagtactgaataactcccctggggatagctggggcatttgtctagctgggctactttctaacactttgccatagctcagaccacttctcatcgttcagggatggactgcaaccttaatttacttgccggagtgtacattctagtgtggtgtatactggtggctgttgatgatgatttttttttttttacacaattctctgtagactaggagaagaatgcttgtgtttttcggaagtgtgatgcttctctttgactgccaaactcttttatggaatatatctttatattaatgctgttttggtcatttttgtttggggtcactattgagatattgctaagcatctcagtggtaaacgcggctgccagaggaaccaagggatagggtatgtagaccttacagaaggatggatggtaaaggcagtccatcatcagcacaatctgacttacatttcattgagtaattttttttttttttaagattctgtatggcagcactttcagttgcccttgtgtgccggccacagccgcacaagttggcttgtggtttatcccccgctataagtgagagctggagaaacttcaactccataggtctagaggaaacattgttttaggttatttctgtccacccctgtgcgatactatttattgatccaagcagaagagcttggggacactgagtcgaagtggggacatgggattgaagcctgggcactgctgctgcatgagctgtgtgtcctgggtgtgccggcctttctgtgaagggggttggtggcagtgcccacctcactagatgcctctgacccagcctcccctgggggagtgggtggccacagaccctccctgccagagctcctggaaggctcctgcaggcctgacccatctattcctgtagacctggtttaggatgaagtctcggtgcgatttttgcagagttgggtttatctttcaactatagacccttctggctgttctcagccatatcatgtgactctgaatagttggatgaggaatggaaagaaagcaaggatgagagccggtcacgtggcagtctccgcccagcatcggctgtccgcacagaggcacagggcaggcctcctgtgcactccccacctagcactggcctgtcctgaatccccgccttccctggttggaggccagctgtggcatttgcaccctcttctcacctcaccatgcacatgctaactttaaagccttggggtctttcctgtaccccctcctcaaccctggtccaccccctctcaggatcttgtcaacgttatttttcctgtcccgtcttcctatcgctggccttcctttcccatcctaaaaacttgccgaggccctatggctccctccctttctttcccaggcagcttcttatctgggctgtctgtaccccttcctttgcaccacccaccatgccccacgtagctgaaagctgcttatcccaattgtcaactctggccttcttcagcctctgtagcaccagacactgcacctcctgaatgtcctctgcttctctgcttcagaggcccaggctcgccagttctctgacctctcccatatgtctgcttaggactctgctgcagctgtcctcaccagcctccggggaatcccactacccacagggcagggctgtgggctgggctgaaaaaccatctgcatggtccacaagaagcctggcactgggtttccccatgaataacaatgaaaattaatggatgcac

SEQ ID NO: 7154 - protein, 164 aa, Homo sapiens; identical to SEQ ID NO: 7152

SEQ ID NO: 7155 - DNA, 5766 bp, Homo sapiens
ctcggccgagccgggccgcgccgccgctgccgccgccgcgcgcggattctgcttctcagaagatgcactattatagatactctaacgccaaggtcagctgctggtacaagtacctccttttcagctacaacatcatcttctggttggctggagttgtcttccttggagtcgggctgtgggcatggagcgaaaagaaccagtgctgtggcgcatatggccctgaagactgggacctcaacgtctacttcaattgcagcggtgccagctacagccgagagaagtgcggggtccccttctcctgctgcgtgccagatcctgcgcaaaaagttgtgaacacacagtgtggatatgatgtcaggattcagctgaagagcaagtgggatgagtccatcttcacgaaaggctgcatccaggcgctggaaagctggctcccgcggaacatttacattgtggctggcgtcttcatcgccatctcgctgttgcagatatttggcatcttcctggcaaggacgctgatctcagacatcgaggcagtgaaggccggccatcacttctgaggagcagagttgagggagccgagctgagccacgctgggaggccagagcctttctctgccatcagccctacgtccagagggagaggagccgacacccccagagccagtgccccatcttaagcatcagcgtgacgtgacctctctgtttctgcttgctggtgctgaagaccaagggtcccccttgttacctgcccaaacttgtgactgcatccctctggagtctacccagagacagagaatgtgtctttatgtgggagtggtgactctgaaagacagagagggctcctgtggctgccaggagggcttgactcagaccccctgcagctcaagcatgtctgcaggacaccctggtcccctctccactggcatccagacatctgctttgggtcatccacatctgtgggtgggccgtgggtagagggacccacaggcgtggacagggcatctctctccatcaagcaaagcagcatgggggcctgcccgtaacgggaggcggacgtggccccgctgggcctctgagtgccagcgcagtctgctgggacatgcacatatcaggggttgtttgcaggatcctcagccatgttcaagtgaagtaagcctgagccagtgcgtggactggtgccacgggagtgccttgtccactgtccccctgtgtccaccagctattctcctggcgccggaactgcctctggtcttgatagcattaagccctgatggcgccggtggcgcggtgggcatggttcttcactgagagccggctctccttttcttaaagtgtgtaaatagtttatttataggggtaagaatgttctcacaccatttcacttcctcttcctctcctccagcattctcctctgagcagccttagatagtgtccatggctggagccgaccctttgagtccccttgagtgtcttaagaaccagcccacaacagcctctctttctcctccacatactgcagcctccctccatgcatcccacatacaagcactcccccactccccagcgtggcctcactgtcttctggtcttggtgctactgaaattgtcacccagaatttgaatcctgaccctccccactgcaagcccagggagccccagcccaagatggccagcctgaaactgttggccagggctcctcttgtggccatgtacccagggctggctggcctgccatttgcctctccccggagacagccgttcttctgcaaccacaccccgtgcctagccacaaccccaggctgcagctgctcagaagctccaggcattttgtttctggtgaccgcccctaatgggatatcggtgatcactggtccacccttcctgtcagggcttttctggggctgctcttggaaatgaagtcttaagtactgaataactcccctggggatagctggggcatttgtctagctgggctactttctaacactttgccatagctcagaccacttctcatcgttcagggatggactgcaaccttaatttacttgccggagtgtacattctagtgtggtgtatactggtggctgttgatgatgatttttttttttttacacaattctctgtagactaggagaagaatgcttgtgtttttcggaagtgtgatgcttctctttgactgccaaactcttttatggaatatatctttatattaatgctgttttggtcatttttgtttggggtcactattgagatattgctaagcatctcagtggtaaacgcggctgccagaggaaccaagggatagggtatgtagaccttacagaaggatggatggtaaaggcagtccatcatcagcacaatctgacttacatttcattgagtaattttttttttttttaagattctgtatggcagcactttcagttgcccttgtgtgccggccacagccgcacaagttggcttgtggtttatcccccgctataagtgagagctggagaaacttcaactccataggtctagaggaaacattgttttaggttatttctgtccacccctgtgcgatactatttattgatccaagcagaagagcttggggacactgagtcgaagtggggacatgggattgaagcctgggcactgctgctgcatgagctgtgtgtcctgggtgtgccggcctttctgtgaagggggttggtggcagtgcccacctcactagatgcctctgacccagcctcccctgggggagtgggtggccacagaccctccctgccagagctcctggaaggctcctgcaggcctgacccatctattcctgtagacctggtttaggatgaagtctcggtgcgatttttgcagagttgggtttatctttcaactatagacccttctggctgttctcagccatatcatgtgactctgaatagttggatgaggaatggaaagaaagcaaggatgagagccggtcacgtggcagtctccgcccagcatcggctgtccgcacagaggcacagggcaggcctcctgtgcactccccacctagcactggcctgtcctgaatccccgccttccctggttggaggccagctgtggcatttgcaccctcttctcacctcaccatgcacatgctaactttaaagccttggggtctttcctgtaccccctcctcaaccctggtccaccccctctcaggatcttgtcaacgttatttttcctgtcccgtcttcctatcgctggccttcctttcccatcctaaaaacttgccgaggccctatggctccctccctttctttcccaggcagcttcttatctgggctgtctgtaccccttcctttgcaccacccaccatgccccacgtagctgaaagctgcttatcccaattgtcaactctggccttcttcagcctctgtagcaccagacactgcacctcctgaatgtcctctgcttctctgcttcagaggcccaggctcgccagttctctgacctctcccatatgtctgcttaggactctgctgcagctgtcctcaccagcctccggggaatcccactacccacagggcagggctgtgggctgggctgaaaaaccatctgcatggtccacaagaagcctggcactgggtttccccatgaataacaatgaaaattaatggatgcacaaccttcctggaacgtggaatttctctgggagattccatgcagaggccactggggaggtggcaggcatgcatgtgactgtaggtggctgcagtgttggaaggctcccagcagagcagagagggtgtcagtctcatcagggaacccacctgatggcttctcagccagcagtctcagaggaacatagacgactgctgagaaaggagggaggcagcagtggtcccagcacctgaggcatcctgctgtcatgggaaggtctccgcccaaatgtcagatgcatcagcctgtcacccgctggtccagagctttcagctgtactggtagggggtgggtggtggagtgctgaatgaccttcacaggtgggcctttccagctctagggtcttacgggtgtcggtccacagaaccacggtttttaggttgtgtgtccggggctatgggaacctgtcccccatgatggatcttggtagagacacttccctctgtcatcgtgcccaggaggatgctgcaggtgactacctgcagccctgttctcattcatttggatgccctccagaaatctggggagccatacacctttagagccttttttgctccttatcaagttggcaaggcttggccaattcctgttcaaggctgcattaaaggcatgttcaccatcctggctaatacggtgaaaccccttctctactaaaaatacaaaaaaattagccgggcttggtggcgggtgcctgtagtcccagctactccggaggctgaggcaggggaatggtgtgaacccaggaggcggagcttgcagtgagccgagatcacaccactgcactccagcctgggctcaaaaaagaaaaaaaaaaaaaaaaaaaggcccgttcattctcaaatgcttttggcgtctccagggtgcctcaggaaaacatgaagtgggcattgtagaacttggggctactgtgtaactttggaagaaaaagttaagggtacttttaagtggatactgttttgatgaaattgccaacttcagggagcccagcttggagaaggaggacgtgagtattccttacaaggctccgaaacaattctttcttcacttagttttctttctgtgctctgcatcttatattccagcagggtcttccaatgcatggtttaataactactagaactggccaggtgcagtggctcacgcctgtaatcccagaactttgggaggctaagacaggcagatcacttgaggccaggagttcgagaccagcctggacaacatggtgatacccagtttctactaaaaatacaaaaattagtcgggcatggtgatgtgcacctgtagtcccagctgctcgggaggctgaggcaggagaatcgcttgaacccgggagacagaggttgcaacgagccaagatcgagccactgcgctccggcctgggtgacaggagactccatctcaaaaaataaaattaaaaaaaaactactacaataaattatcaccttggactgtataaaacaacttttaaactagtctttttaaaaagtacacttaaataaaaatctaaacataagagaatgtaaagtgaaaagtgaaagtatgtcttctgttacgcagaggtaactactattaggaatccttcctgaaaatgtccatgcatctactcaggtcatcacacccatggaatcattttacatactattttatgagtgttacttaatatactgatccacagtgcgttttcacggtcacgccatcagttgtaggagtgtgccaagaacagatgggccttgcctttgtaccagaggagtccatttacagttgcaggtaatagaaaacccaattcagactggcctaaacaatgaggggaggttttggctcttgaaactggaaagtcccaaggtggggtgagtttcaggtttgggttgatccaagtggctcagtgacgtcaacaggatcttgtttccatttctctgccttccacagcctccccttcatctatggtggagggaaggagtctaccacagacaaaccccgagcctccccctgatgggtggtgtggtggtgaagccagcaagggaagggatccccggacacacccctcctcatgctttatcccactgaaaccatgcggctgt

SEQ ID NO: 7156 - protein, 164 aa, Homo sapiens; identical to SEQ ID NO: 7152

SEQ ID NO: 7157 - DNA, 2488 bp, Homo sapiens
gccgggccgcgccgccgctgccgccgccgcgcgcggattctgcttctcagaagatgcactattatagatactctaacgccaaggtcagctgctggtacaagtacctccttttcagctacaacatcatcttctggggtgtgctgtccgacctcaccaaagtgacccggatgcatggaatcgaccctgtggtgctggtcctgatggtgggcgtggtgatgttcaccctggggttcgccggctgcgtgggggctctgcgggagaatatctgcttgctcaactttttctgtggcaccatcgtgctcatcttcttcctggagctggctgtggccgtgctggccttcctgttccaggactgggtgagggaccggttccgggagttcttcgagagcaacatcaagtcctaccgggacgatatcgatctgcaaaacctcatcgactcccttcagaaagctaaccagtgctgtggcgcatatggccctgaagactgggacctcaacgtctacttcaattgcagcggtgccagctacagccgagagaagtgcggggtccccttctcctgctgcgtgccagatcctgcgcaaaaagttgtgaacacacagtgtggatatgatgtcaggattcagctgaagagcaagtgggatgagtccatcttcacgaaaggctgcatccaggcgctggaaagctggctcccgcggaacatttacattgtggctggcgtcttcatcgccatctcgctgttgcagatatttggcatcttcctggcaaggacgctgatctcagacatcgaggcagtgaaggccggccatcacttctgaggagcagagttgagggagccgagctgagccacgctgggaggccagagcctttctctgccatcagccctacgtccagagggagaggagccgacacccccagagccagtgccccatcttaagcatcagcgtgacgtgacctctctgtttctgcttgctggtgctgaagaccaagggtcccccttgttacctgcccaaacttgtgactgcatccctctggagtctacccagagacagagaatgtgtctttatgtgggagtggtgactctgaaagacagagagggctcctgtggctgccaggagggcttgactcagaccccctgcagctcaagcatgtctgcaggacaccctggtcccctctccactggcatccagacatctgctttgggtcatccacatctgtgggtgggccgtgggtagagggacccacaggcgtggacagggcatctctctccatcaagcaaagcagcatgggggcctgcccgtaacgggaggcggacgtggccccgctgggcctctgagtgccagcgcagtctgctgggacatgcacatatcaggggttgtttgcaggatcctcagccatgttcaagtgaagtaagcctgagccagtgcgtggactggtgccacgggagtgccttgtccactgtccccctgtgtccaccagctattctcctggcgccggaactgcctctggtcttgatagcattaagccctgatggcgccggtggcgcggtgggcatggttcttcactgagagccggctctccttttcttaaagtgtgtaaatagtttatttataggggtaagaatgttctcacaccatttcacttcctcttcctctcctccagcattctcctctgagcagccttagatagtgtccatggctggagccgaccctttgagtccccttgagtgtcttaagaaccagcccacaacagcctctctttctcctccacatactgcagcctccctccatgcatcccacatacaagcactcccccactccccagcgtggcctcactgtcttctggtcttggtgctactgaaattgtcacccagaatttgaatcctgaccctccccactgcaagcccagggagccccagcccaagatggccagcctgaaactgttggccagggctcctcttgtggccatgtacccagggctggctggcctgccatttgcctctccccggagacagccgttcttctgcaaccacaccccgtgcctagccacaaccccaggctgcagctgctcagaagctccaggcattttgtttctggtgaccgcccctaatgggatatcggtgatcactggtccacccttcctgtcagggcttttctggggctgctcttggaaatgaagtcttaagtactgaataactcccctggggatagctggggcatttgtctagctgggctactttctaacactttgccatagctcagaccacttctcatcgttcagggatggactgcaaccttaatttacttgccggagtgtacattctagtgtggtgtatactggtggctgttgatgatgatttttttttttttacacaattctctgtagactaggagaagaatgcttgtgtttttcggaagtgtgatgcttctctttgactgccaaactcttttatggaatatatctttatattaatgctgttttggtcattttt

SEQ ID NO: 7158 - protein, 253 aa, Homo sapiens
MHYYRYSNAKVSCWYKYLLFSYNIIFWGVLSDLTKVTRMHGIDPVVLVLMVGVVMFTLGFAGCVGALRENICLLNFFCGTIVLIFFLELAVAVLAFLFQDWVRDRFREFFESNIKSYRDDIDLQNLIDSLQKANQCCGAYGPEDWDLNVYFNCSGASYSREKCGVPFSCCVPDPAQKVVNTQCGYDVRIQLKSKWDESIFTKGCIQALESWLPRNIYIVAGVFIAISLLQIFGIFLARTLISDIEAVKAGHHF

SEQ ID NO: 7159 - DNA, 673 bp, Homo sapiens
gggcaggctggggttgaaactcttcaccccttgcggtctgtactgcctcccaactgagcagccagggagaaggcctagagcctgtgcctttcagctagatagctggaggaactggctcctccctccttaggctgtgctggcctgagctgggagcctgagagctggggcagttgtctctaaagtggcttctgggattctggtaagaggacttggggtggagtcgaaagcagggagccctgtgagttgagacgaactcttgcaatgttgccttggctggtctcgaactcatcttctgggttcaagctgtccgtctgcctcggactcccaaagtgctaggattacagcgttacatccttactattcaaagtgccatccacagacctgctgatgggcagcatgagcatcacctgggagcttgctgcgctgtagaatcttgaggggtctccatccagatcagctgaatcagagtttgcattgttaacaagattctgcttctcagaagatgcactattatagatactctaacgccaaggtcagctgctggtacaagtacctccttttcagctacaacatcatcttctggttggctggagttgtcttccttggagtcgggctgtgggcatggagcgaaaagggtgtgctgtccgacctcaccaaagtgacccggatgcat

SEQ ID NO: 7160 - protein, 56 aa, Homo sapiens
MHYYRYSNAKVSCWYKYLLFSYNIIFWLAGVVFLGVGLWAWSEKGVLSDLTKVTRM

SEQ ID NO: 7161 - DNA, 1230 bp, Homo sapiens
gcgttacatccttactattcaaagtgccatccacagacctgctgatgggcagcatgagcatcactgggcctctgagtgccagcgcagtctgctgggacatgcacatatcaggggttgtttgcaggatcctcagccatgttcaagtgaagtaagcctgagccagtgcgtggactggtgccacgggagtgccttgtccactgtccccctgtgtccaccagctattctcctggcgccggaactgcctctggtcttgatagcattaagccctgatggcgccggtggcgcggtgggcatggttcttcactgagagccggctctccttttcttaaagtgtgtaaatagtttatttataggggtaagaatgttctcacaccatttcacttcctcttcctctcctccagcattctcctctgagcagccttagatagtgtccatggctggagccgaccctttgagtccccttgagtgtcttaagaaccagcccacaacagcctctctttctcctccacatactgcagcctccctccatgcatcccacatacaagcactcccccactccccagcgtggcctcactgtcttctggtcttggtgctactgaaattgtcacccagaatttgaatcctgaccctccccactgcaagcccagggagccccagcccaagatggccagcctgaaactgttggccagggctcctcttgtggccatgtacccagggctggctggcctgccatttgcctctccccggagacagccgttcttctgcaaccacaccccgtgcctagccacaaccccaggctgcagctgctcagaagctccaggcattttgtttctggtgaccgcccctaatgggatatcggtgatcactggtccacccttcctgtcagggcttttctggggctgctcttggaaatgaagtcttaagtactgaataactcccctggggatagctggggcatttgtctagctgggctactttctaacactttgccatagctcagaccacttctcatcgttcagggatggactgcaaccttaatttacttgccggagtgtacattctagtgtggtgtatactggtggctgttgatgatgatttttttttttttacacaattctctgtagactaggagaagaatgcttgtgtttttcggaagtgtgatgcttctctttgactgccaaactcttttatggaatatatctttatattaatgctgttttggtcattttt

SEQ ID NO: 7162 - protein, 35 aa, Homo sapiens
MGSMSITGPLSASAVCWDMHISGVVCRILSHVQVK

SEQ ID NO: 7163 - DNA, 2651 bp, Homo sapiens
gcgttacatccttactattcaaagtgccatccacagacctgctgatgggcagcatgagcatcactgggcctctgagtgccagcgcagtctgctgggacatgcacatatcaggggttgtttgcaggatcctcagccatgttcaagtgaagtaagcctgagccagtgcgtggactggtgccacgggagtgccttgtccactgtccccctgtgtccaccagctattctcctggcgccggaactgcctctggtcttgatagcattaagccctgatggcgccggtggcgcggtgggcatggttcttcactgagagccggctctccttttcttaaagtgtgtaaatagtttatttataggggtaagaatgttctcacaccatttcacttcctcttcctctcctccagcattctcctctgagcagccttagatagtgtccatggctggagccgaccctttgagtccccttgagtgtcttaagaaccagcccacaacagcctctctttctcctccacatactgcagcctccctccatgcatcccacatacaagcactcccccactccccagcgtggcctcactgtcttctggtcttggtgctactgaaattgtcacccagaatttgaatcctgaccctccccactgcaagcccagggagccccagcccaagatggccagcctgaaactgttggccagggctcctcttgtggccatgtacccagggctggctggcctgccatttgcctctccccggagacagccgttcttctgcaaccacaccccgtgcctagccacaaccccaggctgcagctgctcagaagctccaggcattttgtttctggtgaccgcccctaatgggatatcggtgatcactggtccacccttcctgtcagggcttttctggggctgctcttggaaatgaagtcttaagtactgaataactcccctggggatagctggggcatttgtctagctgggctactttctaacactttgccatagctcagaccacttctcatcgttcagggatggactgcaaccttaatttacttgccggagtgtacattctagtgtggtgtatactggtggctgttgatgatgatttttttttttttacacaattctctgtagactaggagaagaatgcttgtgtttttcggaagtgtgatgcttctctttgactgccaaactcttttatggaatatatctttatattaatgctgttttggtcatttttgtttggggtcactattgagatattgctaagcatctcagtggtaaacgcggctgccagaggaaccaagggatagggtatgtagaccttacagaaggatggatggtaaaggcagtccatcatcagcacaatctgacttacatttcattgagtaattttttttttttttaagattctgtatggcagcactttcagttgcccttgtgtgccggccacagccgcacaagttggcttgtggtttatcccccgctataagtgagagctggagaaacttcaactccataggtctagaggaaacattgttttaggttatttctgtccacccctgtgcgatactatttattgatccaagcagaagagcttggggacactgagtcgaagtggggacatgggattgaagcctgggcactgctgctgcatgagctgtgtgtcctgggtgtgccggcctttctgtgaagggggttggtggcagtgcccacctcactagatgcctctgacccagcctcccctgggggagtgggtggccacagaccctccctgccagagctcctggaaggctcctgcaggcctgacccatctattcctgtagacctggtttaggatgaagtctcggtgcgatttttgcagagttgggtttatctttcaactatagacccttctggctgttctcagccatatcatgtgactctgaatagttggatgaggaatggaaagaaagcaaggatgagagccggtcacgtggcagtctccgcccagcatcggctgtccgcacagaggcacagggcaggcctcctgtgcactccccacctagcactggcctgtcctgaatccccgccttccctggttggaggccagctgtggcatttgcaccctcttctcacctcaccatgcacatgctaactttaaagccttggggtctttcctgtaccccctcctcaaccctggtccaccccctctcaggatcttgtcaacgttatttttcctgtcccgtcttcctatcgctggccttcctttcccatcctaaaaacttgccgaggccctatggctccctccctttctttcccaggcagcttcttatctgggctgtctgtaccccttcctttgcaccacccaccatgccccacgtagctgaaagctgcttatcccaattgtcaactctggccttcttcagcctctgtagcaccagacactgcacctcctgaatgtcctctgcttctctgcttcagaggcccaggctcgccagttctctgacctctcccatatgtctgcttaggactctgctgcagctgtcctcaccagcctccggggaatcccactacccacagggcagggctgtgggctgggctgaaaaaccatctgcatggtccacaagaagcctggcactgggtttccccatgaataacaatgaaaattaatggatgcac

SEQ ID NO: 7164 - protein, 35 aa, Homo sapiens; identical to SEQ ID NO: 7162

SEQ ID NO: 7165 - DNA, 4766 bp, Homo sapiens
gcgttacatccttactattcaaagtgccatccacagacctgctgatgggcagcatgagcatcactgggcctctgagtgccagcgcagtctgctgggacatgcacatatcaggggttgtttgcaggatcctcagccatgttcaagtgaagtaagcctgagccagtgcgtggactggtgccacgggagtgccttgtccactgtccccctgtgtccaccagctattctcctggcgccggaactgcctctggtcttgatagcattaagccctgatggcgccggtggcgcggtgggcatggttcttcactgagagccggctctccttttcttaaagtgtgtaaatagtttatttataggggtaagaatgttctcacaccatttcacttcctcttcctctcctccagcattctcctctgagcagccttagatagtgtccatggctggagccgaccctttgagtccccttgagtgtcttaagaaccagcccacaacagcctctctttctcctccacatactgcagcctccctccatgcatcccacatacaagcactcccccactccccagcgtggcctcactgtcttctggtcttggtgctactgaaattgtcacccagaatttgaatcctgaccctccccactgcaagcccagggagccccagcccaagatggccagcctgaaactgttggccagggctcctcttgtggccatgtacccagggctggctggcctgccatttgcctctccccggagacagccgttcttctgcaaccacaccccgtgcctagccacaaccccaggctgcagctgctcagaagctccaggcattttgtttctggtgaccgcccctaatgggatatcggtgatcactggtccacccttcctgtcagggcttttctggggctgctcttggaaatgaagtcttaagtactgaataactcccctggggatagctggggcatttgtctagctgggctactttctaacactttgccatagctcagaccacttctcatcgttcagggatggactgcaaccttaatttacttgccggagtgtacattctagtgtggtgtatactggtggctgttgatgatgatttttttttttttacacaattctctgtagactaggagaagaatgcttgtgtttttcggaagtgtgatgcttctctttgactgccaaactcttttatggaatatatctttatattaatgctgttttggtcatttttgtttggggtcactattgagatattgctaagcatctcagtggtaaacgcggctgccagaggaaccaagggatagggtatgtagaccttacagaaggatggatggtaaaggcagtccatcatcagcacaatctgacttacatttcattgagtaattttttttttttttaagattctgtatggcagcactttcagttgcccttgtgtgccggccacagccgcacaagttggcttgtggtttatcccccgctataagtgagagctggagaaacttcaactccataggtctagaggaaacattgttttaggttatttctgtccacccctgtgcgatactatttattgatccaagcagaagagcttggggacactgagtcgaagtggggacatgggattgaagcctgggcactgctgctgcatgagctgtgtgtcctgggtgtgccggcctttctgtgaagggggttggtggcagtgcccacctcactagatgcctctgacccagcctcccctgggggagtgggtggccacagaccctccctgccagagctcctggaaggctcctgcaggcctgacccatctattcctgtagacctggtttaggatgaagtctcggtgcgatttttgcagagttgggtttatctttcaactatagacccttctggctgttctcagccatatcatgtgactctgaatagttggatgaggaatggaaagaaagcaaggatgagagccggtcacgtggcagtctccgcccagcatcggctgtccgcacagaggcacagggcaggcctcctgtgcactccccacctagcactggcctgtcctgaatccccgccttccctggttggaggccagctgtggcatttgcaccctcttctcacctcaccatgcacatgctaactttaaagccttggggtctttcctgtaccccctcctcaaccctggtccaccccctctcaggatcttgtcaacgttatttttcctgtcccgtcttcctatcgctggccttcctttcccatcctaaaaacttgccgaggccctatggctccctccctttctttcccaggcagcttcttatctgggctgtctgtaccccttcctttgcaccacccaccatgccccacgtagctgaaagctgcttatcccaattgtcaactctggccttcttcagcctctgtagcaccagacactgcacctcctgaatgtcctctgcttctctgcttcagaggcccaggctcgccagttctctgacctctcccatatgtctgcttaggactctgctgcagctgtcctcaccagcctccggggaatcccactacccacagggcagggctgtgggctgggctgaaaaaccatctgcatggtccacaagaagcctggcactgggtttccccatgaataacaatgaaaattaatggatgcacaaccttcctggaacgtggaatttctctgggagattccatgcagaggccactggggaggtggcaggcatgcatgtgactgtaggtggctgcagtgttggaaggctcccagcagagcagagagggtgtcagtctcatcagggaacccacctgatggcttctcagccagcagtctcagaggaacatagacgactgctgagaaaggagggaggcagcagtggtcccagcacctgaggcatcctgctgtcatgggaaggtctccgcccaaatgtcagatgcatcagcctgtcacccgctggtccagagctttcagctgtactggtagggggtgggtggtggagtgctgaatgaccttcacaggtgggcctttccagctctagggtcttacgggtgtcggtccacagaaccacggtttttaggttgtgtgtccggggctatgggaacctgtcccccatgatggatcttggtagagacacttccctctgtcatcgtgcccaggaggatgctgcaggtgactacctgcagccctgttctcattcatttggatgccctccagaaatctggggagccatacacctttagagccttttttgctccttatcaagttggcaaggcttggccaattcctgttcaaggctgcattaaaggcatgttcaccatcctggctaatacggtgaaaccccttctctactaaaaatacaaaaaaattagccgggcttggtggcgggtgcctgtagtcccagctactccggaggctgaggcaggggaatggtgtgaacccaggaggcggagcttgcagtgagccgagatcacaccactgcactccagcctgggctcaaaaaagaaaaaaaaaaaaaaaaaaaggcccgttcattctcaaatgcttttggcgtctccagggtgcctcaggaaaacatgaagtgggcattgtagaacttggggctactgtgtaactttggaagaaaaagttaagggtacttttaagtggatactgttttgatgaaattgccaacttcagggagcccagcttggagaaggaggacgtgagtattccttacaaggctccgaaacaattctttcttcacttagttttctttctgtgctctgcatcttatattccagcagggtcttccaatgcatggtttaataactactagaactggccaggtgcagtggctcacgcctgtaatcccagaactttgggaggctaagacaggcagatcacttgaggccaggagttcgagaccagcctggacaacatggtgatacccagtttctactaaaaatacaaaaattagtcgggcatggtgatgtgcacctgtagtcccagctgctcgggaggctgaggcaggagaatcgcttgaacccgggagacagaggttgcaacgagccaagatcgagccactgcgctccggcctgggtgacaggagactccatctcaaaaaataaaattaaaaaaaaactactacaataaattatcaccttggactgtataaaacaacttttaaactagtctttttaaaaagtacacttaaataaaaatctaaacataagagaatgtaaagtgaaaagtgaaagtatgtcttctgttacgcagaggtaactactattaggaatccttcctgaaaatgtccatgcatctactcaggtcatcacacccatggaatcattttacatactattttatgagtgttacttaatatactgatccacagtgcgttttcacggtcacgccatcagttgtaggagtgtgccaagaacagatgggccttgcctttgtaccagaggagtccatttacagttgcaggtaatagaaaacccaattcagactggcctaaacaatgaggggaggttttggctcttgaaactggaaagtcccaaggtggggtgagtttcaggtttgggttgatccaagtggctcagtgacgtcaacaggatcttgtttccatttctctgccttccacagcctccccttcatctatggtggagggaaggagtctaccacagacaaaccccgagcctccccctgatgggtggtgtggtggtgaagccagcaagggaagggatccccggacacacccctcctcatgctttatcccactgaaaccatgcggctgt

SEQ ID NO: 7166 - protein, 35 aa, Homo sapiens; identical to SEQ ID NO: 7162

SEQ ID NO: 7167 - DNA, 463 bp, Homo sapiens
aaatcctcctggggccttcggagatccttccatctggaccagtgcacagaattccctttacatcttttgggatacaccctaaagaagatccagtctttgttcaccttcacgagtttcttcaatgtgaaagctacaggaggctttgttcaaagaaactctgacccagaaacccaacatggaagcaggcagagcaggacacttttatcttcaggtggctgggggaaaggaaggcttcacaaggtgcacactaaaaaccatgggcctactgtgactgacgccatgctccacaggacagcagaacggctcaggagctgcctccagaatcatatggcaactagttcaacagaactgtgatagacttggaaatgcatgttttgaagagctgtcattcacagcagcttgaaaaagcccccactggccaaatctggaacaatctgagcggcaaaataaacaataataacaa

SEQ ID NO: 7168 - protein, 31 aa, Homo sapiens
MEAGRAGHFYLQVAGGKEGFTRCTLKTMGLL

SEQ ID NO: 7169 - DNA, 257 bp, Homo sapiens
ataaaaatttgtaagcatgtgcttaaaggccaaagtggaatgttaagagcatgaaaatggctgcatggggtggtggtggacttacaagtgattttccaaaaaggtttccagcatcacacttaccattaccacctttgtattataaatgaaaatggggccgctgctggttggaggtgcccctgctgggaaggagaatgcttgctacaatatataaggctggcagtcatcataaacagggctccttggcttcagtgttg

SEQ ID NO: 7170 - protein, 32 aa, Homo sapiens
MKMAAWGGGGLTSDFPKRFPASHLPLPPLYYK

SEQ ID NO: 7171 - DNA, 601 bp, Homo sapiens
agttggctggagttgtcttccttggagtcgggctgtgggcatggagcgaaaagggtgtgctgtccgacctcaccaaagtgacccagggctggctggcctgccatttgcctctccccggagacagccgttcttctgcaaccacaccccgtgcctagccacaaccccaggctgcagctgctcagaagctccaggcattttgtttctggtgaccgcccctaatgggatatcggtgatcactggtccacccttcctgtcagggcttttctggggctgctcttggaaatgaagtcttaagtactgaataactcccctggggatagctggggcatttgtctagctgggctactttctaacactttgccatagctcagaccacttctcatcgttcagggatggactgcaaccttaatttacttgccggagtgtacattctagtgtggtgtatactggtggctgttgatgatgatttttttttttttacacaattctctgtagactaggagaagaatgcttgtgtttttcggaagtgtgatgcttctctttgactgccaaactcttttatggaatatatctttatattaatgctgttttggtcattttt

SEQ ID NO: 7172 - protein, 81 aa, Homo sapiens
MERKGCAVRPHQSDPGLAGLPFASPRRQPFFCNHTPCLATTPGCSCSEAPGILFLVTAPNGISVITGPPFLSGLFWGCSWK

SEQ ID NO: 7173 - DNA, 2022 bp, Homo sapiens
agttggctggagttgtcttccttggagtcgggctgtgggcatggagcgaaaagggtgtgctgtccgacctcaccaaagtgacccagggctggctggcctgccatttgcctctccccggagacagccgttcttctgcaaccacaccccgtgcctagccacaaccccaggctgcagctgctcagaagctccaggcattttgtttctggtgaccgcccctaatgggatatcggtgatcactggtccacccttcctgtcagggcttttctggggctgctcttggaaatgaagtcttaagtactgaataactcccctggggatagctggggcatttgtctagctgggctactttctaacactttgccatagctcagaccacttctcatcgttcagggatggactgcaaccttaatttacttgccggagtgtacattctagtgtggtgtatactggtggctgttgatgatgatttttttttttttacacaattctctgtagactaggagaagaatgcttgtgtttttcggaagtgtgatgcttctctttgactgccaaactcttttatggaatatatctttatattaatgctgttttggtcatttttgtttggggtcactattgagatattgctaagcatctcagtggtaaacgcggctgccagaggaaccaagggatagggtatgtagaccttacagaaggatggatggtaaaggcagtccatcatcagcacaatctgacttacatttcattgagtaattttttttttttttaagattctgtatggcagcactttcagttgcccttgtgtgccggccacagccgcacaagttggcttgtggtttatcccccgctataagtgagagctggagaaacttcaactccataggtctagaggaaacattgttttaggttatttctgtccacccctgtgcgatactatttattgatccaagcagaagagcttggggacactgagtcgaagtggggacatgggattgaagcctgggcactgctgctgcatgagctgtgtgtcctgggtgtgccggcctttctgtgaagggggttggtggcagtgcccacctcactagatgcctctgacccagcctcccctgggggagtgggtggccacagaccctccctgccagagctcctggaaggctcctgcaggcctgacccatctattcctgtagacctggtttaggatgaagtctcggtgcgatttttgcagagttgggtttatctttcaactatagacccttctggctgttctcagccatatcatgtgactctgaatagttggatgaggaatggaaagaaagcaaggatgagagccggtcacgtggcagtctccgcccagcatcggctgtccgcacagaggcacagggcaggcctcctgtgcactccccacctagcactggcctgtcctgaatccccgccttccctggttggaggccagctgtggcatttgcaccctcttctcacctcaccatgcacatgctaactttaaagccttggggtctttcctgtaccccctcctcaaccctggtccaccccctctcaggatcttgtcaacgttatttttcctgtcccgtcttcctatcgctggccttcctttcccatcctaaaaacttgccgaggccctatggctccctccctttctttcccaggcagcttcttatctgggctgtctgtaccccttcctttgcaccacccaccatgccccacgtagctgaaagctgcttatcccaattgtcaactctggccttcttcagcctctgtagcaccagacactgcacctcctgaatgtcctctgcttctctgcttcagaggcccaggctcgccagttctctgacctctcccatatgtctgcttaggactctgctgcagctgtcctcaccagcctccggggaatcccactacccacagggcagggctgtgggctgggctgaaaaaccatctgcatggtccacaagaagcctggcactgggtttccccatgaataacaatgaaaattaatggatgcac

SEQ ID NO: 7174 - protein, 81 aa, Homo sapiens; identical to SEQ ID NO: 7172

SEQ ID NO: 7175 - DNA, 4137 bp, Homo sapiens
agttggctggagttgtcttccttggagtcgggctgtgggcatggagcgaaaagggtgtgctgtccgacctcaccaaagtgacccagggctggctggcctgccatttgcctctccccggagacagccgttcttctgcaaccacaccccgtgcctagccacaaccccaggctgcagctgctcagaagctccaggcattttgtttctggtgaccgcccctaatgggatatcggtgatcactggtccacccttcctgtcagggcttttctggggctgctcttggaaatgaagtcttaagtactgaataactcccctggggatagctggggcatttgtctagctgggctactttctaacactttgccatagctcagaccacttctcatcgttcagggatggactgcaaccttaatttacttgccggagtgtacattctagtgtggtgtatactggtggctgttgatgatgatttttttttttttacacaattctctgtagactaggagaagaatgcttgtgtttttcggaagtgtgatgcttctctttgactgccaaactcttttatggaatatatctttatattaatgctgttttggtcatttttgtttggggtcactattgagatattgctaagcatctcagtggtaaacgcggctgccagaggaaccaagggatagggtatgtagaccttacagaaggatggatggtaaaggcagtccatcatcagcacaatctgacttacatttcattgagtaattttttttttttttaagattctgtatggcagcactttcagttgcccttgtgtgccggccacagccgcacaagttggcttgtggtttatcccccgctataagtgagagctggagaaacttcaactccataggtctagaggaaacattgttttaggttatttctgtccacccctgtgcgatactatttattgatccaagcagaagagcttggggacactgagtcgaagtggggacatgggattgaagcctgggcactgctgctgcatgagctgtgtgtcctgggtgtgccggcctttctgtgaagggggttggtggcagtgcccacctcactagatgcctctgacccagcctcccctgggggagtgggtggccacagaccctccctgccagagctcctggaaggctcctgcaggcctgacccatctattcctgtagacctggtttaggatgaagtctcggtgcgatttttgcagagttgggtttatctttcaactatagacccttctggctgttctcagccatatcatgtgactctgaatagttggatgaggaatggaaagaaagcaaggatgagagccggtcacgtggcagtctccgcccagcatcggctgtccgcacagaggcacagggcaggcctcctgtgcactccccacctagcactggcctgtcctgaatccccgccttccctggttggaggccagctgtggcatttgcaccctcttctcacctcaccatgcacatgctaactttaaagccttggggtctttcctgtaccccctcctcaaccctggtccaccccctctcaggatcttgtcaacgttatttttcctgtcccgtcttcctatcgctggccttcctttcccatcctaaaaacttgccgaggccctatggctccctccctttctttcccaggcagcttcttatctgggctgtctgtaccccttcctttgcaccacccaccatgccccacgtagctgaaagctgcttatcccaattgtcaactctggccttcttcagcctctgtagcaccagacactgcacctcctgaatgtcctctgcttctctgcttcagaggcccaggctcgccagttctctgacctctcccatatgtctgcttaggactctgctgcagctgtcctcaccagcctccggggaatcccactacccacagggcagggctgtgggctgggctgaaaaaccatctgcatggtccacaagaagcctggcactgggtttccccatgaataacaatgaaaattaatggatgcacaaccttcctggaacgtggaatttctctgggagattccatgcagaggccactggggaggtggcaggcatgcatgtgactgtaggtggctgcagtgttggaaggctcccagcagagcagagagggtgtcagtctcatcagggaacccacctgatggcttctcagccagcagtctcagaggaacatagacgactgctgagaaaggagggaggcagcagtggtcccagcacctgaggcatcctgctgtcatgggaaggtctccgcccaaatgtcagatgcatcagcctgtcacccgctggtccagagctttcagctgtactggtagggggtgggtggtggagtgctgaatgaccttcacaggtgggcctttccagctctagggtcttacgggtgtcggtccacagaaccacggtttttaggttgtgtgtccggggctatgggaacctgtcccccatgatggatcttggtagagacacttccctctgtcatcgtgcccaggaggatgctgcaggtgactacctgcagccctgttctcattcatttggatgccctccagaaatctggggagccatacacctttagagccttttttgctccttatcaagttggcaaggcttggccaattcctgttcaaggctgcattaaaggcatgttcaccatcctggctaatacggtgaaaccccttctctactaaaaatacaaaaaaattagccgggcttggtggcgggtgcctgtagtcccagctactccggaggctgaggcaggggaatggtgtgaacccaggaggcggagcttgcagtgagccgagatcacaccactgcactccagcctgggctcaaaaaagaaaaaaaaaaaaaaaaaaaggcccgttcattctcaaatgcttttggcgtctccagggtgcctcaggaaaacatgaagtgggcattgtagaacttggggctactgtgtaactttggaagaaaaagttaagggtacttttaagtggatactgttttgatgaaattgccaacttcagggagcccagcttggagaaggaggacgtgagtattccttacaaggctccgaaacaattctttcttcacttagttttctttctgtgctctgcatcttatattccagcagggtcttccaatgcatggtttaataactactagaactggccaggtgcagtggctcacgcctgtaatcccagaactttgggaggctaagacaggcagatcacttgaggccaggagttcgagaccagcctggacaacatggtgatacccagtttctactaaaaatacaaaaattagtcgggcatggtgatgtgcacctgtagtcccagctgctcgggaggctgaggcaggagaatcgcttgaacccgggagacagaggttgcaacgagccaagatcgagccactgcgctccggcctgggtgacaggagactccatctcaaaaaataaaattaaaaaaaaactactacaataaattatcaccttggactgtataaaacaacttttaaactagtctttttaaaaagtacacttaaataaaaatctaaacataagagaatgtaaagtgaaaagtgaaagtatgtcttctgttacgcagaggtaactactattaggaatccttcctgaaaatgtccatgcatctactcaggtcatcacacccatggaatcattttacatactattttatgagtgttacttaatatactgatccacagtgcgttttcacggtcacgccatcagttgtaggagtgtgccaagaacagatgggccttgcctttgtaccagaggagtccatttacagttgcaggtaatagaaaacccaattcagactggcctaaacaatgaggggaggttttggctcttgaaactggaaagtcccaaggtggggtgagtttcaggtttgggttgatccaagtggctcagtgacgtcaacaggatcttgtttccatttctctgccttccacagcctccccttcatctatggtggagggaaggagtctaccacagacaaaccccgagcctccccctgatgggtggtgtggtggtgaagccagcaagggaagggatccccggacacacccctcctcatgctttatcccactgaaaccatgcggctgt

SEQ ID NO: 7176 - protein, 81 aa, Homo sapiens; identical to SEQ ID NO: 7172

SEQ ID NO: 7177 - DNA, 519 bp, Homo sapiens
agaagacgtctctcgttaaggggacagctgcaggagtgtaggtgccttgttctggcctccgtgtggaggcagtagtgacaaagagggaggcaggcctggggcaggggcgaggctctgtcctccaggcattttgtttctggtgaccgcccctaatgggatatcggtgatcactggtccacccttcctgtcagggcttttctggggctgctcttggaaatgaagtcttaagtactgaataactcccctggggatagctggggcatttgtctagctgggctactttctaacactttgccatagctcagaccacttctcatcgttcagggatggactgcaaccttaatttacttgccggagtgtacattctagtgtggtgtatactggtggctgttgatgatgatttttttttttttacacaattctctgtagactaggagaagaatgcttgtgtttttcggaagtgtgatgcttctctttgactgccaaactcttttatggaatatatctttatattaatgc

SEQ ID NO: 7178 - protein, 35 aa, Homo sapiens [sequence omitted]

SEQ ID NO: 7179 - DNA, 1956 bp, Homo sapiens
agaagacgtctctcgttaaggggacagctgcaggagtgtaggtgccttgttctggcctccgtgtggaggcagtagtgacaaagagggaggcaggcctggggcaggggcgaggctctgtcctccaggcattttgtttctggtgaccgcccctaatgggatatcggtgatcactggtccacccttcctgtcagggcttttctggggctgctcttggaaatgaagtcttaagtactgaataactcccctggggatagctggggcatttgtctagctgggctactttctaacactttgccatagctcagaccacttctcatcgttcagggatggactgcaaccttaatttacttgccggagtgtacattctagtgtggtgtatactggtggctgttgatgatgatttttttttttttacacaattctctgtagactaggagaagaatgcttgtgtttttcggaagtgtgatgcttctctttgactgccaaactcttttatggaatatatctttatattaatgctgttttggtcatttttgtttggggtcactattgagatattgctaagcatctcagtggtaaacgcggctgccagaggaaccaagggatagggtatgtagaccttacagaaggatggatggtaaaggcagtccatcatcagcacaatctgacttacatttcattgagtaattttttttttttttaagattctgtatggcagcactttcagttgcccttgtgtgccggccacagccgcacaagttggcttgtggtttatcccccgctataagtgagagctggagaaacttcaactccataggtctagaggaaacattgttttaggttatttctgtccacccctgtgcgatactatttattgatccaagcagaagagcttggggacactgagtcgaagtggggacatgggattgaagcctgggcactgctgctgcatgagctgtgtgtcctgggtgtgccggcctttctgtgaagggggttggtggcagtgcccacctcactagatgcctctgacccagcctcccctgggggagtgggtggccacagaccctccctgccagagctcctggaaggctcctgcaggcctgacccatctattcctgtagacctggtttaggatgaagtctcggtgcgatttttgcagagttgggtttatctttcaactatagacccttctggctgttctcagccatatcatgtgactctgaatagttggatgaggaatggaaagaaagcaaggatgagagccggtcacgtggcagtctccgcccagcatcggctgtccgcacagaggcacagggcaggcctcctgtgcactccccacctagcactggcctgtcctgaatccccgccttccctggttggaggccagctgtggcatttgcaccctcttctcacctcaccatgcacatgctaactttaaagccttggggtctttcctgtaccccctcctcaaccctggtccaccccctctcaggatcttgtcaacgttatttttcctgtcccgtcttcctatcgctggccttcctttcccatcctaaaaacttgccgaggccctatggctccctccctttctttcccaggcagcttcttatctgggctgtctgtaccccttcctttgcaccacccaccatgccccacgtagctgaaagctgcttatcccaattgtcaactctggccttcttcagcctctgtagcaccagacactgcacctcctgaatgtcctctgcttctctgcttcagaggcccaggctcgccagttctctgacctctcccatatgtctgcttaggactctgctgcagctgtcctcaccagcctccggggaatcccactacccacagggcagggctgtgggctgggctgaaaaaccatctgcatggtccacaagaagcctggcactgggtttccccatgaataacaatgaaaattaatggatgcac

SEQ ID NO: 7180 - protein, 104 aa, Homo sapiens
MHMLTLKPWGLSCTPSSTLVHPLSGSCQRYFSCPVFLSLAFLSHPKNLPRPYGSLPFFPRQLLIWAVCTPSFAPPTMPHVAESCLSQLSTLAFFSLCSTRHCTS

SEQ ID NO: 7181 - DNA, 4071 bp, Homo sapiens
agaagacgtctctcgttaaggggacagctgcaggagtgtaggtgccttgttctggcctccgtgtggaggcagtagtgacaaagagggaggcaggcctggggcaggggcgaggctctgtcctccaggcattttgtttctggtgaccgcccctaatgggatatcggtgatcactggtccacccttcctgtcagggcttttctggggctgctcttggaaatgaagtcttaagtactgaataactcccctggggatagctggggcatttgtctagctgggctactttctaacactttgccatagctcagaccacttctcatcgttcagggatggactgcaaccttaatttacttgccggagtgtacattctagtgtggtgtatactggtggctgttgatgatgatttttttttttttacacaattctctgtagactaggagaagaatgcttgtgtttttcggaagtgtgatgcttctctttgactgccaaactcttttatggaatatatctttatattaatgctgttttggtcatttttgtttggggtcactattgagatattgctaagcatctcagtggtaaacgcggctgccagaggaaccaagggatagggtatgtagaccttacagaaggatggatggtaaaggcagtccatcatcagcacaatctgacttacatttcattgagtaattttttttttttttaagattctgtatggcagcactttcagttgcccttgtgtgccggccacagccgcacaagttggcttgtggtttatcccccgctataagtgagagctggagaaacttcaactccataggtctagaggaaacattgttttaggttatttctgtccacccctgtgcgatactatttattgatccaagcagaagagcttggggacactgagtcgaagtggggacatgggattgaagcctgggcactgctgctgcatgagctgtgtgtcctgggtgtgccggcctttctgtgaagggggttggtggcagtgcccacctcactagatgcctctgacccagcctcccctgggggagtgggtggccacagaccctccctgccagagctcctggaaggctcctgcaggcctgacccatctattcctgtagacctggtttaggatgaagtctcggtgcgatttttgcagagttgggtttatctttcaactatagacccttctggctgttctcagccatatcatgtgactctgaatagttggatgaggaatggaaagaaagcaaggatgagagccggtcacgtggcagtctccgcccagcatcggctgtccgcacagaggcacagggcaggcctcctgtgcactccccacctagcactggcctgtcctgaatccccgccttccctggttggaggccagctgtggcatttgcaccctcttctcacctcaccatgcacatgctaactttaaagccttggggtctttcctgtaccccctcctcaaccctggtccaccccctctcaggatcttgtcaacgttatttttcctgtcccgtcttcctatcgctggccttcctttcccatcctaaaaacttgccgaggccctatggctccctccctttctttcccaggcagcttcttatctgggctgtctgtaccccttcctttgcaccacccaccatgccccacgtagctgaaagctgcttatcccaattgtcaactctggccttcttcagcctctgtagcaccagacactgcacctcctgaatgtcctctgcttctctgcttcagaggcccaggctcgccagttctctgacctctcccatatgtctgcttaggactctgctgcagctgtcctcaccagcctccggggaatcccactacccacagggcagggctgtgggctgggctgaaaaaccatctgcatggtccacaagaagcctggcactgggtttccccatgaataacaatgaaaattaatggatgcacaaccttcctggaacgtggaatttctctgggagattccatgcagaggccactggggaggtggcaggcatgcatgtgactgtaggtggctgcagtgttggaaggctcccagcagagcagagagggtgtcagtctcatcagggaacccacctgatggcttctcagccagcagtctcagaggaacatagacgactgctgagaaaggagggaggcagcagtggtcccagcacctgaggcatcctgctgtcatgggaaggtctccgcccaaatgtcagatgcatcagcctgtcacccgctggtccagagctttcagctgtactggtagggggtgggtggtggagtgctgaatgaccttcacaggtgggcctttccagctctagggtcttacgggtgtcggtccacagaaccacggtttttaggttgtgtgtccggggctatgggaacctgtcccccatgatggatcttggtagagacacttccctctgtcatcgtgcccaggaggatgctgcaggtgactacctgcagccctgttctcattcatttggatgccctccagaaatctggggagccatacacctttagagccttttttgctccttatcaagttggcaaggcttggccaattcctgttcaaggctgcattaaaggcatgttcaccatcctggctaatacggtgaaaccccttctctactaaaaatacaaaaaaattagccgggcttggtggcgggtgcctgtagtcccagctactccggaggctgaggcaggggaatggtgtgaacccaggaggcggagcttgcagtgagccgagatcacaccactgcactccagcctgggctcaaaaaagaaaaaaaaaaaaaaaaaaaggcccgttcattctcaaatgcttttggcgtctccagggtgcctcaggaaaacatgaagtgggcattgtagaacttggggctactgtgtaactttggaagaaaaagttaagggtacttttaagtggatactgttttgatgaaattgccaacttcagggagcccagcttggagaaggaggacgtgagtattccttacaaggctccgaaacaattctttcttcacttagttttctttctgtgctctgcatcttatattccagcagggtcttccaatgcatggtttaataactactagaactggccaggtgcagtggctcacgcctgtaatcccagaactttgggaggctaagacaggcagatcacttgaggccaggagttcgagaccagcctggacaacatggtgatacccagtttctactaaaaatacaaaaattagtcgggcatggtgatgtgcacctgtagtcccagctgctcgggaggctgaggcaggagaatcgcttgaacccgggagacagaggttgcaacgagccaagatcgagccactgcgctccggcctgggtgacaggagactccatctcaaaaaataaaattaaaaaaaaactactacaataaattatcaccttggactgtataaaacaacttttaaactagtctttttaaaaagtacacttaaataaaaatctaaacataagagaatgtaaagtgaaaagtgaaagtatgtcttctgttacgcagaggtaactactattaggaatccttcctgaaaatgtccatgcatctactcaggtcatcacacccatggaatcattttacatactattttatgagtgttacttaatatactgatccacagtgcgttttcacggtcacgccatcagttgtaggagtgtgccaagaacagatgggccttgcctttgtaccagaggagtccatttacagttgcaggtaatagaaaacccaattcagactggcctaaacaatgaggggaggttttggctcttgaaactggaaagtcccaaggtggggtgagtttcaggtttgggttgatccaagtggctcagtgacgtcaacaggatcttgtttccatttctctgccttccacagcctccccttcatctatggtggagggaaggagtctaccacagacaaaccccgagcctccccctgatgggtggtgtggtggtgaagccagcaagggaagggatccccggacacacccctcctcatgctttatcccactgaaaccatgcggctgt

SEQ ID NO: 7182 - protein, 104 aa, Homo sapiens; identical to SEQ ID NO: 7180

SEQ ID NO: 7183 - DNA, 2602 bp, Homo sapiens
attacctctgtaaagagcctgtctacaaatacagtcaccttctgaagtcctgggggttaggacttcagtgtatggattttgaggacacaatttagctcctaacacctctaaaattaggggctaatactccatcatgttgccatggaggaggctgataggtgtgagggggctggggccgattgccctgtgtggggtgggcagggctggggtgtgtgctgggatggttactgacaccccaccggggttagcagtggagggagctggttggctggcgactgttgcctgctggctctgtctcctggagctgagcttactggtgggatgcccgctccgagaagcacccttcttctcttcttaggagactctggacccccttctccaggtttctctccctttagaggcacattttcctccaagccttcaagccccttctctttctccagatgtggatggtggggaagggtatcttgagaaagttgggctttaaatctctggagacctgaaaggaaacagccagggagcctttggtcagacaggtggtgcgatggcacagtgcccagcgaggggcagaggctgagaggagctgacgagcatctcctggagagtcctccttgcctgcctcctggatccctcgttcccaccctgctttgccctgctccttaccagagctcactaggggatcaggtggggacatcgtgtgtgccaaaggctcagacccctgtggtgttttcctgcagctgaagagcaagtgggatgagtccatcttcacgaaaggctgcatccaggcgctggaaagctggctcccgcggaacatttacattgtggctggcgtcttcatcgccatctcgctgttgcagatatttggcatcttcctggcaaggacgctgatctcagacatcgaggcagtgaaggccggccatcacttctgaggagcagagttgagggagccgagctgagccacgctgggaggccagagcctttctctgccatcagccctacgtccagagggagaggagccgacacccccagagccagtgccccatcttaagcatcagcgtgacgtgacctctctgtttctgcttgctggtgctgaagaccaagggtcccccttgttacctgcccaaacttgtgactgcatccctctggagtctacccagagacagagaatgtgtctttatgtgggagtggtgactctgaaagacagagagggctcctgtggctgccaggagggcttgactcagaccccctgcagctcaagcatgtctgcaggacaccctggtcccctctccactggcatccagacatctgctttgggtcatccacatctgtgggtgggccgtgggtagagggacccacaggcgtggacagggcatctctctccatcaagcaaagcagcatgggggcctgcccgtaacgggaggcggacgtggccccgctgggcctctgagtgccagcgcagtctgctgggacatgcacatatcaggggttgtttgcaggatcctcagccatgttcaagtgaagtaagcctgagccagtgcgtggactggtgccacgggagtgccttgtccactgtccccctgtgtccaccagctattctcctggcgccggaactgcctctggtcttgatagcattaagccctgatggcgccggtggcgcggtgggcatggttcttcactgagagccggctctccttttcttaaagtgtgtaaatagtttatttataggggtaagaatgttctcacaccatttcacttcctcttcctctcctccagcattctcctctgagcagccttagatagtgtccatggctggagccgaccctttgagtccccttgagtgtcttaagaaccagcccacaacagcctctctttctcctccacatactgcagcctccctccatgcatcccacatacaagcactcccccactccccagcgtggcctcactgtcttctggtcttggtgctactgaaattgtcacccagaatttgaatcctgaccctccccactgcaagcccagggagccccagcccaagatggccagcctgaaactgttggccagggctcctcttgtggccatgtacccagggctggctggcctgccatttgcctctccccggagacagccgttcttctgcaaccacaccccgtgcctagccacaaccccaggctgcagctgctcagaagctccaggcattttgtttctggtgaccgcccctaatgggatatcggtgatcactggtccacccttcctgtcagggcttttctggggctgctcttggaaatgaagtcttaagtactgaataactcccctggggatagctggggcatttgtctagctgggctactttctaacactttgccatagctcagaccacttctcatcgttcagggatggactgcaaccttaatttacttgccggagtgtacattctagtgtggtgtatactggtggctgttgatgatgatttttttttttttacacaattctctgtagactaggagaagaatgcttgtgtttttcggaagtgtgatgcttctctttgactgccaaactcttttatggaatatatctttatattaatgctgttttggtcattttt

SEQ ID NO: 7184 - protein, 44 aa, Homo sapiens
MSPSSRKAASRRWKAGSRGTFTLWLASSSPSRCCRYLASSWQGR

SEQ ID NO: 7185 - DNA, 729 bp, Homo sapiens
ggggttaggacttcagtgtatggattttgaggacacaatttagctcctaacacctctaaaattaggggctaatactccatcatgttgccatggaggaggctgataggtgtgagggggctggggccgattgcccactgcaagcccagggagccccagcccaagatggccagcctgaaactgttggccagggctcctcttgtggccatgtacccagggctggctggcctgccatttgcctctccccggagacagccgttcttctgcaaccacaccccgtgcctagccacaaccccaggctgcagctgctcagaagctccaggcattttgtttctggtgaccgcccctaatgggatatcggtgatcactggtccacccttcctgtcagggcttttctggggctgctcttggaaatgaagtcttaagtactgaataactcccctggggatagctggggcatttgtctagctgggctactttctaacactttgccatagctcagaccacttctcatcgttcagggatggactgcaaccttaatttacttgccggagtgtacattctagtgtggtgtatactggtggctgttgatgatgatttttttttttttacacaattctctgtagactaggagaagaatgcttgtgtttttcggaagtgtgatgcttctctttgactgccaaactcttttatggaatatatctttatattaatgctgttttggtcattttt

SEQ ID NO: 7186 - protein, 110 aa, Homo sapiens
MLPWRRLIGVRGLGPIAHCKPREPQPKMASLKLLARAPLVAMYPGLAGLPFASPRRQPFFCNHTPCLATTPGCSCSEAPGILFLVTAPNGISVITGPPFLSGLFWGCSWK

SEQ ID NO: 7187 - DNA, 2098 bp, Homo sapiens
cctctaaaattaggggctaatactccatcatgttgccatggaggaggctgataggtgtgagggggctggggccgattgcccactgcaagcccagggagccccagcccaagatggccagcctgaaactgttggccagggctcctcttgtggccatgtacccagggctggctggcctgccatttgcctctccccggagacagccgttcttctgcaaccacaccccgtgcctagccacaaccccaggctgcagctgctcagaagctccaggcattttgtttctggtgaccgcccctaatgggatatcggtgatcactggtccacccttcctgtcagggcttttctggggctgctcttggaaatgaagtcttaagtactgaataactcccctggggatagctggggcatttgtctagctgggctactttctaacactttgccatagctcagaccacttctcatcgttcagggatggactgcaaccttaatttacttgccggagtgtacattctagtgtggtgtatactggtggctgttgatgatgatttttttttttttacacaattctctgtagactaggagaagaatgcttgtgtttttcggaagtgtgatgcttctctttgactgccaaactcttttatggaatatatctttatattaatgctgttttggtcatttttgtttggggtcactattgagatattgctaagcatctcagtggtaaacgcggctgccagaggaaccaagggatagggtatgtagaccttacagaaggatggatggtaaaggcagtccatcatcagcacaatctgacttacatttcattgagtaattttttttttttttaagattctgtatggcagcactttcagttgcccttgtgtgccggccacagccgcacaagttggcttgtggtttatcccccgctataagtgagagctggagaaacttcaactccataggtctagaggaaacattgttttaggttatttctgtccacccctgtgcgatactatttattgatccaagcagaagagcttggggacactgagtcgaagtggggacatgggattgaagcctgggcactgctgctgcatgagctgtgtgtcctgggtgtgccggcctttctgtgaagggggttggtggcagtgcccacctcactagatgcctctgacccagcctcccctgggggagtgggtggccacagaccctccctgccagagctcctggaaggctcctgcaggcctgacccatctattcctgtagacctggtttaggatgaagtctcggtgcgatttttgcagagttgggtttatctttcaactatagacccttctggctgttctcagccatatcatgtgactctgaatagttggatgaggaatggaaagaaagcaaggatgagagccggtcacgtggcagtctccgcccagcatcggctgtccgcacagaggcacagggcaggcctcctgtgcactccccacctagcactggcctgtcctgaatccccgccttccctggttggaggccagctgtggcatttgcaccctcttctcacctcaccatgcacatgctaactttaaagccttggggtctttcctgtaccccctcctcaaccctggtccaccccctctcaggatcttgtcaacgttatttttcctgtcccgtcttcctatcgctggccttcctttcccatcctaaaaacttgccgaggccctatggctccctccctttctttcccaggcagcttcttatctgggctgtctgtaccccttcctttgcaccacccaccatgccccacgtagctgaaagctgcttatcccaattgtcaactctggccttcttcagcctctgtagcaccagacactgcacctcctgaatgtcctctgcttctctgcttcagaggcccaggctcgccagttctctgacctctcccatatgtctgcttaggactctgctgcagctgtcctcaccagcctccggggaatcccactacccacagggcagggctgtgggctgggctgaaaaaccatctgcatggtccacaagaagcctggcactgggtttccccatgaataacaatgaaaattaatggatgcac

SEQ ID NO: 7188 - protein, 110 aa, Homo sapiens; identical to SEQ ID NO: 7186

SEQ ID NO: 7189 - DNA, 4213 bp, Homo sapiens
cctctaaaattaggggctaatactccatcatgttgccatggaggaggctgataggtgtgagggggctggggccgattgcccactgcaagcccagggagccccagcccaagatggccagcctgaaactgttggccagggctcctcttgtggccatgtacccagggctggctggcctgccatttgcctctccccggagacagccgttcttctgcaaccacaccccgtgcctagccacaaccccaggctgcagctgctcagaagctccaggcattttgtttctggtgaccgcccctaatgggatatcggtgatcactggtccacccttcctgtcagggcttttctggggctgctcttggaaatgaagtcttaagtactgaataactcccctggggatagctggggcatttgtctagctgggctactttctaacactttgccatagctcagaccacttctcatcgttcagggatggactgcaaccttaatttacttgccggagtgtacattctagtgtggtgtatactggtggctgttgatgatgatttttttttttttacacaattctctgtagactaggagaagaatgcttgtgtttttcggaagtgtgatgcttctctttgactgccaaactcttttatggaatatatctttatattaatgctgttttggtcatttttgtttggggtcactattgagatattgctaagcatctcagtggtaaacgcggctgccagaggaaccaagggatagggtatgtagaccttacagaaggatggatggtaaaggcagtccatcatcagcacaatctgacttacatttcattgagtaattttttttttttttaagattctgtatggcagcactttcagttgcccttgtgtgccggccacagccgcacaagttggcttgtggtttatcccccgctataagtgagagctggagaaacttcaactccataggtctagaggaaacattgttttaggttatttctgtccacccctgtgcgatactatttattgatccaagcagaagagcttggggacactgagtcgaagtggggacatgggattgaagcctgggcactgctgctgcatgagctgtgtgtcctgggtgtgccggcctttctgtgaagggggttggtggcagtgcccacctcactagatgcctctgacccagcctcccctgggggagtgggtggccacagaccctccctgccagagctcctggaaggctcctgcaggcctgacccatctattcctgtagacctggtttaggatgaagtctcggtgcgatttttgcagagttgggtttatctttcaactatagacccttctggctgttctcagccatatcatgtgactctgaatagttggatgaggaatggaaagaaagcaaggatgagagccggtcacgtggcagtctccgcccagcatcggctgtccgcacagaggcacagggcaggcctcctgtgcactccccacctagcactggcctgtcctgaatccccgccttccctggttggaggccagctgtggcatttgcaccctcttctcacctcaccatgcacatgctaactttaaagccttggggtctttcctgtaccccctcctcaaccctggtccaccccctctcaggatcttgtcaacgttatttttcctgtcccgtcttcctatcgctggccttcctttcccatcctaaaaacttgccgaggccctatggctccctccctttctttcccaggcagcttcttatctgggctgtctgtaccccttcctttgcaccacccaccatgccccacgtagctgaaagctgcttatcccaattgtcaactctggccttcttcagcctctgtagcaccagacactgcacctcctgaatgtcctctgcttctctgcttcagaggcccaggctcgccagttctctgacctctcccatatgtctgcttaggactctgctgcagctgtcctcaccagcctccggggaatcccactacccacagggcagggctgtgggctgggctgaaaaaccatctgcatggtccacaagaagcctggcactgggtttccccatgaataacaatgaaaattaatggatgcacaaccttcctggaacgtggaatttctctgggagattccatgcagaggccactggggaggtggcaggcatgcatgtgactgtaggtggctgcagtgttggaaggctcccagcagagcagagagggtgtcagtctcatcagggaacccacctgatggcttctcagccagcagtctcagaggaacatagacgactgctgagaaaggagggaggcagcagtggtcccagcacctgaggcatcctgctgtcatgggaaggtctccgcccaaatgtcagatgcatcagcctgtcacccgctggtccagagctttcagctgtactggtagggggtgggtggtggagtgctgaatgaccttcacaggtgggcctttccagctctagggtcttacgggtgtcggtccacagaaccacggtttttaggttgtgtgtccggggctatgggaacctgtcccccatgatggatcttggtagagacacttccctctgtcatcgtgcccaggaggatgctgcaggtgactacctgcagccctgttctcattcatttggatgccctccagaaatctggggagccatacacctttagagccttttttgctccttatcaagttggcaaggcttggccaattcctgttcaaggctgcattaaaggcatgttcaccatcctggctaatacggtgaaaccccttctctactaaaaatacaaaaaaattagccgggcttggtggcgggtgcctgtagtcccagctactccggaggctgaggcaggggaatggtgtgaacccaggaggcggagcttgcagtgagccgagatcacaccactgcactccagcctgggctcaaaaaagaaaaaaaaaaaaaaaaaaaggcccgttcattctcaaatgcttttggcgtctccagggtgcctcaggaaaacatgaagtgggcattgtagaacttggggctactgtgtaactttggaagaaaaagttaagggtacttttaagtggatactgttttgatgaaattgccaacttcagggagcccagcttggagaaggaggacgtgagtattccttacaaggctccgaaacaattctttcttcacttagttttctttctgtgctctgcatcttatattccagcagggtcttccaatgcatggtttaataactactagaactggccaggtgcagtggctcacgcctgtaatcccagaactttgggaggctaagacaggcagatcacttgaggccaggagttcgagaccagcctggacaacatggtgatacccagtttctactaaaaatacaaaaattagtcgggcatggtgatgtgcacctgtagtcccagctgctcgggaggctgaggcaggagaatcgcttgaacccgggagacagaggttgcaacgagccaagatcgagccactgcgctccggcctgggtgacaggagactccatctcaaaaaataaaattaaaaaaaaactactacaataaattatcaccttggactgtataaaacaacttttaaactagtctttttaaaaagtacacttaaataaaaatctaaacataagagaatgtaaagtgaaaagtgaaagtatgtcttctgttacgcagaggtaactactattaggaatccttcctgaaaatgtccatgcatctactcaggtcatcacacccatggaatcattttacatactattttatgagtgttacttaatatactgatccacagtgcgttttcacggtcacgccatcagttgtaggagtgtgccaagaacagatgggccttgcctttgtaccagaggagtccatttacagttgcaggtaatagaaaacccaattcagactggcctaaacaatgaggggaggttttggctcttgaaactggaaagtcccaaggtggggtgagtttcaggtttgggttgatccaagtggctcagtgacgtcaacaggatcttgtttccatttctctgccttccacagcctccccttcatctatggtggagggaaggagtctaccacagacaaaccccgagcctccccctgatgggtggtgtggtggtgaagccagcaagggaagggatccccggacacacccctcctcatgctttatcccactgaaaccatgcggctgt

SEQ ID NO: 7190 - protein, 110 aa, Homo sapiens; identical to SEQ ID NO: 7186

SEQ ID NO: 7191 - DNA, 1666 bp, Homo sapiens
gcccgctccgagaagcacccttcttctcttcttaggagactctggacccccttctccaggtttctctccctttagaggcacattttcctccaaagccagtgccccatcttaagcatcagcgtgacgtgacctctctgtttctgcttgctggtgctgaagaccaagggtcccccttgttacctgcccaaacttgtgactgcatccctctggagtctacccagagacagagaatgtgtctttatgtgggagtggtgactctgaaagacagagagggctcctgtggctgccaggagggcttgactcagaccccctgcagctcaagcatgtctgcaggacaccctggtcccctctccactggcatccagacatctgctttgggtcatccacatctgtgggtgggccgtgggtagagggacccacaggcgtggacagggcatctctctccatcaagcaaagcagcatgggggcctgcccgtaacgggaggcggacgtggccccgctgggcctctgagtgccagcgcagtctgctgggacatgcacatatcaggggttgtttgcaggatcctcagccatgttcaagtgaagtaagcctgagccagtgcgtggactggtgccacgggagtgccttgtccactgtccccctgtgtccaccagctattctcctggcgccggaactgcctctggtcttgatagcattaagccctgatggcgccggtggcgcggtgggcatggttcttcactgagagccggctctccttttcttaaagtgtgtaaatagtttatttataggggtaagaatgttctcacaccatttcacttcctcttcctctcctccagcattctcctctgagcagccttagatagtgtccatggctggagccgaccctttgagtccccttgagtgtcttaagaaccagcccacaacagcctctctttctcctccacatactgcagcctccctccatgcatcccacatacaagcactcccccactccccagcgtggcctcactgtcttctggtcttggtgctactgaaattgtcacccagaatttgaatcctgaccctccccactgcaagcccagggagccccagcccaagatggccagcctgaaactgttggccagggctcctcttgtggccatgtacccagggctggctggcctgccatttgcctctccccggagacagccgttcttctgcaaccacaccccgtgcctagccacaaccccaggctgcagctgctcagaagctccaggcattttgtttctggtgaccgcccctaatgggatatcggtgatcactggtccacccttcctgtcagggcttttctggggctgctcttggaaatgaagtcttaagtactgaataactcccctggggatagctggggcatttgtctagctgggctactttctaacactttgccatagctcagaccacttctcatcgttcagggatggactgcaaccttaatttacttgccggagtgtacattctagtgtggtgtatactggtggctgttgatgatgatttttttttttttacacaattctctgtagactaggagaagaatgcttgtgtttttcggaagtgtgatgcttctctttgactgccaaactcttttatggaatatatctttatattaatgctgttttggtcattttt

SEQ ID NO: 7192 - protein, 83 aa, Homo sapiens [sequence omitted]

SEQ ID NO: 7193 - DNA, 3087 bp, Homo sapiens
gcccgctccgagaagcacccttcttctcttcttaggagactctggacccccttctccaggtttctctccctttagaggcacattttcctccaaagccagtgccccatcttaagcatcagcgtgacgtgacctctctgtttctgcttgctggtgctgaagaccaagggtcccccttgttacctgcccaaacttgtgactgcatccctctggagtctacccagagacagagaatgtgtctttatgtgggagtggtgactctgaaagacagagagggctcctgtggctgccaggagggcttgactcagaccccctgcagctcaagcatgtctgcaggacaccctggtcccctctccactggcatccagacatctgctttgggtcatccacatctgtgggtgggccgtgggtagagggacccacaggcgtggacagggcatctctctccatcaagcaaagcagcatgggggcctgcccgtaacgggaggcggacgtggccccgctgggcctctgagtgccagcgcagtctgctgggacatgcacatatcaggggttgtttgcaggatcctcagccatgttcaagtgaagtaagcctgagccagtgcgtggactggtgccacgggagtgccttgtccactgtccccctgtgtccaccagctattctcctggcgccggaactgcctctggtcttgatagcattaagccctgatggcgccggtggcgcggtgggcatggttcttcactgagagccggctctccttttcttaaagtgtgtaaatagtttatttataggggtaagaatgttctcacaccatttcacttcctcttcctctcctccagcattctcctctgagcagccttagatagtgtccatggctggagccgaccctttgagtccccttgagtgtcttaagaaccagcccacaacagcctctctttctcctccacatactgcagcctccctccatgcatcccacatacaagcactcccccactccccagcgtggcctcactgtcttctggtcttggtgctactgaaattgtcacccagaatttgaatcctgaccctccccactgcaagcccagggagccccagcccaagatggccagcctgaaactgttggccagggctcctcttgtggccatgtacccagggctggctggcctgccatttgcctctccccggagacagccgttcttctgcaaccacaccccgtgcctagccacaaccccaggctgcagctgctcagaagctccaggcattttgtttctggtgaccgcccctaatgggatatcggtgatcactggtccacccttcctgtcagggcttttctggggctgctcttggaaatgaagtcttaagtactgaataactcccctggggatagctggggcatttgtctagctgggctactttctaacactttgccatagctcagaccacttctcatcgttcagggatggactgcaaccttaatttacttgccggagtgtacattctagtgtggtgtatactggtggctgttgatgatgatttttttttttttacacaattctctgtagactaggagaagaatgcttgtgtttttcggaagtgtgatgcttctctttgactgccaaactcttttatggaatatatctttatattaatgctgttttggtcatttttgtttggggtcactattgagatattgctaagcatctcagtggtaaacgcggctgccagaggaaccaagggatagggtatgtagaccttacagaaggatggatggtaaaggcagtccatcatcagcacaatctgacttacatttcattgagtaattttttttttttttaagattctgtatggcagcactttcagttgcccttgtgtgccggccacagccgcacaagttggcttgtggtttatcccccgctataagtgagagctggagaaacttcaactccataggtctagaggaaacattgttttaggttatttctgtccacccctgtgcgatactatttattgatccaagcagaagagcttggggacactgagtcgaagtggggacatgggattgaagcctgggcactgctgctgcatgagctgtgtgtcctgggtgtgccggcctttctgtgaagggggttggtggcagtgcccacctcactagatgcctctgacccagcctcccctgggggagtgggtggccacagaccctccctgccagagctcctggaaggctcctgcaggcctgacccatctattcctgtagacctggtttaggatgaagtctcggtgcgatttttgcagagttgggtttatctttcaactatagacccttctggctgttctcagccatatcatgtgactctgaatagttggatgaggaatggaaagaaagcaaggatgagagccggtcacgtggcagtctccgcccagcatcggctgtccgcacagaggcacagggcaggcctcctgtgcactccccacctagcactggcctgtcctgaatccccgccttccctggttggaggccagctgtggcatttgcaccctcttctcacctcaccatgcacatgctaactttaaagccttggggtctttcctgtaccccctcctcaaccctggtccaccccctctcaggatcttgtcaacgttatttttcctgtcccgtcttcctatcgctggccttcctttcccatcctaaaaacttgccgaggccctatggctccctccctttctttcccaggcagcttcttatctgggctgtctgtaccccttcctttgcaccacccaccatgccccacgtagctgaaagctgcttatcccaattgtcaactctggccttcttcagcctctgtagcaccagacactgcacctcctgaatgtcctctgcttctctgcttcagaggcccaggctcgccagttctctgacctctcccatatgtctgcttaggactctgctgcagctgtcctcaccagcctccggggaatcccactacccacagggcagggctgtgggctgggctgaaaaaccatctgcatggtccacaagaagcctggcactgggtttccccatgaataacaatgaaaattaatggatgcac

SEQ ID NO: 7194 - protein, 104 aa, Homo sapiens; identical to SEQ ID NO: 7180

SEQ ID NO: 7195 - DNA, 5202 bp, Homo sapiens
gcccgctccgagaagcacccttcttctcttcttaggagactctggacccccttctccaggtttctctccctttagaggcacattttcctccaaagccagtgccccatcttaagcatcagcgtgacgtgacctctctgtttctgcttgctggtgctgaagaccaagggtcccccttgttacctgcccaaacttgtgactgcatccctctggagtctacccagagacagagaatgtgtctttatgtgggagtggtgactctgaaagacagagagggctcctgtggctgccaggagggcttgactcagaccccctgcagctcaagcatgtctgcaggacaccctggtcccctctccactggcatccagacatctgctttgggtcatccacatctgtgggtgggccgtgggtagagggacccacaggcgtggacagggcatctctctccatcaagcaaagcagcatgggggcctgcccgtaacgggaggcggacgtggccccgctgggcctctgagtgccagcgcagtctgctgggacatgcacatatcaggggttgtttgcaggatcctcagccatgttcaagtgaagtaagcctgagccagtgcgtggactggtgccacgggagtgccttgtccactgtccccctgtgtccaccagctattctcctggcgccggaactgcctctggtcttgatagcattaagccctgatggcgccggtggcgcggtgggcatggttcttcactgagagccggctctccttttcttaaagtgtgtaaatagtttatttataggggtaagaatgttctcacaccatttcacttcctcttcctctcctccagcattctcctctgagcagccttagatagtgtccatggctggagccgaccctttgagtccccttgagtgtcttaagaaccagcccacaacagcctctctttctcctccacatactgcagcctccctccatgcatcccacatacaagcactcccccactccccagcgtggcctcactgtcttctggtcttggtgctactgaaattgtcacccagaatttgaatcctgaccctccccactgcaagcccagggagccccagcccaagatggccagcctgaaactgttggccagggctcctcttgtggccatgtacccagggctggctggcctgccatttgcctctccccggagacagccgttcttctgcaaccacaccccgtgcctagccacaaccccaggctgcagctgctcagaagctccaggcattttgtttctggtgaccgcccctaatgggatatcggtgatcactggtccacccttcctgtcagggcttttctggggctgctcttggaaatgaagtcttaagtactgaataactcccctggggatagctggggcatttgtctagctgggctactttctaacactttgccatagctcagaccacttctcatcgttcagggatggactgcaaccttaatttacttgccggagtgtacattctagtgtggtgtatactggtggctgttgatgatgatttttttttttttacacaattctctgtagactaggagaagaatgcttgtgtttttcggaagtgtgatgcttctctttgactgccaaactcttttatggaatatatctttatattaatgctgttttggtcatttttgtttggggtcactattgagatattgctaagcatctcagtggtaaacgcggctgccagaggaaccaagggatagggtatgtagaccttacagaaggatggatggtaaaggcagtccatcatcagcacaatctgacttacatttcattgagtaattttttttttttttaagattctgtatggcagcactttcagttgcccttgtgtgccggccacagccgcacaagttggcttgtggtttatcccccgctataagtgagagctggagaaacttcaactccataggtctagaggaaacattgttttaggttatttctgtccacccctgtgcgatactatttattgatccaagcagaagagcttggggacactgagtcgaagtggggacatgggattgaagcctgggcactgctgctgcatgagctgtgtgtcctgggtgtgccggcctttctgtgaagggggttggtggcagtgcccacctcactagatgcctctgacccagcctcccctgggggagtgggtggccacagaccctccctgccagagctcctggaaggctcctgcaggcctgacccatctattcctgtagacctggtttaggatgaagtctcggtgcgatttttgcagagttgggtttatctttcaactatagacccttctggctgttctcagccatatcatgtgactctgaatagttggatgaggaatggaaagaaagcaaggatgagagccggtcacgtggcagtctccgcccagcatcggctgtccgcacagaggcacagggcaggcctcctgtgcactccccacctagcactggcctgtcctgaatccccgccttccctggttggaggccagctgtggcatttgcaccctcttctcacctcaccatgcacatgctaactttaaagccttggggtctttcctgtaccccctcctcaaccctggtccaccccctctcaggatcttgtcaacgttatttttcctgtcccgtcttcctatcgctggccttcctttcccatcctaaaaacttgccgaggccctatggctccctccctttctttcccaggcagcttcttatctgggctgtctgtaccccttcctttgcaccacccaccatgccccacgtagctgaaagctgcttatcccaattgtcaactctggccttcttcagcctctgtagcaccagacactgcacctcctgaatgtcctctgcttctctgcttcagaggcccaggctcgccagttctctgacctctcccatatgtctgcttaggactctgctgcagctgtcctcaccagcctccggggaatcccactacccacagggcagggctgtgggctgggctgaaaaaccatctgcatggtccacaagaagcctggcactgggtttccccatgaataacaatgaaaattaatggatgcacaaccttcctggaacgtggaatttctctgggagattccatgcagaggccactggggaggtggcaggcatgcatgtgactgtaggtggctgcagtgttggaaggctcccagcagagcagagagggtgtcagtctcatcagggaacccacctgatggcttctcagccagcagtctcagaggaacatagacgactgctgagaaaggagggaggcagcagtggtcccagcacctgaggcatcctgctgtcatgggaaggtctccgcccaaatgtcagatgcatcagcctgtcacccgctggtccagagctttcagctgtactggtagggggtgggtggtggagtgctgaatgaccttcacaggtgggcctttccagctctagggtcttacgggtgtcggtccacagaaccacggtttttaggttgtgtgtccggggctatgggaacctgtcccccatgatggatcttggtagagacacttccctctgtcatcgtgcccaggaggatgctgcaggtgactacctgcagccctgttctcattcatttggatgccctccagaaatctggggagccatacacctttagagccttttttgctccttatcaagttggcaaggcttggccaattcctgttcaaggctgcattaaaggcatgttcaccatcctggctaatacggtgaaaccccttctctactaaaaatacaaaaaaattagccgggcttggtggcgggtgcctgtagtcccagctactccggaggctgaggcaggggaatggtgtgaacccaggaggcggagcttgcagtgagccgagatcacaccactgcactccagcctgggctcaaaaaagaaaaaaaaaaaaaaaaaaaggcccgttcattctcaaatgcttttggcgtctccagggtgcctcaggaaaacatgaagtgggcattgtagaacttggggctactgtgtaactttggaagaaaaagttaagggtacttttaagtggatactgttttgatgaaattgccaacttcagggagcccagcttggagaaggaggacgtgagtattccttacaaggctccgaaacaattctttcttcacttagttttctttctgtgctctgcatcttatattccagcagggtcttccaatgcatggtttaataactactagaactggccaggtgcagtggctcacgcctgtaatcccagaactttgggaggctaagacaggcagatcacttgaggccaggagttcgagaccagcctggacaacatggtgatacccagtttctactaaaaatacaaaaattagtcgggcatggtgatgtgcacctgtagtcccagctgctcgggaggctgaggcaggagaatcgcttgaacccgggagacagaggttgcaacgagccaagatcgagccactgcgctccggcctgggtgacaggagactccatctcaaaaaataaaattaaaaaaaaactactacaataaattatcaccttggactgtataaaacaacttttaaactagtctttttaaaaagtacacttaaataaaaatctaaacataagagaatgtaaagtgaaaagtgaaagtatgtcttctgttacgcagaggtaactactattaggaatccttcctgaaaatgtccatgcatctactcaggtcatcacacccatggaatcattttacatactattttatgagtgttacttaatatactgatccacagtgcgttttcacggtcacgccatcagttgtaggagtgtgccaagaacagatgggccttgcctttgtaccagaggagtccatttacagttgcaggtaatagaaaacccaattcagactggcctaaacaatgaggggaggttttggctcttgaaactggaaagtcccaaggtggggtgagtttcaggtttgggttgatccaagtggctcagtgacgtcaacaggatcttgtttccatttctctgccttccacagcctccccttcatctatggtggagggaaggagtctaccacagacaaaccccgagcctccccctgatgggtggtgtggtggtgaagccagcaagggaagggatccccggacacacccctcctcatgctttatcccactgaaaccatgcggctgt

SEQ ID NO: 7196 - protein, 104 aa, Homo sapiens; identical to SEQ ID NO: 7180

SEQ ID NO: 7197 - DNA, 3425 bp, Homo sapiens
tggagagtcctccttgcctgcctcctggatccctcgttcccaccctgctttgccctgctccttaccagagctcactaggggatcaggtggggacatcgtgtgtgccaaaggctcagacccctgtggtgttttcctgcagctgaagagcaagtgggatgagtccatcttcacgaaaggctgcatccaggcgctggaaagctggctcccgcggaacatttacattgtggctggcgtcttcatcgccatctcgctgttgcagatatttggcatcttcctggcaaggacgctgatctcagacatcgaggcagtgaaggccggccatcacttctgaggagcagagttgagggagccgagctgagccacgctgggaggccagagcctttctctgccatcagccctacgtccagagggagaggagccgacacccccagagccagtgccccatcttaagcatcagcgtgacgtgacctctctgtttctgcttgctggtgctgaagaccaagggtcccccttgttacctgcccaaacttgtgactgcatccctctggagtctacccagagacagagaatgtgtctttatgtgggagtggtgactctgaaagacagagagggctcctgtggctgccaggagggcttgactcagaccccctgcagctcaagcatgtctgcaggacaccctggtcccctctccactggcatccagacatctgctttgggtcatccacatctgtgggtgggccgtgggtagagggacccacaggcgtggacagggcatctctctccatcaagcaaagcagcatgggggcctgcccgtaacgggaggcggacgtggccccgctgggcctctgagtgccagcgcagtctgctgggacatgcacatatcaggggttgtttgcaggatcctcagccatgttcaagtgaagtaagcctgagccagtgcgtggactggtgccacgggagtgccttgtccactgtccccctgtgtccaccagctattctcctggcgccggaactgcctctggtcttgatagcattaagccctgatggcgccggtggcgcggtgggcatggttcttcactgagagccggctctccttttcttaaagtgtgtaaatagtttatttataggggtaagaatgttctcacaccatttcacttcctcttcctctcctccagcattctcctctgagcagccttagatagtgtccatggctggagccgaccctttgagtccccttgagtgtcttaagaaccagcccacaacagcctctctttctcctccacatactgcagcctccctccatgcatcccacatacaagcactcccccactccccagcgtggcctcactgtcttctggtcttggtgctactgaaattgtcacccagaatttgaatcctgaccctccccactgcaagcccagggagccccagcccaagatggccagcctgaaactgttggccagggctcctcttgtggccatgtacccagggctggctggcctgccatttgcctctccccggagacagccgttcttctgcaaccacaccccgtgcctagccacaaccccaggctgcagctgctcagaagctccaggcattttgtttctggtgaccgcccctaatgggatatcggtgatcactggtccacccttcctgtcagggcttttctggggctgctcttggaaatgaagtcttaagtactgaataactcccctggggatagctggggcatttgtctagctgggctactttctaacactttgccatagctcagaccacttctcatcgttcagggatggactgcaaccttaatttacttgccggagtgtacattctagtgtggtgtatactggtggctgttgatgatgatttttttttttttacacaattctctgtagactaggagaagaatgcttgtgtttttcggaagtgtgatgcttctctttgactgccaaactcttttatggaatatatctttatattaatgctgttttggtcatttttgtttggggtcactattgagatattgctaagcatctcagtggtaaacgcggctgccagaggaaccaagggatagggtatgtagaccttacagaaggatggatggtaaaggcagtccatcatcagcacaatctgacttacatttcattgagtaattttttttttttttaagattctgtatggcagcactttcagttgcccttgtgtgccggccacagccgcacaagttggcttgtggtttatcccccgctataagtgagagctggagaaacttcaactccataggtctagaggaaacattgttttaggttatttctgtccacccctgtgcgatactatttattgatccaagcagaagagcttggggacactgagtcgaagtggggacatgggattgaagcctgggcactgctgctgcatgagctgtgtgtcctgggtgtgccggcctttctgtgaagggggttggtggcagtgcccacctcactagatgcctctgacccagcctcccctgggggagtgggtggccacagaccctccctgccagagctcctggaaggctcctgcaggcctgacccatctattcctgtagacctggtttaggatgaagtctcggtgcgatttttgcagagttgggtttatctttcaactatagacccttctggctgttctcagccatatcatgtgactctgaatagttggatgaggaatggaaagaaagcaaggatgagagccggtcacgtggcagtctccgcccagcatcggctgtccgcacagaggcacagggcaggcctcctgtgcactccccacctagcactggcctgtcctgaatccccgccttccctggttggaggccagctgtggcatttgcaccctcttctcacctcaccatgcacatgctaactttaaagccttggggtctttcctgtaccccctcctcaaccctggtccaccccctctcaggatcttgtcaacgttatttttcctgtcccgtcttcctatcgctggccttcctttcccatcctaaaaacttgccgaggccctatggctccctccctttctttcccaggcagcttcttatctgggctgtctgtaccccttcctttgcaccacccaccatgccccacgtagctgaaagctgcttatcccaattgtcaactctggccttcttcagcctctgtagcaccagacactgcacctcctgaatgtcctctgcttctctgcttcagaggcccaggctcgccagttctctgacctctcccatatgtctgcttaggactctgctgcagctgtcctcaccagcctccggggaatcccactacccacagggcagggctgtgggctgggctgaaaaaccatctgcatggtccacaagaagcctggcactgggtttccccatgaataacaatgaaaattaatggatgcac

SEQ ID NO: 7198 - protein, 44 aa, Homo sapiens; identical to SEQ ID NO: 7184

SEQ ID NO: 7199 - DNA, 5540 bp, Homo sapiens
tggagagtcctccttgcctgcctcctggatccctcgttcccaccctgctttgccctgctccttaccagagctcactaggggatcaggtggggacatcgtgtgtgccaaaggctcagacccctgtggtgttttcctgcagctgaagagcaagtgggatgagtccatcttcacgaaaggctgcatccaggcgctggaaagctggctcccgcggaacatttacattgtggctggcgtcttcatcgccatctcgctgttgcagatatttggcatcttcctggcaaggacgctgatctcagacatcgaggcagtgaaggccggccatcacttctgaggagcagagttgagggagccgagctgagccacgctgggaggccagagcctttctctgccatcagccctacgtccagagggagaggagccgacacccccagagccagtgccccatcttaagcatcagcgtgacgtgacctctctgtttctgcttgctggtgctgaagaccaagggtcccccttgttacctgcccaaacttgtgactgcatccctctggagtctacccagagacagagaatgtgtctttatgtgggagtggtgactctgaaagacagagagggctcctgtggctgccaggagggcttgactcagaccccctgcagctcaagcatgtctgcaggacaccctggtcccctctccactggcatccagacatctgctttgggtcatccacatctgtgggtgggccgtgggtagagggacccacaggcgtggacagggcatctctctccatcaagcaaagcagcatgggggcctgcccgtaacgggaggcggacgtggccccgctgggcctctgagtgccagcgcagtctgctgggacatgcacatatcaggggttgtttgcaggatcctcagccatgttcaagtgaagtaagcctgagccagtgcgtggactggtgccacgggagtgccttgtccactgtccccctgtgtccaccagctattctcctggcgccggaactgcctctggtcttgatagcattaagccctgatggcgccggtggcgcggtgggcatggttcttcactgagagccggctctccttttcttaaagtgtgtaaatagtttatttataggggtaagaatgttctcacaccatttcacttcctcttcctctcctccagcattctcctctgagcagccttagatagtgtccatggctggagccgaccctttgagtccccttgagtgtcttaagaaccagcccacaacagcctctctttctcctccacatactgcagcctccctccatgcatcccacatacaagcactcccccactccccagcgtggcctcactgtcttctggtcttggtgctactgaaattgtcacccagaatttgaatcctgaccctccccactgcaagcccagggagccccagcccaagatggccagcctgaaactgttggccagggctcctcttgtggccatgtacccagggctggctggcctgccatttgcctctccccggagacagccgttcttctgcaaccacaccccgtgcctagccacaaccccaggctgcagctgctcagaagctccaggcattttgtttctggtgaccgcccctaatgggatatcggtgatcactggtccacccttcctgtcagggcttttctggggctgctcttggaaatgaagtcttaagtactgaataactcccctggggatagctggggcatttgtctagctgggctactttctaacactttgccatagctcagaccacttctcatcgttcagggatggactgcaaccttaatttacttgccggagtgtacattctagtgtggtgtatactggtggctgttgatgatgatttttttttttttacacaattctctgtagactaggagaagaatgcttgtgtttttcggaagtgtgatgcttctctttgactgccaaactcttttatggaatatatctttatattaatgctgttttggtcatttttgtttggggtcactattgagatattgctaagcatctcagtggtaaacgcggctgccagaggaaccaagggatagggtatgtagaccttacagaaggatggatggtaaaggcagtccatcatcagcacaatctgacttacatttcattgagtaattttttttttttttaagattctgtatggcagcactttcagttgcccttgtgtgccggccacagccgcacaagttggcttgtggtttatcccccgctataagtgagagctggagaaacttcaactccataggtctagaggaaacattgttttaggttatttctgtccacccctgtgcgatactatttattgatccaagcagaagagcttggggacactgagtcgaagtggggacatgggattgaagcctgggcactgctgctgcatgagctgtgtgtcctgggtgtgccggcctttctgtgaagggggttggtggcagtgcccacctcactagatgcctctgacccagcctcccctgggggagtgggtggccacagaccctccctgccagagctcctggaaggctcctgcaggcctgacccatctattcctgtagacctggtttaggatgaagtctcggtgcgatttttgcagagttgggtttatctttcaactatagacccttctggctgttctcagccatatcatgtgactctgaatagttggatgaggaatggaaagaaagcaaggatgagagccggtcacgtggcagtctccgcccagcatcggctgtccgcacagaggcacagggcaggcctcctgtgcactccccacctagcactggcctgtcctgaatccccgccttccctggttggaggccagctgtggcatttgcaccctcttctcacctcaccatgcacatgctaactttaaagccttggggtctttcctgtaccccctcctcaaccctggtccaccccctctcaggatcttgtcaacgttatttttcctgtcccgtcttcctatcgctggccttcctttcccatcctaaaaacttgccgaggccctatggctccctccctttctttcccaggcagcttcttatctgggctgtctgtaccccttcctttgcaccacccaccatgccccacgtagctgaaagctgcttatcccaattgtcaactctggccttcttcagcctctgtagcaccagacactgcacctcctgaatgtcctctgcttctctgcttcagaggcccaggctcgccagttctctgacctctcccatatgtctgcttaggactctgctgcagctgtcctcaccagcctccggggaatcccactacccacagggcagggctgtgggctgggctgaaaaaccatctgcatggtccacaagaagcctggcactgggtttccccatgaataacaatgaaaattaatggatgcacaaccttcctggaacgtggaatttctctgggagattccatgcagaggccactggggaggtggcaggcatgcatgtgactgtaggtggctgcagtgttggaaggctcccagcagagcagagagggtgtcagtctcatcagggaacccacctgatggcttctcagccagcagtctcagaggaacatagacgactgctgagaaaggagggaggcagcagtggtcccagcacctgaggcatcctgctgtcatgggaaggtctccgcccaaatgtcagatgcatcagcctgtcacccgctggtccagagctttcagctgtactggtagggggtgggtggtggagtgctgaatgaccttcacaggtgggcctttccagctctagggtcttacgggtgtcggtccacagaaccacggtttttaggttgtgtgtccggggctatgggaacctgtcccccatgatggatcttggtagagacacttccctctgtcatcgtgcccaggaggatgctgcaggtgactacctgcagccctgttctcattcatttggatgccctccagaaatctggggagccatacacctttagagccttttttgctccttatcaagttggcaaggcttggccaattcctgttcaaggctgcattaaaggcatgttcaccatcctggctaatacggtgaaaccccttctctactaaaaatacaaaaaaattagccgggcttggtggcgggtgcctgtagtcccagctactccggaggctgaggcaggggaatggtgtgaacccaggaggcggagcttgcagtgagccgagatcacaccactgcactccagcctgggctcaaaaaagaaaaaaaaaaaaaaaaaaaggcccgttcattctcaaatgcttttggcgtctccagggtgcctcaggaaaacatgaagtgggcattgtagaacttggggctactgtgtaactttggaagaaaaagttaagggtacttttaagtggatactgttttgatgaaattgccaacttcagggagcccagcttggagaaggaggacgtgagtattccttacaaggctccgaaacaattctttcttcacttagttttctttctgtgctctgcatcttatattccagcagggtcttccaatgcatggtttaataactactagaactggccaggtgcagtggctcacgcctgtaatcccagaactttgggaggctaagacaggcagatcacttgaggccaggagttcgagaccagcctggacaacatggtgatacccagtttctactaaaaatacaaaaattagtcgggcatggtgatgtgcacctgtagtcccagctgctcgggaggctgaggcaggagaatcgcttgaacccgggagacagaggttgcaacgagccaagatcgagccactgcgctccggcctgggtgacaggagactccatctcaaaaaataaaattaaaaaaaaactactacaataaattatcaccttggactgtataaaacaacttttaaactagtctttttaaaaagtacacttaaataaaaatctaaacataagagaatgtaaagtgaaaagtgaaagtatgtcttctgttacgcagaggtaactactattaggaatccttcctgaaaatgtccatgcatctactcaggtcatcacacccatggaatcattttacatactattttatgagtgttacttaatatactgatccacagtgcgttttcacggtcacgccatcagttgtaggagtgtgccaagaacagatgggccttgcctttgtaccagaggagtccatttacagttgcaggtaatagaaaacccaattcagactggcctaaacaatgaggggaggttttggctcttgaaactggaaagtcccaaggtggggtgagtttcaggtttgggttgatccaagtggctcagtgacgtcaacaggatcttgtttccatttctctgccttccacagcctccccttcatctatggtggagggaaggagtctaccacagacaaaccccgagcctccccctgatgggtggtgtggtggtgaagccagcaagggaagggatccccggacacacccctcctcatgctttatcccactgaaaccatgcggctgt

SEQ ID NO: 7200 - protein, 44 aa, Homo sapiens; identical to SEQ ID NO: 7184

SEQ ID NO: 7201 - DNA, 2894 bp, Homo sapiens
cagatatttggcatcttcctggcaaggacgctgatctcagacatcgaggcagtgaaggccggccatcacttctgaggagcagagttgagggagccgagctgagccacgctgggaggccagagcctttctctgccatcagccctacgtccagagggagaggagccgacacccccagagccagtgccccatcttaagcatcagcgtgacgtgacctctctgtttctgcttgctggtgctgaagaccaagggtcccccttgttacctgcccaaacttgtgactgcatccctctggagtctacccagagacagagaatgtgtctttatgtgggagtggtgactctgaaagacagagagggctcctgtggctgccaggagggcttgactcagaccccctgcagctcaagcatgtctgcaggacaccctggtcccctctccactggcatccagacatctgctttgggtcatccacatctgtgggtgggccgtgggtagagggacccacaggcgtggacagggcatctctctccatcaagcaaagcagcatgggggcctgcccgtaacgggaggcggacgtggccccgctgggcctctgagtgccagcgcagtctgctgggacatgcacatatcaggggttgtttgcaggatcctcagccatgttcaagtgaagtaagcctgagccagtgcgtggactggtgccacgggagtgccttgtccactgtccccctgtgtccaccagctattctcctggcgccggaactgcctctggtcttgatagcattaagccctgatggcgccggtggcgcggtgggcatggttcttcactgagagccggctctccttttcttaaagtgtgtaaatagtttatttataggggtaagaatgttctcacaccatttcacttcctcttcctctcctccagcattctcctctgagcagccttagatagtgtccatggctggagccgaccctttgagtccccttgagtgtcttaagaaccagcccacaacagcctctctttctcctccacatactgcagcctccctccatgcatcccacatacaagcactcccccactccccagcgtggcctcactgtcttctggtcttggtgctactgaaattgtcacccagaatttgaatcctgacctcttggaaatgaagtcttaagtactgaataactcccctggggatagctggggcatttgtctagctgggctactttctaacactttgccatagctcagaccacttctcatcgttcagggatggactgcaaccttaatttacttgccggagtgtacattctagtgtggtgtatactggtggctgttgatgatgatttttttttttttacacaattctctgtagactaggagaagaatgcttgtgtttttcggaagtgtgatgcttctctttgactgccaaactcttttatggaatatatctttatattaatgctgttttggtcatttttgtttggggtcactattgagatattgctaagcatctcagtggtaaacgcggctgccagaggaaccaagggatagggtatgtagaccttacagaaggatggatggtaaaggcagtccatcatcagcacaatctgacttacatttcattgagtaattttttttttttttaagattctgtatggcagcactttcagttgcccttgtgtgccggccacagccgcacaagttggcttgtggtttatcccccgctataagtgagagctggagaaacttcaactccataggtctagaggaaacattgttttaggttatttctgtccacccctgtgcgatactatttattgatccaagcagaagagcttggggacactgagtcgaagtggggacatgggattgaagcctgggcactgctgctgcatgagctgtgtgtcctgggtgtgccggcctttctgtgaagggggttggtggcagtgcccacctcactagatgcctctgacccagcctcccctgggggagtgggtggccacagaccctccctgccagagctcctggaaggctcctgcaggcctgacccatctattcctgtagacctggtttaggatgaagtctcggtgcgatttttgcagagttgggtttatctttcaactatagacccttctggctgttctcagccatatcatgtgactctgaatagttggatgaggaatggaaagaaagcaaggatgagagccggtcacgtggcagtctccgcccagcatcggctgtccgcacagaggcacagggcaggcctcctgtgcactccccacctagcactggcctgtcctgaatccccgccttccctggttggaggccagctgtggcatttgcaccctcttctcacctcaccatgcacatgctaactttaaagccttggggtctttcctgtaccccctcctcaaccctggtccaccccctctcaggatcttgtcaacgttatttttcctgtcccgtcttcctatcgctggccttcctttcccatcctaaaaacttgccgaggccctatggctccctccctttctttcccaggcagcttcttatctgggctgtctgtaccccttcctttgcaccacccaccatgccccacgtagctgaaagctgcttatcccaattgtcaactctggccttcttcagcctctgtagcaccagacactgcacctcctgaatgtcctctgcttctctgcttcagaggcccaggctcgccagttctctgacctctcccatatgtctgcttaggactctgctgcagctgtcctcaccagcctccggggaatcccactacccacagggcagggctgtgggctgggctgaaaaaccatctgcatggtccacaagaagcctggcactgggtttccccatgaataacaatgaaaattaatggatgcac

SEQ ID NO: 7202 - protein, 104 aa, Homo sapiens; identical to SEQ ID NO: 7180

SEQ ID NO: 7203 - DNA, 5009 bp, Homo sapiens
cagatatttggcatcttcctggcaaggacgctgatctcagacatcgaggcagtgaaggccggccatcacttctgaggagcagagttgagggagccgagctgagccacgctgggaggccagagcctttctctgccatcagccctacgtccagagggagaggagccgacacccccagagccagtgccccatcttaagcatcagcgtgacgtgacctctctgtttctgcttgctggtgctgaagaccaagggtcccccttgttacctgcccaaacttgtgactgcatccctctggagtctacccagagacagagaatgtgtctttatgtgggagtggtgactctgaaagacagagagggctcctgtggctgccaggagggcttgactcagaccccctgcagctcaagcatgtctgcaggacaccctggtcccctctccactggcatccagacatctgctttgggtcatccacatctgtgggtgggccgtgggtagagggacccacaggcgtggacagggcatctctctccatcaagcaaagcagcatgggggcctgcccgtaacgggaggcggacgtggccccgctgggcctctgagtgccagcgcagtctgctgggacatgcacatatcaggggttgtttgcaggatcctcagccatgttcaagtgaagtaagcctgagccagtgcgtggactggtgccacgggagtgccttgtccactgtccccctgtgtccaccagctattctcctggcgccggaactgcctctggtcttgatagcattaagccctgatggcgccggtggcgcggtgggcatggttcttcactgagagccggctctccttttcttaaagtgtgtaaatagtttatttataggggtaagaatgttctcacaccatttcacttcctcttcctctcctccagcattctcctctgagcagccttagatagtgtccatggctggagccgaccctttgagtccccttgagtgtcttaagaaccagcccacaacagcctctctttctcctccacatactgcagcctccctccatgcatcccacatacaagcactcccccactccccagcgtggcctcactgtcttctggtcttggtgctactgaaattgtcacccagaatttgaatcctgacctcttggaaatgaagtcttaagtactgaataactcccctggggatagctggggcatttgtctagctgggctactttctaacactttgccatagctcagaccacttctcatcgttcagggatggactgcaaccttaatttacttgccggagtgtacattctagtgtggtgtatactggtggctgttgatgatgatttttttttttttacacaattctctgtagactaggagaagaatgcttgtgtttttcggaagtgtgatgcttctctttgactgccaaactcttttatggaatatatctttatattaatgctgttttggtcatttttgtttggggtcactattgagatattgctaagcatctcagtggtaaacgcggctgccagaggaaccaagggatagggtatgtagaccttacagaaggatggatggtaaaggcagtccatcatcagcacaatctgacttacatttcattgagtaattttttttttttttaagattctgtatggcagcactttcagttgcccttgtgtgccggccacagccgcacaagttggcttgtggtttatcccccgctataagtgagagctggagaaacttcaactccataggtctagaggaaacattgttttaggttatttctgtccacccctgtgcgatactatttattgatccaagcagaagagcttggggacactgagtcgaagtggggacatgggattgaagcctgggcactgctgctgcatgagctgtgtgtcctgggtgtgccggcctttctgtgaagggggttggtggcagtgcccacctcactagatgcctctgacccagcctcccctgggggagtgggtggccacagaccctccctgccagagctcctggaaggctcctgcaggcctgacccatctattcctgtagacctggtttaggatgaagtctcggtgcgatttttgcagagttgggtttatctttcaactatagacccttctggctgttctcagccatatcatgtgactctgaatagttggatgaggaatggaaagaaagcaaggatgagagccggtcacgtggcagtctccgcccagcatcggctgtccgcacagaggcacagggcaggcctcctgtgcactccccacctagcactggcctgtcctgaatccccgccttccctggttggaggccagctgtggcatttgcaccctcttctcacctcaccatgcacatgctaactttaaagccttggggtctttcctgtaccccctcctcaaccctggtccaccccctctcaggatcttgtcaacgttatttttcctgtcccgtcttcctatcgctggccttcctttcccatcctaaaaacttgccgaggccctatggctccctccctttctttcccaggcagcttcttatctgggctgtctgtaccccttcctttgcaccacccaccatgccccacgtagctgaaagctgcttatcccaattgtcaactctggccttcttcagcctctgtagcaccagacactgcacctcctgaatgtcctctgcttctctgcttcagaggcccaggctcgccagttctctgacctctcccatatgtctgcttaggactctgctgcagctgtcctcaccagcctccggggaatcccactacccacagggcagggctgtgggctgggctgaaaaaccatctgcatggtccacaagaagcctggcactgggtttccccatgaataacaatgaaaattaatggatgcacaaccttcctggaacgtggaatttctctgggagattccatgcagaggccactggggaggtggcaggcatgcatgtgactgtaggtggctgcagtgttggaaggctcccagcagagcagagagggtgtcagtctcatcagggaacccacctgatggcttctcagccagcagtctcagaggaacatagacgactgctgagaaaggagggaggcagcagtggtcccagcacctgaggcatcctgctgtcatgggaaggtctccgcccaaatgtcagatgcatcagcctgtcacccgctggtccagagctttcagctgtactggtagggggtgggtggtggagtgctgaatgaccttcacaggtgggcctttccagctctagggtcttacgggtgtcggtccacagaaccacggtttttaggttgtgtgtccggggctatgggaacctgtcccccatgatggatcttggtagagacacttccctctgtcatcgtgcccaggaggatgctgcaggtgactacctgcagccctgttctcattcatttggatgccctccagaaatctggggagccatacacctttagagccttttttgctccttatcaagttggcaaggcttggccaattcctgttcaaggctgcattaaaggcatgttcaccatcctggctaatacggtgaaaccccttctctactaaaaatacaaaaaaattagccgggcttggtggcgggtgcctgtagtcccagctactccggaggctgaggcaggggaatggtgtgaacccaggaggcggagcttgcagtgagccgagatcacaccactgcactccagcctgggctcaaaaaagaaaaaaaaaaaaaaaaaaaggcccgttcattctcaaatgcttttggcgtctccagggtgcctcaggaaaacatgaagtgggcattgtagaacttggggctactgtgtaactttggaagaaaaagttaagggtacttttaagtggatactgttttgatgaaattgccaacttcagggagcccagcttggagaaggaggacgtgagtattccttacaaggctccgaaacaattctttcttcacttagttttctttctgtgctctgcatcttatattccagcagggtcttccaatgcatggtttaataactactagaactggccaggtgcagtggctcacgcctgtaatcccagaactttgggaggctaagacaggcagatcacttgaggccaggagttcgagaccagcctggacaacatggtgatacccagtttctactaaaaatacaaaaattagtcgggcatggtgatgtgcacctgtagtcccagctgctcgggaggctgaggcaggagaatcgcttgaacccgggagacagaggttgcaacgagccaagatcgagccactgcgctccggcctgggtgacaggagactccatctcaaaaaataaaattaaaaaaaaactactacaataaattatcaccttggactgtataaaacaacttttaaactagtctttttaaaaagtacacttaaataaaaatctaaacataagagaatgtaaagtgaaaagtgaaagtatgtcttctgttacgcagaggtaactactattaggaatccttcctgaaaatgtccatgcatctactcaggtcatcacacccatggaatcattttacatactattttatgagtgttacttaatatactgatccacagtgcgttttcacggtcacgccatcagttgtaggagtgtgccaagaacagatgggccttgcctttgtaccagaggagtccatttacagttgcaggtaatagaaaacccaattcagactggcctaaacaatgaggggaggttttggctcttgaaactggaaagtcccaaggtggggtgagtttcaggtttgggttgatccaagtggctcagtgacgtcaacaggatcttgtttccatttctctgccttccacagcctccccttcatctatggtggagggaaggagtctaccacagacaaaccccgagcctccccctgatgggtggtgtggtggtgaagccagcaagggaagggatccccggacacacccctcctcatgctttatcccactgaaaccatgcggctgt

SEQ ID NO: 7204 - protein, 104 aa, Homo sapiens; identical to SEQ ID NO: 7180

SEQ ID NO: 7205 - DNA, 2198 bp, Homo sapiens
gggcctctgagtgccagcgcagtctgctgggacatgcacatatcaggggttgtttgcaggatcctcagccatgttcaagtgaagtaagcctgagccagtgcgtggactggtgccacgggagtgccttgtccactgtccccctgtgtccaccagctattctcctggcgccggaactgcctctggtcttgatagcattaagccctgatggcgccggtggcgcggtgggcatggttcttcactgagagccggctctccttttcttaaagtgtgtaaatagtttatttataggggtaagaatgttctcacaccatttcacttcctcttcctctcctccagcattctcctctgagcagccttagatagtgtccatggctggagccgaccctttgagtccccttgagtgtcttaagaaccagcccacaacagcctctctttctcctccacatactgcagcctccctccatgcatcccacatacaagcactcccccactccccagcgtggcctcactgtcttctggtcttggtgctactgaaattgtcacccagaatttgaatcctgaccctccccactgcaagcccagggagccccagcccaagatggccagcctgaaactgttggccagggctcctcttgtggccatgtacccagggctggctggcctgccatttgcctctccccggagacagccgttcttctgcaaccacaccccgtgcctagccacaaccccaggctgcagctgctcagaagctccaggcattttgtttctggtgaccgcccctaatgggatatcggtgatcactggtccacccttcctgtcagggcttttctggggctgctcttggaaatgaagtcttaagtactgaataactcccctggggatagctggggcatttgtctagctgggctactttctaacactttgccatagctcagaccacttctcatcgttcattctcaaatgcttttggcgtctccagggtgcctcaggaaaacatgaagtgggcattgtagaacttggggctactgtgtaactttggaagaaaaagttaagggtacttttaagtggatactgttttgatgaaattgccaacttcagggagcccagcttggagaaggaggacgtgagtattccttacaaggctccgaaacaattctttcttcacttagttttctttctgtgctctgcatcttatattccagcagggtcttccaatgcatggtttaataactactagaactggccaggtgcagtggctcacgcctgtaatcccagaactttgggaggctaagacaggcagatcacttgaggccaggagttcgagaccagcctggacaacatggtgatacccagtttctactaaaaatacaaaaattagtcgggcatggtgatgtgcacctgtagtcccagctgctcgggaggctgaggcaggagaatcgcttgaacccgggagacagaggttgcaacgagccaagatcgagccactgcgctccggcctgggtgacaggagactccatctcaaaaaataaaattaaaaaaaaactactacaataaattatcaccttggactgtataaaacaacttttaaactagtctttttaaaaagtacacttaaataaaaatctaaacataagagaatgtaaagtgaaaagtgaaagtatgtcttctgttacgcagaggtaactactattaggaatccttcctgaaaatgtccatgcatctactcaggtcatcacacccatggaatcattttacatactattttatgagtgttacttaatatactgatccacagtgcgttttcacggtcacgccatcagttgtaggagtgtgccaagaacagatgggccttgcctttgtaccagaggagtccatttacagttgcaggtaatagaaaacccaattcagactggcctaaacaatgaggggaggttttggctcttgaaactggaaagtcccaaggtggggtgagtttcaggtttgggttgatccaagtggctcagtgacgtcaacaggatcttgtttccatttctctgccttccacagcctccccttcatctatggtggagggaaggagtctaccacagacaaaccccgagcctccccctgatgggtggtgtggtggtgaagccagcaagggaagggatccccggacacacccctcctcatgctttatcccactgaaaccatgcggctgt

SEQ ID NO: 7206 - protein, 83 aa, Homo sapiens [sequence omitted]

SEQ ID NO: 7207 - DNA, 1605 bp, Homo sapiens
cttagatagtgtccatggctggagccgaccctttgagtccccttgagtgtcttaagaaccagcccacaacagcctctctttctcctccacatactgcagcctccctccatgcatcccacatacaagcactcccccactccccagcgtggcctcactgtcttctggtcttggtgctactgaaattgtcacccagaatttgaatcctgaccctccccactgcaagcccagggagccccagcccaagatggccagcctgaaactgttggccagggctcctcttgtggccatgtacccagggctggctggcctgccatttgcctctccccggagacagccgttcttctgcaaccacaccccgtgcctagccacaaccccaggctgcagctgctcagaagctccaggcattttgtttctggtgaccgcccctaatgggatatcggtgatcactggtccacccttcctgtcagggcttttctggggctgctcttggaaatgaagtcttaagtactgaataactcccctggggatagctggggcatttgtctagctgggctactttctaacactttgccatagctcagaccacttctcatcgttcagggatggactgcaaccttaatttacttgccggagtgtacattctagtgtggtgtatactggtggctgttgatgatgatttttttttttttacacaattctctgtagactaggagaagaatgcttgtgtttttcggaagtgtgatgcttctctttgactgccaaactcttttatggaatatatctttatattaatgctgttttggtcatttttgtttggggtcactattgagatattgctaagcatctcagtggtaaacgcggctgccagaggaaccaagggatagggtatgtagaccttacagaaggatggatggtaaaggcagtccatcatcagcacaatctgacttacatttcacaataaattatcaccttggactgtataaaacaacttttaaactagtctttttaaaaagtacacttaaataaaaatctaaacataagagaatgtaaagtgaaaagtgaaagtatgtcttctgttacgcagaggtaactactattaggaatccttcctgaaaatgtccatgcatctactcaggtcatcacacccatggaatcattttacatactattttatgagtgttacttaatatactgatccacagtgcgttttcacggtcacgccatcagttgtaggagtgtgccaagaacagatgggccttgcctttgtaccagaggagtccatttacagttgcaggtaatagaaaacccaattcagactggcctaaacaatgaggggaggttttggctcttgaaactggaaagtcccaaggtggggtgagtttcaggtttgggttgatccaagtggctcagtgacgtcaacaggatcttgtttccatttctctgccttccacagcctccccttcatctatggtggagggaaggagtctaccacagacaaaccccgagcctccccctgatgggtggtgtggtggtgaagccagcaagggaagggatccccggacacacccctcctcatgctttatcccactgaaaccatgcggctgt

SEQ ID NO: 7208 - protein, 39 aa, Homo sapiens
MDGKGSPSSAQSDLHFTINYHLGLYKTTFKLVFLKSTLK

SEQ ID NO: 7209 - DNA, 3350 bp, Homo sapiens
gaaggatggatggtaaaggcagtccatcatcagcacaatctgacttacatttcattgagtaattttttttttttttaagattctgtatggcagcactttcagttgcccttgtgtgccggccacagccgcacaagttggcttgtggtttatcccccgctataagtgagagctggagaaacttcaactccataggtctagaggaaacattgttttaggttatttctgtccacccctgtgcgatactatttattgatccaagcagaagagcttggggacactgagtcgaagtggggacatgggattgaagcctgggcactgctgctgcatgagctgtgtgtcctgggtgtgccggcctttctgtgaagggggttggtggcagtgcccacctcactagatgcctctgacccagcctcccctgggggagtgggtggccacagaccctccctgccagagctcctggaaggctcctgcaggcctgacccatctattcctgtagacctggtttaggatgaagtctcggtgcgatttttgcagagttgggtttatctttcaactatagacccttctggctgttctcagccatatcatgtgactctgaatagttggatgaggaatggaaagaaagcaaggatgagagccggtcacgtggcagtctccgcccagcatcggctgtccgcacagaggcacagggcaggcctcctgtgcactccccacctagcactggcctgtcctgaatccccgccttccctggttggaggccagctgtggcatttgcaccctcttctcacctcaccatgcacatgctaactttaaagccttggggtctttcctgtaccccctcctcaaccctggtccaccccctctcaggatcttgtcaacgttatttttcctgtcccgtcttcctatcgctggccttcctttcccatcctaaaaacttgccgaggccctatggctccctccctttctttcccaggcagcttcttatctgggctgtctgtaccccttcctttgcaccacccaccatgccccacgtagctgaaagctgcttatcccaattgtcaactctggccttcttcagcctctgtagcaccagacactgcacctcctgaatgtcctctgcttctctgcttcagaggcccaggctcgccagttctctgacctctcccatatgtctgcttaggactctgctgcagctgtcctcaccagcctccggggaatcccactacccacagggcagggctgtgggctgggctgaaaaaccatctgcatggtccacaagaagcctggcactgggtttccccatgaataacaatgaaagtggctgcagtgttggaaggctcccagcagagcagagagggtgtcagtctcatcagggaacccacctgatggcttctcagccagcagtctcagaggaacatagacgactgctgagaaaggagggaggcagcagtggtcccagcacctgaggcatcctgctgtcatgggaaggtctccgcccaaatgtcagatgcatcagcctgtcacccgctggtccagagctttcagctgtactggtagggggtgggtggtggagtgctgaatgaccttcacaggtgggcctttccagctctagggtcttacgggtgtcggtccacagaaccacggtttttaggttgtgtgtccggggctatgggaacctgtcccccatgatggatcttggtagagacacttccctctgtcatcgtgcccaggaggatgctgcaggtgactacctgcagccctgttctcattcatttggatgccctccagaaatctggggagccatacacctttagagccttttttgctccttatcaagttggcaaggcttggccaattcctgttcaaggctgcattaaaggcatgttcaccatcctggctaatacggtgaaaccccttctctactaaaaatacaaaaaaattagccgggcttggtggcgggtgcctgtagtcccagctactccggaggctgaggcaggggaatggtgtgaacccaggaggcggagcttgcagtgagccgagatcacaccactgcactccagcctgggctcaaaaaagaaaaaaaaaaaaaaaaaaaggcccgttcattctcaaatgcttttggcgtctccagggtgcctcaggaaaacatgaagtgggcattgtagaacttggggctactgtgtaactttggaagaaaaagttaagggtacttttaagtggatactgttttgatgaaattgccaacttcagggagcccagcttggagaaggaggacgtgagtattccttacaaggctccgaaacaattctttcttcacttagttttctttctgtgctctgcatcttatattccagcagggtcttccaatgcatggtttaataactactagaactggccaggtgcagtggctcacgcctgtaatcccagaactttgggaggctaagacaggcagatcacttgaggccaggagttcgagaccagcctggacaacatggtgatacccagtttctactaaaaatacaaaaattagtcgggcatggtgatgtgcacctgtagtcccagctgctcgggaggctgaggcaggagaatcgcttgaacccgggagacagaggttgcaacgagccaagatcgagccactgcgctccggcctgggtgacaggagactccatctcaaaaaataaaattaaaaaaaaactactacaataaattatcaccttggactgtataaaacaacttttaaactagtctttttaaaaagtacacttaaataaaaatctaaacataagagaatgtaaagtgaaaagtgaaagtatgtcttctgttacgcagaggtaactactattaggaatccttcctgaaaatgtccatgcatctactcaggtcatcacacccatggaatcattttacatactattttatgagtgttacttaatatactgatccacagtgcgttttcacggtcacgccatcagttgtaggagtgtgccaagaacagatgggccttgcctttgtaccagaggagtccatttacagttgcaggtaatagaaaacccaattcagactggcctaaacaatgaggggaggttttggctcttgaaactggaaagtcccaaggtggggtgagtttcaggtttgggttgatccaagtggctcagtgacgtcaacaggatcttgtttccatttctctgccttccacagcctccccttcatctatggtggagggaaggagtctaccacagacaaaccccgagcctccccctgatgggtggtgtggtggtgaagccagcaagggaagggatccccggacacacccctcctcatgctttatcccactgaaaccatgcggctgt

SEQ ID NO: 7210 - protein, 118 aa, Homo sapiens [sequence omitted]

SEQ ID NO: 7211 - DNA, 596 bp, Homo sapiens
gaccccaggagcaggggtcgcgccgaagagcagagtccgcggctggaaaccaggcaggggagccacggagtagtcacacaggttttctgccgcctttcaactggtcttattttgctttcatttttcaccagcccatgtggggtgtttaatgttgcacgcgaacgcagtttcttccgggcccggaaggcccacgcacgcaacaatgttgtgcaagtgactggaaaccacctgagtgtccctccatgggggtgggttgcccagcatggacctctactcctgtcacaatgaagtcgactgtttcgtcgagggaagtggccaccgttgataaaatgaaaagacgccatgcagaatactgtgcacaggaggaaaggtctgcgtgccctaagagagagctgctggcgtgcagagagaagcagagatgccgacgacggggaggaaacacactggcggtggtgaggctccttccagcagccacagccctggttcctctcagtctgtgaccctcccacatccttcccatctatgagagcctgtaaactccttttgcttaaccttgttttagttaaggttttaaacagttgccaccagtgtgccct

SEQ ID NO: 7212 - protein, 85 aa, Homo sapiens
MGVGCPAWTSTPVTMKSTVSSREVATVDKMKRRHAEYCAQEERSACPKRELLACREKQRCRRRGGNTLAVVRLLPAATALVPLSL

SEQ ID NO: 7213 - DNA, 346 bp, Homo sapiens
agcctccagctcagccaggaaatgcccagtcccagccctgcctgggctggtaggtgtcgagtgatctgttagtggaaggtaacaatgacaccagctatatcaatgacactgccccggccagctgggaactgatctctcctctgcagataagaggaggagaaggaggcagacttgcctactaaattccatgtcttttcagccaatttcaaacacagaccagaggaggagagggagaggagggagagggagaggaggagcctttcccagggtaatccatttttaaaattctgtatgtccgattacttttgtggagacaaagggaaaagtacagaagatcacacgccta

SEQ ID NO: 7214 - protein, 31 aa, Homo sapiens [sequence omitted]

SEQ ID NO: 7215 - DNA, 3983 bp, Homo sapiens
actaacagatcactcgacacctaccagcccaggcagggctgggactgggcatttcctggctgagctggaggcttgggcccttcccattgtctcagaaccccaggtgatgccaagacatgggctctcctgggatgccgtgcttggtgacccaggagaaggactagattgctcctggtggttgctcccccttgcagagtcccacctgcccctttgggtcctgttgcctggcctcttttgctgtcctgggtagaggagatgagttcgtcgctggctgcaagctgaggccaactgacaatgctgcacagagaaggggcaccgagagtggccccggattgagcagtccgtagtgcagagcagcccctcgggcgttctgcctggccctgcttcccctgctggctgcccttctggtgcgtgcatcccaggtggcatcatgctgcagcagatcctgcacgacatgtacatcgaccccgagctccttgccgagctcagcgatgtgcagaagcacatcctcttctacaaaatgcgggaggagcagctgaggcgctggaaggagcgggagacttgggaggccctggcccaggacgagggtctcaggcctccaaagaccaagcgagcagcgagtgacaagcacatccaatggctcctaggggcagatggcgaggtctgggtctggatcatgggagaaggccctggtgacaagccctacgaagagatctctgaggagctgattgcagagagggcgcggctgcaggcacagagggaagctgaggagctctggagacagaaggaggcagagatcaccaagaagttccgggatgctctggccaatgagaaagcccggatcttggcggagaagtggaaagtggagatggaagaccgcaaggctgccaaagtcctggaggaacgcatccacgaggaattcaagaggaaagaggaagaggagaggaagcgaggagaagagcagattcgcctccaggaagagcagagggcgaaggagctctactggaccctgaagcaggctcagctgcattgccaagccagtgagaaagaggagcgagagtgggaagaacagttgcgccggtccaaggcggctgatgaggagaggagccgccgagcccagcgcgcccgggacgagtaccgacaccactcgctccgtgctatccagaagggcacggtcgctggcctcagctccatgttccgggagcttggccagagccatgagcaggaggcaagactctaccaccacctccccgacccgggtctgccgcagccccttgccctgccggtcaggacctgggagcgcccgctgcgcccagtctccagagatgtcatcgtccgctggtttaaggaggagcagctgcctcgccgagctggcttcgagaggaacaccaagttcatcgccccctggttccatggaggaaattatcactgtttcaggaggagagttacttcaggaaccctgcggacagagggacagcccaccagactaccatctgttgtttgaataatttttttccttatcaattggattcattttggtatcctgtttttgaactcagcttaagaacttctcatctcaaatcctatggccttctggaagatccaccactatccaaaggaaaaagtagattaatatgcctcaagggatatgacatctatggcatagggctactggtctcatcccagcgatcgggacagaaattgctaatagctcatgcaactctttcatgaagagcttagctatgaccttagaagacaaagcctgtttgtcatggctgccgtaaaccgagctcttacagtgcgtggaccatgttttaataatccaaaataattccagtgccgaaccctgaatttaacatatggtagacattcagtaaatgtttgttgaatgaatgcatgtcttctaaaagttttccaacacaaattagcagtggtttcttgtaaattatttcctactcgccactctataaaatcatggcaataatagaagattatgaaggatttctatggaggacataaatgctgcatctttcataatctccattatcaccctcattgatattatcattggaattatctaaggtgagccccagtttccagggcagctgattgacaccgtcctgccttccttatttaacctcttcttttgccactcgcctctatctttgaatcatattttggccttggttttgcaatggttttatgtcatcctacagatgtcttcaagacctggggtgagttatcaatgcaagaatggttcttagaaatctgatgaggcctctgctctctgggatgtggccctctctatgcaggttactccaatgattagctctgtcctcattgtccttttaattcccttgtcaacttaatctcagtatgttgcttatattaacaagaagactcacgcaataactcctcgataactctcagtgatggtatctgttggtgcatacttgtgttccacagttatggccatatacacagaggtagtatatgatgaagagaagattacagtctttacagtcaagaagacttgggttcatatcctaaccctggaacttactagcattataatgcttgcagcattgtgtttggtgagaggaaaagaatgaatggattctaggaatgttagggaacgatttactttacccgatggctgtatcaaacatctatgccccacttcttctcttgcctcacctattccttagattcttggtcacttctctaccacaagccaccagcactataaccagttttgcgtgggttctgctcttcctccctatgttgatcagtgtcatgtgagcataagccaatggtagcttgccacatgccccatctcccattgctgcagaggcataagacagaagagatgggaagtgaatgcccgatgtggtgaatctgggatgaatgggagtcataggctggtagatcgctttttcctccttcttcctcctggaggaactattctgagagtcatctgtttgtatggtcttgtagaagacagtcctgtaagatcgagcaaccagtcatgatgaaaccaagtggtggccggatcagtatgacaccctgctgcccccgtttttaattcttctctgccttgccctgctctctcctgttgctctgggattgcacttctgaatgaagtagcagctcataagcttttgccacaggctctgtcttttggggaatccaggataagaacccattatacagaagtgttcaataatatcaattttgcaactcactcagctccatggcttcccccggtctacctgtctcactacatgcataaagtgaaatgatggaaggaatctgctttctgaactctaatgtgccttcattgattatcattaaaattatcattaaaattgccttatttctatggactcagaggaatgatgttttagttttggctctctgatttaccaactatgtgactttgtccaagtcatttaacttcagtaaacctcggtatgactgaaaagggagttttctgtatggccgtcactaggtttttttgtgggttagttaaatgataaacatgaaagctctgtccaaatgaaaaaggtatttctaacaacaaccacaataacaataacaacttagtgcttagcccatgatgtatcaggggatatgatgtgatgattttcaaggtgttggaggcaacttctgttccaagaactcccagcagctttgaaagcagactgagatgagttgagaccctgaatccctgggctgttgttcctgtcacccctaattaatatgtgagagacaacagctgggttttccatccctaacacatttatttcattttatttggggcctgcaatttctgcatgtctcatatattttaggttttacctttttacctggctttaaaataaatcccttgtaagttgtcctgcaaatgaaattactgtctggaaaactgcaatttcatcttgagagttttattatgctaataaatgtcaggattctcatat

SEQ ID NO: 7216 - protein, 357 aa, Homo sapiens
MLQQILHDMYIDPELLAELSDVQKHILFYKMREEQLRRWKERETWEALAQDEGLRPPKTKRAASDKHIQWLLGADGEVWVWIMGEGPGDKPYEEISEELIAERARLQAQREAEELWRQKEAEITKKFRDALANEKARILAEKWKVEMEDRKAAKVLEERIHEEFKRKEEEERKRGEEQIRLQEEQRAKELYWTLKQAQLHCQASEKEEREWEEQLRRSKAADEERSRRAQRARDEYRHHSLRAIQKGTVAGLSSMFRELGQSHEQEARLYHHLPDPGLPQPLALPVRTWERPLRPVSRDVIVRWFKEEQLPRRAGFERNTKFIAPWFHGGNYHCFRRRVTSGTLRTEGQPTRLPSVV

SEQ ID NO: 7217 - DNA, 2886 bp, Homo sapiens
aaagcagccgtgccgtgtcccagggcgggaattgtgcggggacgggctccacggaggaatcttctcttccttcccttgatgttgccagaggactcaggaggctctccagatgctgcagcgagtgacaagcacatccaatggctcctaggggcagatggcgaggtctgggtctggatcatgggagaaggccctggtgacaagccctacgaagagatctctgaggagctgattgcagagagggcgcggctgcaggcacagagggaagctgaggagctctggagacagaaggaggcagagatcaccaagaagttccgggatgctctggccaatgagaaagcccggatcttggcggagaagtggaaagtggagatggaagaccgcaaggctgccaaagtcctggaggaacgcatccacgaggaattcaagaggaaagaggaagaggagaggaagcgaggagaagagcagattcgcctccaggaagagcagagggcgaaggagctctactggaccctgaagcaggctcagctgcattgccaagccagtgagaaagaggagcgagagtgggaagaacagttgcgccggtccaaggcggctgatgaggagaggagccgccgagcccagcgcgcccgggacgagtaccgacaccactcgctccgtgctatccagaagggcacggtcgctggcctcagctccatgttccgggagcttggccagagccatgagcaggaggcaagactctaccaccacctccccgacccgggtctgccgcagccccttgccctgccggtcaggacctgggagcgcccgctgcgcccagtctccagagatgtcatcgtccgctggtttaaggaggagcagctgcctcgccgagctggcttcgagaggaacaccaagttcatcgccccctggttccatggaggaaattatcactgtttcaggaggagagttacttcaggaaccctgcggacagagggacagcccaccagactaccatctgttgtttgaataatttttttccttatcaattggattcattttggtatcctgtttttgaactcagcttaagaacttctcatctcaaatcctatggccttctggaagatccaccactatccaaaggaaaaagtagattaatatgcctcaagggatatgacatctatggcatagggctactggtctcatcccagcgatcgggacagaaattgctaatagctcatgcaactctttcatgaagagcttagctatgaccttagaagacaaagcctgtttgtcatggctgccgtaaaccgagctcttacagtgcgtggaccatgttttaataatccaaaataattccagtgccgaaccctgaatttaacatatggtagacattcagtaaatgtttgttgaatgaatgcatgtcttctaaaagttttccaacacaaattagcagtggtttcttgtaaattatttcctactcgccactctataaaatcatggcaataatagaagattatgaaggatttctatggaggacataaatgctgcatctttcataatctccattatcaccctcattgatattatcattggaattatctaaggtgagccccagtttccagggcagctgattgacaccgtcctgccttccttatttaacctcttcttttgccactcgcctctatctttgaatcatattttggccttggttttgcaatggttttatgtcatcctacagatgtcttcaagacctggggtgagttatcaatgcaagaatggttcttagaaatctgatgaggcctctgctctctgggatgtggccctctctatgcaggttactccaatgattagctctgtcctcattgtccttttaattcccttgtcaacttaatctcagtatgttgcttatattaacaagaagactcacgcaataactcctcgataactctcagtgatggtatctgttggtgcatacttgtgttccacagttatggccatatacacagaggtagtatatgatgaagagaagattacagtctttacagtcaagaagacttgggttcatatcctaaccctggaacttactagcattataatgcttgcagcattgtgtttggtgagaggaaaagaatgaatggattctaggaatgttagggaacgatttactttacccgatggctgtatcaaacatctatgccccacttcttctcttgcctcacctattccttagattcttggtcacttctctaccacaagccaccagcactataaccagttttgcgtgggttctgctcttcctccctatgttgatcagtgtcatgtgagcataagccaatggtagcttgccacatgccccatctcccattgctgcagaggcataagacagaagagatgggaagtgaatgcccgatgtggtgaatctgggatgaatgggagtcataggctggtagatcgctttttcctccttcttcctcctggaggaactattctgagagtcatctgtttgtatggtcttgtagaagacagtcctgtaagatcgagcaaccagtcatgatgaaaccaagtggtggccggatcagtatgacaccctgctgcccccgtttttaattcttctctgccttgccctgctctctcctgttgctctgggattgcacttctgaatgaagtagcagctcataagcttttgccacaggctctgtcttttggggaatccaggataagaacccattatacagaagtgttcaataatatcaattttgcaactcactcagctccatggcttcccccggtctacctgtctcactacatgcataaagtgaaatgatggaaggaatctgctttctgaactctaatgtgccttcattgattatcattaaaattatcattaaaattgccttatttctatgg

SEQ ID NO: 7218 - protein, 308 aa, Homo sapiens
MLPEDSGGSPDAAASDKHIQWLLGADGEVWVWIMGEGPGDKPYEEISEELIAERARLQAQREAEELWRQKEAEITKKFRDALANEKARILAEKWKVEMEDRKAAKVLEERIHEEFKRKEEEERKRGEEQIRLQEEQRAKELYWTLKQAQLHCQASEKEEREWEEQLRRSKAADEERSRRAQRARDEYRHHSLRAIQKGTVAGLSSMFRELGQSHEQEARLYHHLPDPGLPQPLALPVRTWERPLRPVSRDVIVRWFKEEQLPRRAGFERNTKFIAPWFHGGNYHCFRRRVTSGTLRTEGQPTRLPSVV

SEQ ID NO: 7219 - DNA, 2119 bp, Homo sapiens
ggcgtgctcccaggcttagaaacaaacgagcgacgtgacacaagaggtcccaagggagcaaacctgaaagccagagcctcctgaatacacaaactgccggtgggccagatgacattagacactcctgagatacgagaagcatcacttccttcagacagagtcgggtcttgctctctcacccaggctggagtagagtgacaatgaccactgcagcctccacctcctaggctcaagtgatcctcctgcttcagcacccccacaccaggcaacataacaagacccccatctctacaaaaaattaaaaaagaattatcaggtcagatcctggcagcagctgcagcggctctccttgccatctccttttcacttctggaaacatgggctcccatgtggctgtctttgatgatgtcatcaaggtgttcagtgacatgaaagtgtgcaagtcttcaacactagaaaaggtgaagaagcgcaagaagttgctgctcttctgcctgagtgagtacaagaagtacatcatccttgcggaggccaagaagatcctggtaagtaatgtggaccaaaccattgatgatccctatgccacttttgtcaagatgctgacagtaaggactgccgctacgccccttatgacgccaccaaggacagcaagaagaaggacctggtgtttatcttctgggcctctgagtctgcatccattaagagcaaaatgatctatgccagctccaaagacgtcatcaagaagcagctaggggtcagcactgtcgtcttcttggagggcaaactttgtgatcccctccagcgcccttcctggagaatctactagtcccagacctgccctcagggattgcaggctgcccccttcctgccagactggagggcctgggggaatcccagcagagggaaggcactcccttcaccccaattgccaaacagccccccaactccctggattttcctcctctctccatccctgacagttctggccttcccaaactgcttggatcttctgattcctcttgggttgaagcagaccaagttctcccaggaaccccagttggggaaggcctatatatatattttaaaaacaaccccactctccacctgttcctccaccttcccatgctacaacttctaaccacaacagtgactctgtgcctgtctgtttagttctgtgtataaatggaatgttgtgaagatggccccttcccatgccagctggttcctctcccttggttatggccgctaatggaaaccggactagtgagcgacctttaatttttaaaaaaagaaaatacaataaaataatactcaaatgtttaagcagatttcccaaaacagagtagaatagaattcatatgaataagcaaacaatttaattgttactactggcattatgttatggattttgctttcctacagaaaataactccacaactgattttattagtatagaattaatttcttgctaagagtcatttttgcttatctcaccattggatatttgcaaagtcactaatatttcttttatccatcattcatatgtaagtaaatatgtaccttacttcctctttccaggcaagtagaggttccaaatatagccatgtgtcacataacagggatttgttctgataaacgaatccatagacaattttgtctttgtgcaaacatgataaagtgtacttgcacaaacctagatggtgtagcccactacacacctaagctatgtggtatagcctgttgcttctaggctacaaacatgtacagcatgttactatactgagtactgtaggcaagtgtaacataatggtcagtatttgtgtatctaaacatacctaaatatagaaaaggtacagtaaaaatatggtataaaagataaatggtatacctgtataaggcatttaccatgaatggagcttgcaggactggaagttgctctgggtgagtcaatgagtgagtggtgagtcactgtgaaagcctaggacattattgtacactactgtaaactgcataaacactgcacactaggctacaatttatgaaaaaatttcttcaataataagctattaaataacataaagttgtaaataataataaattatgattacatatcaacaat

SEQ ID NO: 7220 - protein, 111 aa, Homo sapiens
MGSHVAVFDDVIKVFSDMKVCKSSTLEKVKKRKKLLLFCLSEYKKYIILAEAKKILVSNVDQTIDDPYATFVKMLTVRTAATPLMTPPRTARRRTWCLSSGPLSLHPLRAK

SEQ ID NO: 7221 - DNA, 2321 bp, Homo sapiens
taccgccccctgccctgccctgccctcccctcgcccggcgcggtcccgtccgcctctcgctcgcctcccgcctcccctcggtcttccgaggcgcccgggctcccggcgcggcggcggagggggcgggcaggccggcgggcggtgatgtggcgggactctttatgcgctgcggcaggatacgcgctcggcgctgggacgcgactgcgctcagttctctcctctcggaagctgcagccatgatggaagtttgagagttgagccgctgtgaggcgaggccgggctcaggcgagggagatgagagacggcggcggccgcggcccggagcccctctcagcgcctgtgagcagccgcgggggcagcgccctcggggagccggccggcctgcggcggcggcagcggcggcgtttctcgcctcctcttcgtcttttctaaccgtgcagcctcttcctcggcttctcctgaaagggaaggtggaagccgtgggctcgggcgggagccggctgaggcgcggcggcggcggcggcacctcccgctcctggagcgggggggagaagcggcggcggcggcggccgcggcggctgcagctccagggagggggtctgagtcgcctgtcaccatttccagggctgggaacgccggagagttggtctctccccttctactgcctccaacacggcggcggcggcggctggcacatccagggacccgggccggttttaaacctcccgtgcgccgccgccgcaccccccgtggcccgggctccggaggccgccggcggaggcagccgttcggaggattattcgtcttctccccattccgctgccgccgctgccaggcctctggctgctgaggagaagcaggcccagtcgctgcaaccatccagcagccgccgcagcagccattacccggctgcggtccagagccaagcggcggcagagcgaggggcatcagctaccgccaagtccagagccatttccatcctgcagaagaagccccgccaccagcagcttctgccatctctctcctcctttttcttcagccacaggctcccagacatgacagccatcatcaaagagatcgttagcagaaacaaaaggagatatcaagaggatggattcgacttagacttgacctatatttatccaaacattattgctatgggatttcctgcagaaagacttgaaggcgtatacaggaacaatattgatgatgtagtaaggtttttggattcaaagcataaaaaccattacaagatatacaatctttgtgctgaaagacattatgacaccgccaaatttaattgcagagttgcacaatatccttttgaagaccataacccaccacagctagaacttatcaaacccttttgtgaagatcttgaccaatggctaagtgaagatgacaatcatgttgcagcaattcactgtaaagctggaaagggacgaactggtgtaatgatatgtgcatatttattacatcggggcaaatttttaaaggcacaagaggccctagatttctatggggaagtaaggaccagagacaaaaagggagtaactattcccagtcagaggcgctatgtgtattattatagctacctgttaaagaatcatctggattatagaccagtggcactgttgtttcacaagatgatgtttgaaactattccaatgttcagtggcggaacttgcaatcctcagtttgtggtctgccagctaaaggtgaagatatattcctccaattcaggacccacacgacgggaagacaagttcatgtactttgagttccctcagccgttacctgtgtgtggtgatatcaaagtagagttcttccacaaacagaacaagatgctaaaaaaggacaaaatgtttcacttttgggtaaatacattcttcataccaggaccagaggaaacctcagaaaaagtagaaaatggaagtctatgtgatcaagaaatcgatagcatttgcagtatagagcgtgcagataatgacaaggaatatctagtacttactttaacaaaaaatgatcttgacaaagcaaataaagacaaagccaaccgatacttttctccaaattttaaggtgaagctgtacttcacaaaaacagtagaggagccgtcaaatccagaggctagcagttcaacttctgtaacaccagatgttagtgacaatgaacctgatcattatagatattctgacaccactgactctgatccagagaatgaaccttttgatgaagatcagcatacacaaattacaaaagtctgaatttttttttatcaagagggataaaacaccatgaaaataaacttgaataaactg

SEQ ID NO: 7222 - protein, 403 aa, Homo sapiens [sequence omitted]

SEQ ID NO: 7223 - DNA, 2583 bp, Homo sapiens
taccgccccctgccctgccctgccctcccctcgcccggcgcggtcccgtccgcctctcgctcgcctcccgcctcccctcggtcttccgaggcgcccgggctcccggcgcggcggcggagggggcgggcaggccggcgggcggtgatgtggcgggactctttatgcgctgcggcaggatacgcgctcggcgctgggacgcgactgcgctcagttctctcctctcggaagctgcagccatgatggaagtttgagagttgagccgctgtgaggcgaggccgggctcaggcgagggagatgagagacggcggcggccgcggcccggagcccctctcagcgcctgtgagcagccgcgggggcagcgccctcggggagccggccggcctgcggcggcggcagcggcggcgtttctcgcctcctcttcgtcttttctaaccgtgcagcctcttcctcggcttctcctgaaagggaaggtggaagccgtgggctcgggcgggagccggctgaggcgcggcggcggcggcggcacctcccgctcctggagcgggggggagaagcggcggcggcggcggccgcggcggctgcagctccagggagggggtctgagtcgcctgtcaccatttccagggctgggaacgccggagagttggtctctccccttctactgcctccaacacggcggcggcggcggctggcacatccagggacccgggccggttttaaacctcccgtgcgccgccgccgcaccccccgtggcccgggctccggaggccgccggcggaggcagccgttcggaggattattcgtcttctccccattccgctgccgccgctgccaggcctctggctgctgaggagaagcaggcccagtcgctgcaaccatccagcagccgccgcagcagccattacccggctgcggtccagagccaagcggcggcagagcgaggggcatcagctaccgccaagtccagagccatttccatcctgcagaagaagccccgccaccagcagcttctgccatctctctcctcctttttcttcagccacaggctcccagacatgacagccatcatcaaagagatcgttagcagaaacaaaaggagatatcaagaggatggattcgacttagacttgacctatatttatccaaacattattgctatgggatttcctgcagaaagacttgaaggcgtatacaggaacaatattgatgatgtagtaaggtttttggattcaaagcataaaaaccattacaagatatacaatctttgtgctgaaagacattatgacaccgccaaatttaattgcagagttgcacaatatccttttgaagaccataacccaccacagctagaacttatcaaacccttttgtgaagatcttgaccaatggctaagtgaagatgacaatcatgttgcagcaattcactgtaaagctggaaagggacgaactggtgtaatgatatgtgcatatttattacatcggggcaaatttttaaaggcacaagaggccctagatttctatggggaagtaaggaccagagacaaaaagggagtaactattcccagtcagaggcgctatgtgtattattatagctacctgttaaagaatcatctggattatagaccagtggcactgttgtttcacaagatgatgtttgaaactattccaatgttcagtggcggaacttgcaatcctcagtttgtggtctgccagctaaaggtgaagatatattcctccaattcaggacccacacgacgggaagacaagttcatgtactttgagttccctcagccgttacctgtgtgtggtgatatcaaagtagagttcttccacaaacagaacaagatgctaaaaaaggacaaaatgtttcacttttgggtaaatacattcttcataccaggaccagaggaaacctcagaaaaagtagaaaatggaagtctatgtgatcaagaaatcgatagcatttgcagtatagagcgtgcagataatgacaaggaatatctagtacttactttaacaaaaaatgatcttgacaaagcaaataaagacaaagccaaccgatacttttctccaaattttaaggtgaagctgtacttcacaaaaacagtagaggagccgtcaaatccagaggctagcagttcaacttctgtaacaccagatgttagtgacaatgaacctgatcattatagatattctgacaccactgactctgatccagagaatgaaccttttgatgaagatcagcatacacaaattacaaaagtctgaatttttttttatcaagagggataaaacaccatgaaaataaacttgaataaactgaaaatggacctttttttttttaatggcaataggacattgtgtcagattaccagttataggaacaattctcttttcctgaccaatcttgttttaccctatacatccacagggttttgacacttgttgtccagttgaaaaaaggttgtgtagctgtgtcatgtatatacctttttgtgtcaaaaggacatttaaaattcaattaggattaataaagatggcactttcccgttttattccagttttataaaaagtggagacagac

SEQ ID NO: 7224 - protein, 403 aa, Homo sapiens [sequence omitted]

SEQ ID NO: 7225 - DNA, 3169 bp, Homo sapiens
taccgccccctgccctgccctgccctcccctcgcccggcgcggtcccgtccgcctctcgctcgcctcccgcctcccctcggtcttccgaggcgcccgggctcccggcgcggcggcggagggggcgggcaggccggcgggcggtgatgtggcgggactctttatgcgctgcggcaggatacgcgctcggcgctgggacgcgactgcgctcagttctctcctctcggaagctgcagccatgatggaagtttgagagttgagccgctgtgaggcgaggccgggctcaggcgagggagatgagagacggcggcggccgcggcccggagcccctctcagcgcctgtgagcagccgcgggggcagcgccctcggggagccggccggcctgcggcggcggcagcggcggcgtttctcgcctcctcttcgtcttttctaaccgtgcagcctcttcctcggcttctcctgaaagggaaggtggaagccgtgggctcgggcgggagccggctgaggcgcggcggcggcggcggcacctcccgctcctggagcgggggggagaagcggcggcggcggcggccgcggcggctgcagctccagggagggggtctgagtcgcctgtcaccatttccagggctgggaacgccggagagttggtctctccccttctactgcctccaacacggcggcggcggcggctggcacatccagggacccgggccggttttaaacctcccgtgcgccgccgccgcaccccccgtggcccgggctccggaggccgccggcggaggcagccgttcggaggattattcgtcttctccccattccgctgccgccgctgccaggcctctggctgctgaggagaagcaggcccagtcgctgcaaccatccagcagccgccgcagcagccattacccggctgcggtccagagccaagcggcggcagagcgaggggcatcagctaccgccaagtccagagccatttccatcctgcagaagaagccccgccaccagcagcttctgccatctctctcctcctttttcttcagccacaggctcccagacatgacagccatcatcaaagagatcgttagcagaaacaaaaggagatatcaagaggatggattcgacttagacttgacctatatttatccaaacattattgctatgggatttcctgcagaaagacttgaaggcgtatacaggaacaatattgatgatgtagtaaggtttttggattcaaagcataaaaaccattacaagatatacaatctttgtgctgaaagacattatgacaccgccaaatttaattgcagagttgcacaatatccttttgaagaccataacccaccacagctagaacttatcaaacccttttgtgaagatcttgaccaatggctaagtgaagatgacaatcatgttgcagcaattcactgtaaagctggaaagggacgaactggtgtaatgatatgtgcatatttattacatcggggcaaatttttaaaggcacaagaggccctagatttctatggggaagtaaggaccagagacaaaaagggagtaactattcccagtcagaggcgctatgtgtattattatagctacctgttaaagaatcatctggattatagaccagtggcactgttgtttcacaagatgatgtttgaaactattccaatgttcagtggcggaacttgcaatcctcagtttgtggtctgccagctaaaggtgaagatatattcctccaattcaggacccacacgacgggaagacaagttcatgtactttgagttccctcagccgttacctgtgtgtggtgatatcaaagtagagttcttccacaaacagaacaagatgctaaaaaaggacaaaatgtttcacttttgggtaaatacattcttcataccaggaccagaggaaacctcagaaaaagtagaaaatggaagtctatgtgatcaagaaatcgatagcatttgcagtatagagcgtgcagataatgacaaggaatatctagtacttactttaacaaaaaatgatcttgacaaagcaaataaagacaaagccaaccgatacttttctccaaattttaaggtgaagctgtacttcacaaaaacagtagaggagccgtcaaatccagaggctagcagttcaacttctgtaacaccagatgttagtgacaatgaacctgatcattatagatattctgacaccactgactctgatccagagaatgaaccttttgatgaagatcagcatacacaaattacaaaagtctgaatttttttttatcaagagggataaaacaccatgaaaataaacttgaataaactgaaaatggacctttttttttttaatggcaataggacattgtgtcagattaccagttataggaacaattctcttttcctgaccaatcttgttttaccctatacatccacagggttttgacacttgttgtccagttgaaaaaaggttgtgtagctgtgtcatgtatatacctttttgtgtcaaaaggacatttaaaattcaattaggattaataaagatggcactttcccgttttattccagttttataaaaagtggagacagactgatgtgtatacgtaggaattttttccttttgtgttctgtcaccaactgaagtggctaaagagctttgtgatatactggttcacatcctacccctttgcacttgtggcaacagataagtttgcagttggctaagagaggtttccgaagggttttgctacattctaatgcatgtattcgggttaggggaatggagggaatgctcagaaaggaaataattttatgctggactctggaccatataccatctccagctatttacacacacctttctttagcatgctacagttattaatctggacattcgaggaattggccgctgtcactgcttgttgtttgcgcatttttttttaaagcatattggtgctagaaaaggcagctaaaggaagtgaatctgtattggggtacaggaatgaaccttctgcaacatcttaagatccacaaatgaagggatataaaaataatgtcataggtaagaaacacagcaacaatgacttaaccatataaatgtggaggctatcaacaaagaatgggcttgaaacattataaaaattgacaatgatttattaaatatgttttctcaattgt

SEQ ID NO: 7226 - protein, 403 aa, Homo sapiens [sequence omitted]

SEQ ID NO: 7227 - DNA, 5573 bp, Homo sapiens
taccgccccctgccctgccctgccctcccctcgcccggcgcggtcccgtccgcctctcgctcgcctcccgcctcccctcggtcttccgaggcgcccgggctcccggcgcggcggcggagggggcgggcaggccggcgggcggtgatgtggcgggactctttatgcgctgcggcaggatacgcgctcggcgctgggacgcgactgcgctcagttctctcctctcggaagctgcagccatgatggaagtttgagagttgagccgctgtgaggcgaggccgggctcaggcgagggagatgagagacggcggcggccgcggcccggagcccctctcagcgcctgtgagcagccgcgggggcagcgccctcggggagccggccggcctgcggcggcggcagcggcggcgtttctcgcctcctcttcgtcttttctaaccgtgcagcctcttcctcggcttctcctgaaagggaaggtggaagccgtgggctcgggcgggagccggctgaggcgcggcggcggcggcggcacctcccgctcctggagcgggggggagaagcggcggcggcggcggccgcggcggctgcagctccagggagggggtctgagtcgcctgtcaccatttccagggctgggaacgccggagagttggtctctccccttctactgcctccaacacggcggcggcggcggctggcacatccagggacccgggccggttttaaacctcccgtgcgccgccgccgcaccccccgtggcccgggctccggaggccgccggcggaggcagccgttcggaggattattcgtcttctccccattccgctgccgccgctgccaggcctctggctgctgaggagaagcaggcccagtcgctgcaaccatccagcagccgccgcagcagccattacccggctgcggtccagagccaagcggcggcagagcgaggggcatcagctaccgccaagtccagagccatttccatcctgcagaagaagccccgccaccagcagcttctgccatctctctcctcctttttcttcagccacaggctcccagacatgacagccatcatcaaagagatcgttagcagaaacaaaaggagatatcaagaggatggattcgacttagacttgacctatatttatccaaacattattgctatgggatttcctgcagaaagacttgaaggcgtatacaggaacaatattgatgatgtagtaaggtttttggattcaaagcataaaaaccattacaagatatacaatctttgtgctgaaagacattatgacaccgccaaatttaattgcagagttgcacaatatccttttgaagaccataacccaccacagctagaacttatcaaacccttttgtgaagatcttgaccaatggctaagtgaagatgacaatcatgttgcagcaattcactgtaaagctggaaagggacgaactggtgtaatgatatgtgcatatttattacatcggggcaaatttttaaaggcacaagaggccctagatttctatggggaagtaaggaccagagacaaaaagggagtaactattcccagtcagaggcgctatgtgtattattatagctacctgttaaagaatcatctggattatagaccagtggcactgttgtttcacaagatgatgtttgaaactattccaatgttcagtggcggaacttgcaatcctcagtttgtggtctgccagctaaaggtgaagatatattcctccaattcaggacccacacgacgggaagacaagttcatgtactttgagttccctcagccgttacctgtgtgtggtgatatcaaagtagagttcttccacaaacagaacaagatgctaaaaaaggacaaaatgtttcacttttgggtaaatacattcttcataccaggaccagaggaaacctcagaaaaagtagaaaatggaagtctatgtgatcaagaaatcgatagcatttgcagtatagagcgtgcagataatgacaaggaatatctagtacttactttaacaaaaaatgatcttgacaaagcaaataaagacaaagccaaccgatacttttctccaaattttaaggtgaagctgtacttcacaaaaacagtagaggagccgtcaaatccagaggctagcagttcaacttctgtaacaccagatgttagtgacaatgaacctgatcattatagatattctgacaccactgactctgatccagagaatgaaccttttgatgaagatcagcatacacaaattacaaaagtctgaatttttttttatcaagagggataaaacaccatgaaaataaacttgaataaactgaaaatggacctttttttttttaatggcaataggacattgtgtcagattaccagttataggaacaattctcttttcctgaccaatcttgttttaccctatacatccacagggttttgacacttgttgtccagttgaaaaaaggttgtgtagctgtgtcatgtatatacctttttgtgtcaaaaggacatttaaaattcaattaggattaataaagatggcactttcccgttttattccagttttataaaaagtggagacagactgatgtgtatacgtaggaattttttccttttgtgttctgtcaccaactgaagtggctaaagagctttgtgatatactggttcacatcctacccctttgcacttgtggcaacagataagtttgcagttggctaagagaggtttccgaagggttttgctacattctaatgcatgtattcgggttaggggaatggagggaatgctcagaaaggaaataattttatgctggactctggaccatataccatctccagctatttacacacacctttctttagcatgctacagttattaatctggacattcgaggaattggccgctgtcactgcttgttgtttgcgcatttttttttaaagcatattggtgctagaaaaggcagctaaaggaagtgaatctgtattggggtacaggaatgaaccttctgcaacatcttaagatccacaaatgaagggatataaaaataatgtcataggtaagaaacacagcaacaatgacttaaccatataaatgtggaggctatcaacaaagaatgggcttgaaacattataaaaattgacaatgatttattaaatatgttttctcaattgtaacgacttctccatctcctgtgtaatcaaggccagtgctaaaattcagatgctgttagtacctacatcagtcaacaacttacacttattttactagttttcaatcataatacctgctgtggatgcttcatgtgctgcctgcaagcttcttttttctcattaaatataaaatattttgtaatgctgcacagaaattttcaatttgagattctacagtaagcgttttttttctttgaagatttatgatgcacttattcaatagctgtcagccgttccacccttttgaccttacacattctattacaatgaattttgcagttttgcacattttttaaatgtcattaactgttagggaattttacttgaatactgaatacatataatgtttatattaaaaaggacatttgtgttaaaaaggaaattagagttgcagtaaactttcaatgctgcacacaaaaaaaagacatttgatttttcagtagaaattgtcctacatgtgctttattgatttgctattgaaagaatagggtttttttttttttttttttttttttttttaaatgtgcagtgttgaatcatttcttcatagtgctcccccgagttgggactagggcttcaatttcacttcttaaaaaaaatcatcatatatttgatatgcccagactgcatacgattttaagcggagtacaactactattgtaaagctaatgtgaagatattattaaaaaggtttttttttccagaaatttggtgtcttcaaattataccttcaccttgacatttgaatatccagccattttgtttcttaatggtataaaattccattttcaataacttattggtgctgaaattgttcactagctgtggtctgacctagttaatttacaaatacagattgaataggacctactagagcagcatttatagagtttgatggcaaatagattaggcagaacttcatctaaaatattcttagtaaataatgttgacacgttttccataccttgtcagtttcattcaacaatttttaaatttttaacaaagctcttaggatttacacatttatatttaaacattgatatatagagtattgattgattgctcataagttaaattggtaaagttagagacaactattctaacacctcaccattgaaatttatatgccaccttgtctttcataaaagctgaaaattgttacctaaaatgaaaatcaacttcatgttttgaagatagttataaatattgttctttgttacaatttcgggcaccgcatattaaaacgtaactttattgttccaatatgtaacatggagggccaggtcataaataatgacattataatgggcttttgcactgttattatttttcctttggaatgtgaaggtctgaatgagggttttgattttgaatgtttcaatgtttttgagaagccttgcttacattttatggtgtagtcattggaaatggaaaaatggcattatatatattatatatataaatatatattatacatactctccttactttatttcagttaccatccccatagaatttgacaagaattgctatgactgaaaggttttcgagtcctaattaaaactttatttatggcagtattcataattagcctgaaatgcattctgtaggtaatctctgagtttctggaatattttcttagactttttggatgtgcagcagcttacatgtctgaagttacttgaaggcatcacttttaagaaagcttacagttgggccctgtaccatcccaagtcctttgtagctcctcttgaacatgtttgccatacttttaaaagggtagttgaataaatagcatcaccattctttgctgtggcacaggttataaacttaagtggagtttaccggcagcatcaaatgtttcagctttaaaaaataaaagtagggtacaagtttaatgtttagttctagaaattttgtgcaatatgttcataacgatggctgtggttgccacaaagtgcctcgtttacctttaaatactgttaatgtgtcatgcatgcagatggaaggggtggaactgtgcactaaagtgggggctttaactgtagtatttggcagagttgccttctacctgccagttcaaaagttcaacctgttttcatatagaatatatatactaaaaaatttcagtctgttaaacagccttactctgattcagcctcttcagatactcttgtgctgtgcagcagtggctctgtgtgtaaatgctatgcactgaggatacacaaaaataccaatatgatgtgtacaggataatgcctcatcccaatcagatgtccatttgttattgtgtttgttaacaaccctttatctcttagtgttataaactccacttaaaactgattaaagtctcattcttgtcattg

SEQ ID NO: 7228 - protein, 403 aa, Homo sapiens [sequence omitted]

SEQ ID NO: 7229 - DNA, 8725 bp, Homo sapiens
taccgccccctgccctgccctgccctcccctcgcccggcgcggtcccgtccgcctctcgctcgcctcccgcctcccctcggtcttccgaggcgcccgggctcccggcgcggcggcggagggggcgggcaggccggcgggcggtgatgtggcgggactctttatgcgctgcggcaggatacgcgctcggcgctgggacgcgactgcgctcagttctctcctctcggaagctgcagccatgatggaagtttgagagttgagccgctgtgaggcgaggccgggctcaggcgagggagatgagagacggcggcggccgcggcccggagcccctctcagcgcctgtgagcagccgcgggggcagcgccctcggggagccggccggcctgcggcggcggcagcggcggcgtttctcgcctcctcttcgtcttttctaaccgtgcagcctcttcctcggcttctcctgaaagggaaggtggaagccgtgggctcgggcgggagccggctgaggcgcggcggcggcggcggcacctcccgctcctggagcgggggggagaagcggcggcggcggcggccgcggcggctgcagctccagggagggggtctgagtcgcctgtcaccatttccagggctgggaacgccggagagttggtctctccccttctactgcctccaacacggcggcggcggcggctggcacatccagggacccgggccggttttaaacctcccgtgcgccgccgccgcaccccccgtggcccgggctccggaggccgccggcggaggcagccgttcggaggattattcgtcttctccccattccgctgccgccgctgccaggcctctggctgctgaggagaagcaggcccagtcgctgcaaccatccagcagccgccgcagcagccattacccggctgcggtccagagccaagcggcggcagagcgaggggcatcagctaccgccaagtccagagccatttccatcctgcagaagaagccccgccaccagcagcttctgccatctctctcctcctttttcttcagccacaggctcccagacatgacagccatcatcaaagagatcgttagcagaaacaaaaggagatatcaagaggatggattcgacttagacttgacctatatttatccaaacattattgctatgggatttcctgcagaaagacttgaaggcgtatacaggaacaatattgatgatgtagtaaggtttttggattcaaagcataaaaaccattacaagatatacaatctttgtgctgaaagacattatgacaccgccaaatttaattgcagagttgcacaatatccttttgaagaccataacccaccacagctagaacttatcaaacccttttgtgaagatcttgaccaatggctaagtgaagatgacaatcatgttgcagcaattcactgtaaagctggaaagggacgaactggtgtaatgatatgtgcatatttattacatcggggcaaatttttaaaggcacaagaggccctagatttctatggggaagtaaggaccagagacaaaaagggagtaactattcccagtcagaggcgctatgtgtattattatagctacctgttaaagaatcatctggattatagaccagtggcactgttgtttcacaagatgatgtttgaaactattccaatgttcagtggcggaacttgcaatcctcagtttgtggtctgccagctaaaggtgaagatatattcctccaattcaggacccacacgacgggaagacaagttcatgtactttgagttccctcagccgttacctgtgtgtggtgatatcaaagtagagttcttccacaaacagaacaagatgctaaaaaaggacaaaatgtttcacttttgggtaaatacattcttcataccaggaccagaggaaacctcagaaaaagtagaaaatggaagtctatgtgatcaagaaatcgatagcatttgcagtatagagcgtgcagataatgacaaggaatatctagtacttactttaacaaaaaatgatcttgacaaagcaaataaagacaaagccaaccgatacttttctccaaattttaaggtgaagctgtacttcacaaaaacagtagaggagccgtcaaatccagaggctagcagttcaacttctgtaacaccagatgttagtgacaatgaacctgatcattatagatattctgacaccactgactctgatccagagaatgaaccttttgatgaagatcagcatacacaaattacaaaagtctgaatttttttttatcaagagggataaaacaccatgaaaataaacttgaataaactgaaaatggacctttttttttttaatggcaataggacattgtgtcagattaccagttataggaacaattctcttttcctgaccaatcttgttttaccctatacatccacagggttttgacacttgttgtccagttgaaaaaaggttgtgtagctgtgtcatgtatatacctttttgtgtcaaaaggacatttaaaattcaattaggattaataaagatggcactttcccgttttattccagttttataaaaagtggagacagactgatgtgtatacgtaggaattttttccttttgtgttctgtcaccaactgaagtggctaaagagctttgtgatatactggttcacatcctacccctttgcacttgtggcaacagataagtttgcagttggctaagagaggtttccgaagggttttgctacattctaatgcatgtattcgggttaggggaatggagggaatgctcagaaaggaaataattttatgctggactctggaccatataccatctccagctatttacacacacctttctttagcatgctacagttattaatctggacattcgaggaattggccgctgtcactgcttgttgtttgcgcatttttttttaaagcatattggtgctagaaaaggcagctaaaggaagtgaatctgtattggggtacaggaatgaaccttctgcaacatcttaagatccacaaatgaagggatataaaaataatgtcataggtaagaaacacagcaacaatgacttaaccatataaatgtggaggctatcaacaaagaatgggcttgaaacattataaaaattgacaatgatttattaaatatgttttctcaattgtaacgacttctccatctcctgtgtaatcaaggccagtgctaaaattcagatgctgttagtacctacatcagtcaacaacttacacttattttactagttttcaatcataatacctgctgtggatgcttcatgtgctgcctgcaagcttcttttttctcattaaatataaaatattttgtaatgctgcacagaaattttcaatttgagattctacagtaagcgttttttttctttgaagatttatgatgcacttattcaatagctgtcagccgttccacccttttgaccttacacattctattacaatgaattttgcagttttgcacattttttaaatgtcattaactgttagggaattttacttgaatactgaatacatataatgtttatattaaaaaggacatttgtgttaaaaaggaaattagagttgcagtaaactttcaatgctgcacacaaaaaaaagacatttgatttttcagtagaaattgtcctacatgtgctttattgatttgctattgaaagaatagggtttttttttttttttttttttttttttttaaatgtgcagtgttgaatcatttcttcatagtgctcccccgagttgggactagggcttcaatttcacttcttaaaaaaaatcatcatatatttgatatgcccagactgcatacgattttaagcggagtacaactactattgtaaagctaatgtgaagatattattaaaaaggtttttttttccagaaatttggtgtcttcaaattataccttcaccttgacatttgaatatccagccattttgtttcttaatggtataaaattccattttcaataacttattggtgctgaaattgttcactagctgtggtctgacctagttaatttacaaatacagattgaataggacctactagagcagcatttatagagtttgatggcaaatagattaggcagaacttcatctaaaatattcttagtaaataatgttgacacgttttccataccttgtcagtttcattcaacaatttttaaatttttaacaaagctcttaggatttacacatttatatttaaacattgatatatagagtattgattgattgctcataagttaaattggtaaagttagagacaactattctaacacctcaccattgaaatttatatgccaccttgtctttcataaaagctgaaaattgttacctaaaatgaaaatcaacttcatgttttgaagatagttataaatattgttctttgttacaatttcgggcaccgcatattaaaacgtaactttattgttccaatatgtaacatggagggccaggtcataaataatgacattataatgggcttttgcactgttattatttttcctttggaatgtgaaggtctgaatgagggttttgattttgaatgtttcaatgtttttgagaagccttgcttacattttatggtgtagtcattggaaatggaaaaatggcattatatatattatatatataaatatatattatacatactctccttactttatttcagttaccatccccatagaatttgacaagaattgctatgactgaaaggttttcgagtcctaattaaaactttatttatggcagtattcataattagcctgaaatgcattctgtaggtaatctctgagtttctggaatattttcttagactttttggatgtgcagcagcttacatgtctgaagttacttgaaggcatcacttttaagaaagcttacagttgggccctgtaccatcccaagtcctttgtagctcctcttgaacatgtttgccatacttttaaaagggtagttgaataaatagcatcaccattctttgctgtggcacaggttataaacttaagtggagtttaccggcagcatcaaatgtttcagctttaaaaaataaaagtagggtacaagtttaatgtttagttctagaaattttgtgcaatatgttcataacgatggctgtggttgccacaaagtgcctcgtttacctttaaatactgttaatgtgtcatgcatgcagatggaaggggtggaactgtgcactaaagtgggggctttaactgtagtatttggcagagttgccttctacctgccagttcaaaagttcaacctgttttcatatagaatatatatactaaaaaatttcagtctgttaaacagccttactctgattcagcctcttcagatactcttgtgctgtgcagcagtggctctgtgtgtaaatgctatgcactgaggatacacaaaaataccaatatgatgtgtacaggataatgcctcatcccaatcagatgtccatttgttattgtgtttgttaacaaccctttatctcttagtgttataaactccacttaaaactgattaaagtctcattcttgtcattgtgtgggtgttttattaaatgagagtttataattcaaattgcttaagtccattgaagttttaattaatgggcagccaaatgtgaatacaaagttttcagtttttttttttcctgctgtccttcaaagcctactgtttaaaaaaaaaaaaaaaaaaaaacatggcctgagagtagagtatctgtctactcatgtttaattaaggaaaaacacttatttttagggctttagtcatcacttcataaattgtataagcacattaaatagcgttctagtcctgaaaaagtccaagattcttagaaaattgtgcatatttttattatgacagatgtttgaagataattccccagaatggatttgatactttagatttcaattttgtggcttttgtctattattctgtactctgccatcagcatatggaaagcttcatttactcatcatgacttgtgccatataaaaattgatatttcggaatagtctaaaggactttttgtacttgaatttaatcatgttgtttctaatattcttaaaagcttgaagactaaagcatatcctttcaacaaagcatagtaaggtaataagaaagtgtagtttgtacaagtgttaaaaaaataaagtagacaatgttacagtgggacttattatttcaagtttacattttctccatgtaattttttaaaaagtaaatgaaaaaatgtgcaataatgtaaaatatgaagtgtatgtgtacacacattttatttttcggtatcttgggtatacgtatggttgaaaactatactggagtctaaaagtattctaatttataagaagacattttggtgatgtttgaaaaatagaaatgtgctagttttgtttttatatcatgtcctttgtacgttgtaatatgagctggcttggttcagtaaatgccatcaccatttccattgagaatttaaaactcaccagtgtttaatatgcaggcttccaaaggcttatgaaaaaaatcaagacccttaaatctagttaatttgctgctaacatgaaactctttggttcttttatttttgccagataattagacacacatctaaagcttagtcttaaatggcttaagtgtagctattgattagtgctgttgctagttcagaaagaaatgtttgtgaatggaaacaagaatattcagtccaaactgttgtaaggacagtacctgaaaaccaggaaacaggataatggaaaaagtcttttaaagatgaaatgttggagccaactttcttatagaattaattgtatgtggctatagaaagcctaatgattgttgcttatttttgagagcatattattcttttatgaccataatcttgctgtttttccatcttccaaaagatcttccttctaatatgtatatcagaatgtgggtagccagtcagacaaattcatattggttggtagctttaaaaagtttgtaatgtgaagacaggaaaggacaaaatagtttgctttggtggtagtactctggttgttaagctaggtattttgagactacttccccatcacaacaacaataaaataatcactcataatcctatcacctggagacatagccatcgttaatatgttagtgactatacaatcatgttttcttctgtatatccatgtatattctttaaaaatgaaatttatactgtacctgatctcaaagctttttagcttagtatatctgtcatgaatttgtaggatgttccattgcatcagaaaacggacagtgatttgattactttctaatgccacagatgcagattacatgtagttattgagaatcctttcgaattcagtggcttaatcatgaatgtctaaatattgttgacattaggatgatacatgtaaattaaagttacatttgtttagcatagacaagcttaacattgtagatgtttctcttcaaaaatcatcttaaacatttgcatttggaattgtgttaaatagaatgtgtgaaacactgtattagtaaacttcatcacctttctacttccttatagtttgaacttttcagtttttgtagttcccaaacagttgctcaatttagagcaaattaatttaacacctgccaaaaaaaggctgctgttggcttatcagttgtctttaaattcaaatgctcatgtgacttttatcacatcaaaaaatatttcattaatgattcacctttagctctgaaaattaccgcgtttagtaattatagtgggcttataaaaacatgcaactctttttgatagttatttgagaattttggtgaaaaatatttagctgagggcagtatagaacttataaaccaatatattgatatttttaaaacatttttacatataagtaaactgccatctttgagcataactacatttaaaaataaagctgcatatttttaaatcaagtgtttaacaagaatttatattttttattttttaaaattaaaaataatttatatttcctctgttgcatgaggattctcatctgtgcttataatggttagagattttatttgtgtggaatgaagtgaggcttgtagtcatggttctagtgtttcagtttgccaagtctgtttactgcagtgaaattcatcaaatgtttcagtgtggttttctgtagcctatcatttactggctatttttttatgtacacctttaggattttctgcctactctatccagttgtccaaatgatatcctacattttacaaatgccctttcagtttctattttctttttccattaaattgccctcatgtcctaatgtgcagtttgtaagtgtgtgtgtgtgtgtctgtgtgtgtgtgaatttgattttcaagagtgctagacttccaatttgagagattaaataatttaattcaggcaaacatttttcattggaatttcacagttcattgtaatgaaaatgttaatcctggatgacctttgacatacagtaatgaatcttggatattaatgaatttgttagtagcatcttgatgtgtgttttaatgagttattttcaaagttgtgcattaaaccaaagttggcatactggaagtgtttatatcaagttccatttggctactgatggacaaaaaatagaaatgccttcctatggagagtatttttcctttaaaaaattaaaaaggttaattattttgacta

SEQ ID NO: 7230 - protein, 403 aa, Homo sapiens [sequence omitted]

SEQ ID NO: 7231 - DNA, 546 bp, Homo sapiens
gccttatgtctttctgcataattatagagtagccaaaacctgttttaggttaatcacctctggcaaaataaatgataaaagcatagcttttgtaagcagaatgatattacagaagttaacttataaatctaagtgtattaaagacacttaggaaatttatgataatgctgggtcagcattacagttttaactttttacagtttttcatatgctttttttgtgattttgctgtagaaaattaacagttggcatttggcttagttcaagtataatgctgttgacaagtatatctgacacgtcattgaactaataatatttttgaaagctgataggtacttatttttaaagctatagaggtaatatttcatcagttgcagatttgttgccaaatgaacgagtttgtagtattgctaacaaggagaagaattactagcaagtcttgatgttacttttgaagagtgtgatgattgcatttaggaagatatctaaacttctgtttcaaagcaaaaagtatgtgcaaatttcttactcatgacaaattcatat

SEQ ID NO: 7232 - protein, 30 aa, Homo sapiens
MLLLKSVMIAFRKISKLLFQSKKYVQISYS

SEQ ID NO: 7233 - DNA, 1019 bp, Homo sapiens
gcagagaagtcagacaactgatagttattataaagaaaaatgttctgagagtgaggtaaccgcttaagggaaggaagcctccttctgtcttattcactaatttacaagaagataattgtgttacacttccttaggagtcattcatttgtatatttgacacttttgctttatgaacatgtgaagattattcaaaagtaagctgttggtgatttttttcttccaagaaagcatgccacagggcaacttctagggttggttctcatctagtcctgtgctccacactatctgcatctgcacttaagtttcaatattagataactcacatgtttaaactatgaagaaagagttaaaacatcctgagaatgctagtaagtatgtatttttgaaaggacttccaaaatttgagtttaaagaggtaaactccttttacatgacaaagttacttagaaacactactgctgtttccctctcccttgccttctccctgtcccatgcatacccccagctgtgttccagaatgatggcacataaagtaaacattcatatttatttccctgtaaataattttcctcaaaattaaagtggaaaaggagagttactactagtagaaagtagaactgtacccttgggcaggggtgtgtgtgtgtagttaaagatcaatttaacttaaaaggtcttggttagagaataaaaactggcccttattagctttaatttacatgaaaaatgaaaaattttaggccaggcacagtggctcaggcctgtaatcccttaactttgggagaccaaggggagtggatcacttgaggtcaggagttcaagacagcctggccaacatgctgactcacccttccctactgaaaatacaaaagttagccaggcgcagtggccatccctacagtgctagctactcgggaggctgaggcaggagaattgcttgaacccgggaggcaaggttgcggtgagctgagatcgcaccactgcactccagactgggtgacagagcgagactccatctc

SEQ ID NO: 7234 - protein, 81 aa, Homo sapiens
MKKELKHPENASKYVFLKGLPKFEFKEVNSFYMTKLLRNTTAVSLSLAFSLSHAYPQLCSRMMAHKVNIHIYFPVNNFPQN

SEQ ID NO: 7235 - DNA, 380 bp, Homo sapiens
caattatttcaagatcatcttctaagtgttcactaaaatggatgacatacatttcagagaagaattttttgtttgtggaacgaatgcatgaatgaggacaaggagaggcctggatcacaactttgtactggaatatcaggagttgtgtaaagcaaggaagcggagactctgcagaacaaagccccttcaagacaaggaaatgccatttggagtagctactttgaggacaagagacaaaaagcctgaggagaaagtcaccatgaaggaaacagaaagattaaacagcatgcgtgatctttgattcagagtccccatctcaccctggactgccttcctttggaattcccttgtggaaaaaaaaattaaactcttatttggtt

SEQ ID NO: 7236 - protein, 69 aa, Homo sapiens
MRTRRGLDHNFVLEYQELCKARKRRLCRTKPLQDKEMPFGVATLRTRDKKPEEKVTMKETERLNSMRDL

SEQ ID NO: 7237 - DNA, 556 bp, Homo sapiens
gtgactctggacagtgaacattggtggaaattggttatccccaatttccagctcacggcattggaagacatcataaacattaatggagagcgggatgccagaataagttgatccaaatgatgcaggaatatttagcagcaaggagaaaggaattcacatttctcagtacccactatgtgccatactttgtgataagatggtttccctccaatatatcctcattgtcagcaatgtcgggaaacaggaatcatttccccttctacaggtgataaaactgaagcaagaaacatacaggctaacatcagctgagctgagatttgaactccactctttttgaccctggagctgatgaatgctgcttctagaggttgagtatcccttatccgaaatccttggaaccaggagatttttggatttgggaatatttgcatatacataatgagatatcttggagatgggacccaagtctaaatacaaaattattttgttgtatatacaccttgtacacatagactgaagataattttatacaatattttaaataattttgtgcgtg

SEQ ID NO: 7238 - protein, 50 aa, Homo sapiens
MMQEYLAARRKEFTFLSTHYVPYFVIRWFPSNISSLSAMSGNRNHFPFYR

SEQ ID NO: 7239 - DNA, 551 bp, Homo sapiens
gatgccaagagcctggtttgaatacaagccttgccattgtgtgactctgccatcaccatgagccaaacatcccccaagtagcccactggtcccaggacaaggagggagacatgaagcagagctcatccagctgctgcagccccacttgacccagagacctacactgggaagcagagctgcccagtcaagtccaacctggatgtgtggaaccccagccaacctgatgcatgagcactcacggcattggaagacatcataaacattaatggagagcgggatgccagaataagttgatccaaatgatgcaggaatatttagcagcaaggagaaaggaattcacatttctcagtacccactatgtgccatactttgtgataagatggtttccctccaatatatcctcattgtcagcaatgtcgggaaacaggaatcatttccccttctacaggtgataaaactgaagcaagaaacatacaggctaacatcagctgagctgagatttgaactccactctttttgaccctggagctgatgaatgctgcttctagagg

SEQ ID NO: 7240 - protein, 50 aa, Homo sapiens; identical to SEQ ID NO: 7238

SEQ ID NO: 7241 - DNA, 1484 bp, Homo sapiens
gggcgggcgggccggagcagcaattgccacttccccagcttcctccctggtctggggcgcctctggccgcccgggacggcgccttcccacagccggaagtcagtcccgctggccccgcgccgccttcgcactgtcccccaaggccacggctgcccccgccctccccggggctttttgttttttacgccagccccatttatcacttccaacctgcctatcgcccggcaccaactgttgcaagttccgtaataactgctgctatgaacttctccgtcgaaactgctcctccccagagcctgtttaagaagcagaaataagaataaattcccggatgccggtggatgcactgacctctaagattttcaaaggtgaagtggatacacgttattaagtcattgggagacatcgccaacattgggaaacctagtaaaaagtggaaatcgagcgttttaaataaaaaaaaaaaaaggtttctactagcaagactgatcgtaggcgaacttctcaaggaattttggaatattgtgccaaagtgagaatatttaatatttccaaaagtagacttaactaggaatacttaaagcagagactattggaaatgctttaatttgggatttcaggaaagggcttgaagagaaatattttatatgagcaagcctcttggaataattgaatcaccttaattttgtcactgttacttcgaagagaacgagaagagagaagatgggaaacgaaaggagaaagggaaaagaaatggggtggaaagaaaaaagcagaagagatcgccctataccagtaggcctagtaccctaggattctggcctctttctcccacctttggtgtttaagattaaggacagtgcattcctgcttttagaaatttaaatttaagtttgaagacttaattttaattactgtagtaggtaaagcaaagtcgttaaatacttgacatcaggatcccattggagtattgatttaggtcttttcaaaggtggtggtcctggttctctgcaccagccactggcggaatggcggaatggtgtatctaccaatgaacagatggactgggtgggcctcgggtacgggtggcttgagatgcaaatgcaagggtaggaaggcaccttcccccccaccactcccagcccaccccgccaatcttaaaacattgatctttataaaattcgcaaacgtcccacaggatttcattggcttaagagtattgtcaaatgaagacgccaggaagtattgagtttctgggtacataatactgtcctgagtgttgaaggaagaggactaatacgagattttaaaaaatggctgtggacaaccatccttcaggtgtgatggcaggacatcttgtatcacctgaaacttccttttttcgccgctaggtggtgggtgtgagtcttttgcggcctttaagtttctacggtgtttggaggaaatacgtttcagtttcaaataaatgaacaacgtgtaactct

SEQ ID NO: 7242 - protein, 70 aa, Homo sapiens [sequence omitted]

SEQ ID NO: 7243 - DNA, 4903 bp, Homo sapiens
gggccgggcgggcggcagaagatggcgagggtgtgtaggcggcagcaatgctccgttgagagacgcggctttcggcaagaactggattcgtggcgccacaagctcattcactgtgtaggtcccgtttccctctgtgcggcggccggcgggaccataagggcttaactcatatatttaacccccctccaaaaaggtttgaaagtattcttgaagggctgtttggacctgcattattaaaagatctcagtttatttaaagactgtgaacctgaaagcatttctgattggacttttgatgaaaactgtttattctgttgcttgagaagagataaagtaaagggacacttagtcggtctggatgaaccagcttcgggagctgggcaagaagctctgcttaaacaagagcaagcaaaaatcattcgattcgagagacaagcagaagaattcctcaatgcagtcttttatagaaaagacagtccctgggtctccgaccccaatattcccctagtggcccgtgagatcatgcagcgaatgatccaacaatttgctgctgaatatacctcaaaaaatagctctactcaggaccccagccagcccaatagcacaaagaaccaaagcctgccgaaagcatctccagtcaccacctctcccacggctgcaactactcagaaccctgtgctcagcaaacttctcatggctgaccaagactcacctctggaccttactgtcagaaagtctcagtcagaacctagcgaacaagacggtgtacttgatctgtccactaagaaaagtccatgtgctggcagcacttccctgagccactctccaggctgctccagtactcaagggaacgggcgacctgggagacccagccagtaccgcccagacggacttcggagtggtgatggggtacctccaagaagcttacaggatggaaccagggaaggttttggacactccacatcactcaaagttccactggctcgatccctgcagattagtgaagaactactgagcagaaaccaattgtccacagctgccagccttgggccatctggattacagaatcatggacaacacttaatattatccagggaagcctcttgggcaaaaccacattacgagttcaacctcagccgtatgaagttcaggggaaatggtgcactcagcaacatcagtgaccttccttttcttgcagaaaactctgcctttccaaaaatggcacttcaagcaaaacaagatggaaaaaaggatgtgagccattcatctcctgtagatttaaagataccacaagttcgaggaatggatctttcttgggagtctcgcactggtgatcagtacagctatagctctttggtaatgggttcacaaacggagagcgcgcttagtaaaaaattaagggctattcttccaaaacaaagtagaaaaagcatgttagatgctggacccgattcttggggctcagatgctgagcagtctacctctggacagccatatcccacatcggatcaagaaggagaccctggctccaagcagcctcggaagaaaagagggcgttacagacagtacaacagtgagatactggaggaagcaatctcagtggttatgagtggaaaaatgagtgtttccaaagctcagagtatttatgggattccccacagtacactggagtacaaagtaaaggagaggctgggcactttgaaaaaccctccaaagaaaaagatgaaattaatgaggtcggaggggccagatgtttctgtaaagattgaattagatccccagggagaggcagcacaaagtgcaaatgaatcaaaaaacgagtaggaatactgtagagtgccaattactgtacaaactgggtgagcactactgcatcattgttcagctatcattgcttgcacgtaatttcatttactgtgacacttgcttctttgcagattttgcattgacttgtgtgtacagagatgaaatgtgcattctgaatgttgcatattttaaatttttcatgtgcagtatggctcggaatatgtttggccttttgcatgtttctctacaaaagagaattgagttacctcacagagaacagatacatggaagtggactccttgcctgtagagcctgcatgcttttttgtttttttttgttgttgttgttttttcttaagttatatttgtttttactttttaaaaaagaagaggaaacaaagcccccttttagaaactacgtctgtcatactgggagctttatcactgcaaattggaaagccatcttatacaaaattattcacatttttcatctacgattcaactaatcgaaggattaaactaaagaaaaaactaagaagaacaatgaacctttgactttgagaaatttggttattcactgacataattattgggtcatttatagttacattttataattttcttctcactattaaatttatttaaattagcaagctattagtgctcacccagaggggaaggtggtggaaaatgtgcacacactaccttcagaaatgcttcagttaattactttgaacactacctttgctgtaatttcatttgagattttctaagggtagaatttggtctcaccaacaagtgaggatatagccttatctcatggaggacgagctccgtatttactcaggagcagtcagggtacattacataaaacaatggaggatgcctcattttagcaaactaggtttctttgtattcttcagtccttttacagaattgatgtgctaactgaatatcattgcagcaactagactaagatattcaagatctctttattggggatgggagaaatagggaaagaaatgtgtataagtaattatgatattgcaaaagtgatacttagattttacagcctcagtagtctgcccagtgtccacattaatgaaggatccatgtttgtagtgagagaaaaaaaccccaaggtaacccgatatgatttaggatgcatatcagttctaacaattcaatcagaagtcaagctcattggaattccttttttaactgatccaaatactagtagaagggggagggagaggtgttgggttttttttttaagtttttatttaattttgttggttagaatttttttctgtttttggcatcctacataataccccccttcttgactttttctgataattagctgatattcatggttgtttagcacacagttcaggacctttgagatcatgtttgtataagcactccttgaagaatatctaagctttttctgagatgggcttttaaaattataataagggaagtttattttctgcggtttttgcaagaataagcaaagcccatggaatttaatttttcattgtgatcagattaaaattactatttgtgcaaaacaaattccacaccacatgtactgtatattctaatctgctgagaaaggtggtcaggcccttctaaatgcttaaccaaaaacaaacattattggagtttcagtgtaaaataaaattaaaattggagggttggttagattgatttcagatggatactaacagtttgaggggaggtccagatatttccaaggcataaattcttgcctggaaactttggagcaattaattaaattaggttaagttttccctcagcaacctgtgtgttcaaaggttaggcacaccattgctgttactaaaatacatgcactgctcattcttgacatagcttgggtgtgggttcctcttgttttggttattttgtgtagcagtttaatcagtggataactgagcctgtttcctcttagctttctagacttcttaacagaaaaaacagtttgggttcaatagcattttatgattctacaatattttgtcacctagctggaagttgcaataaaaattccttatgaaatatatggttttcatctgtaattgaaggaaatcatagaaagtttgctgaaagcaaagggctaagcttatgaaggaatgcctcctttgttacacactcaagaatttgtcagcacacaattaattgcagccatagtacctttttgcgtaatgtttgggatattcagtagcccaggattgctacaaaaaggtcctttgagaaaattaatttgtgcttgcttttatcccctctcagaaagacatcactaaaggcccattaaaaatctggccctaaaagttcaacttttgtagagtttattgttcagagaggtttaatcctatgtggtagtctatataagtgatgtatgagttgagttatgtaaattttgtcattgtagtgtacatggagtgatcattttactaacataaatattttctatgtgtgtttcagtggatgacaatcgagcagcagaagaatggtgtgcctaccctttaatgctgcagtttaagagaacttgtattgtgtcatttcagattgtaggctgagagttgtaaatagtgaaaatttgagtacttctattatttgttttggttagaaagtgaatttaaaaaacaaaccaaactctaaactttctcagattaaaagtcctgagacctgaagattgtaatattcatgtctgtgaagcttttaaacattacacttgagatcagtcatgacttgatattcaggtaaattttcttttccaagaagcttttgaataagcatatttcctccaaaggtctctctctttctctctctttttttgagtgtagattattttaaagcactaattgcattacattggtaactgcaatataaaatagccattattgttttgtgaagcatggttgaaattagctagtggtcccttttgaatttcatgagcctctcaaaaaagaaaaacttaaaaaaaaaaaaaaaaaaaaacaaaaagctgctggaatatttcaaaagatatatattttaccttattataggttttgtaaagttagtttgtaatat

SEQ ID NO: 7244 - protein, 433 aa, Homo sapiens
MQRMIQQFAAEYTSKNSSTQDPSQPNSTKNQSLPKASPVTTSPTAATTQNPVLSKLLMADQDSPLDLTVRKSQSEPSEQDGVLDLSTKKSPCAGSTSLSHSPGCSSTQGNGRPGRPSQYRPDGLRSGDGVPPRSLQDGTREGFGHSTSLKVPLARSLQISEELLSRNQLSTAASLGPSGLQNHGQHLILSREASWAKPHYEFNLSRMKFRGNGALSNISDLPFLAENSAFPKMALQAKQDGKKDVSHSSPVDLKIPQVRGMDLSWESRTGDQYSYSSLVMGSQTESALSKKLRAILPKQSRKSMLDAGPDSWGSDAEQSTSGQPYPTSDQEGDPGSKQPRKKRGRYRQYNSEILEEAISVVMSGKMSVSKAQSIYGIPHSTLEYKVKERLGTLKNPPKKKMKLMRSEGPDVSVKIELDPQGEAAQSANESKNE

SEQ ID NO: 7245 - DNA, 2318 bp, Homo sapiens
cgggcggcagaagatggcgagggtgtgtaggcggcagcaatgctccgttgagagacgcggctttcggcaagaactggattcgtggcgccacaagctcattcactgtgtaggtcccgtttccctctgtgcggcggccggcgggaccataagggcttaactcatatatttaacccccctccaaaaaggtttgaaagtattcttgaagggctgtttggacctgcattattaaaagatctcagtttatttaaagactgtgaacctgaaagcatttctgattggacttttgatgaaaactgtttattctgttgcttgagaagagataaagtaaagggacacttagtcggtctggatgaaccagcttcgggagctgggcaagaagctctgcttaaacaagagcaagcaaaaatcattcgattcgagagacaagcagaagaattcctcaatgcagtcttttatagaaaagacagtccctgggtctccgaccccaatattcccctagtggcccgtgagatcatgcagcgaatgatccaacaatttgctgctgaatatacctcaaaaaatagctctactcaggaccccagccagcccaatagcacaaagaaccaaagcctgccgaaagcatctccagtcaccacctctcccacggctgcaactactcagaaccctgtgctcagcaaacttctcatggctgaccaagactcacctctggaccttactgtcagaaagtctcagtcagaacctagcgaacaagacggtgtacttgatctgtccactaagaaaagtccatgtgctggcagcacttccctgagccactctccaggctgctccagtactcaagggaacgggcgacctgggagacccagccagtaccgcccagacggacttcggagtggtgatggggtacctccaagaagcttacaggatggaaccagggaaggttttggacactccacatcactcaaagttccactggctcgatccctgcagattagtgaagaactactgagcagaaaccaattgtccacagctgccagccttgggccatctggattacagaatcatggacaacacttaatattatccagggaagcctcttgggcaaaaccacattacgagttcaacctcagccgtatgaagttcaggggaaatggtgcactcagcaacatcagtgaccttccttttcttgcagaaaactctgcctttccaaaaatggcacttcaagcaaaacaagatggaaaaaaggatgtgagccattcatctcctgtagatttaaagataccacaagttcgaggaatggatctttcttgggagtctcgcactggtgatcagtacagctatagctctttggtaatgggttcacaaacggagagcgcgcttagtaaaaaattaagggctattcttccaaaacaaagtagaaaaagcatgttagatgctggacccgattcttggggctcagatgctgagcagtctacctctggacagccatatcccacatcggatcaagaaggagaccctggctccaagcagcctcggaagaaaagagggcgttacagacagtacaacagtgagatactggaggaagcaatctcagtggttatgagtggaaaaatgagtgtttccaaagctcagagtatttatgggattccccacagtacactggagtacaaagtaaaggagaggctgggcactttgaaaaaccctccaaagaaaaagatgaaattaatgagtggatgacaatcgagcagcagaagaatggtgtgcctaccctttaatgctgcagtttaagagaacttgtattgtgtcatttcagattgtaggctgagagttgtaaatagtgaaaatttgagtacttctattatttgttttggttagaaagtgaatttaaaaaacaaaccaaactctaaactttctcagattaaaagtcctgagacctgaagattgtaatattcatgtctgtgaagcttttaaacattacacttgagatcagtcatgacttgatattcaggtaaattttcttttccaagaagcttttgaataagcatatttcctccaaaggtctctctctttctctctctttttttgagtgtagattattttaaagcactaattgcattacattggtaactgcaatataaaatagccattattgttttgtgaagcatggttgaaattagctagtggtcccttttgaatttcatgagcctctcaaaaaagaaaaacttaaaaaaaaaaaaaaaaaaaaacaaaaagctgctggaatatttcaaaagatatatattttaccttattataggttttgtaaagttagtttgtaatat

SEQ ID NO: 7246 - protein, 406 aa, Homo sapiens
MQRMIQQFAAEYTSKNSSTQDPSQPNSTKNQSLPKASPVTTSPTAATTQNPVLSKLLMADQDSPLDLTVRKSQSEPSEQDGVLDLSTKKSPCAGSTSLSHSPGCSSTQGNGRPGRPSQYRPDGLRSGDGVPPRSLQDGTREGFGHSTSLKVPLARSLQISEELLSRNQLSTAASLGPSGLQNHGQHLILSREASWAKPHYEFNLSRMKFRGNGALSNISDLPFLAENSAFPKMALQAKQDGKKDVSHSSPVDLKIPQVRGMDLSWESRTGDQYSYSSLVMGSQTESALSKKLRAILPKQSRKSMLDAGPDSWGSDAEQSTSGQPYPTSDQEGDPGSKQPRKKRGRYRQYNSEILEEAISVVMSGKMSVSKAQSIYGIPHSTLEYKVKERLGTLKNPPKKKMKLMSG

SEQ ID NO: 7247 - DNA, 1136 bp, Homo sapiens
tcgtggcgccacaagctcattcactgtgtaggtcccgtttccctctgtgcggcggccggcgggaccataagggcttaactcatatatttaacccccctccaaaaaagcatgttactctgaggtttctgaagcaccagcaaatggattaagtaaaggtctggggattttcgacagacaaattggtaaaagttggaggtggccagcaggcagaaaaagaagacctttagattggcataagcaaggggttcactttgtccagcaagactgtcatcctttctctgtacctcggaagagaagaacttcctttgccagtgtttggatatcccccctccccagtcaatcctttctgcacctgggggtgcagtgtctctaggacagcacttctcaaacttcagtaaacataagaatcacctggaaagcttgttaaaactaagattcttgaataccatttccagatattctgattgattaggtctgggttgaggtataagaatttacatttctgtggaacaagctgcccgatgctgatattgcaggtcagtggaccacacttttgagtaaggtctagggtcttagcctttatgcgagagtctcagtttcatttcttaaggcccttctgcccctgcatatgtattaaaacccaagttggttttaatacatgggtaacacagcatgttacccatattaatcagtgcactctcagctctgtcctccagattcttcatttctggtacgtgaggcatttcctacctaccttttcagcttagcttgatgtgtgtgtttgttggggaggggagtgggtatacgtgtgcacttatcacatattttatccattatatatagtaataagacttttaagttgtcttcacatacttctctgaatagtttggtcccaccaataaacctatcactgttcaactggaagtttcctgtaaatctatttatagaccttttgggaaaatgccattaaataaataccacattattttggctttagtatatacttaatttacggaaatgcagtgctttacagttatttagaacatcacttctcatttgaaaatagtaaagttttcagatttgtacccaatgtgttttgagcttagaatgtaacaatgcatgtttttaaaaattgc

SEQ ID NO: 7248 - protein, 61 aa, Homo sapiens
MRESQFHFLRPFCPCICIKTQVGFNTWVTQHVTHINQCTLSSVLQILHFWYVRHFLPTFSA

SEQ ID NO: 7249 - DNA, 4945 bp, Homo sapiens
gtgcgaagcgtgaggtggagatgggggcggagggagctggagctgtcacagtccccgggtgcgcctgaccgagccaagtggggtgtcatggccgcggggggcagcggctgcacttcctcagcgggcggcggtggccggggagttaatcctcgacgcacgggtcccgtttccctctgtgcggcggccggcgggaccataagggcttaactcatatatttaacccccctccaaaaaggtttgaaagtattcttgaagggctgtttggacctgcattattaaaagatctcagtttatttaaagactgtgaacctgaaagcatttctgattggacttttgatgaaaactgtttattctgttgcttgagaagagataaagtaaagggacacttagtcggtctggatgaaccagcttcgggagctgggcaagaagctctgcttaaacaagagcaagcaaaaatcattcgattcgagagacaagcagaagaattcctcaatgcagtcttttatagaaaagacagtccctgggtctccgaccccaatattcccctagtggcccgtgagatcatgcagcgaatgatccaacaatttgctgctgaatatacctcaaaaaatagctctactcaggaccccagccagcccaatagcacaaagaaccaaagcctgccgaaagcatctccagtcaccacctctcccacggctgcaactactcagaaccctgtgctcagcaaacttctcatggctgaccaagactcacctctggaccttactgtcagaaagtctcagtcagaacctagcgaacaagacggtgtacttgatctgtccactaagaaaagtccatgtgctggcagcacttccctgagccactctccaggctgctccagtactcaagggaacgggcgacctgggagacccagccagtaccgcccagacggacttcggagtggtgatggggtacctccaagaagcttacaggatggaaccagggaaggttttggacactccacatcactcaaagttccactggctcgatccctgcagattagtgaagaactactgagcagaaaccaattgtccacagctgccagccttgggccatctggattacagaatcatggacaacacttaatattatccagggaagcctcttgggcaaaaccacattacgagttcaacctcagccgtatgaagttcaggggaaatggtgcactcagcaacatcagtgaccttccttttcttgcagaaaactctgcctttccaaaaatggcacttcaagcaaaacaagatggaaaaaaggatgtgagccattcatctcctgtagatttaaagataccacaagttcgaggaatggatctttcttgggagtctcgcactggtgatcagtacagctatagctctttggtaatgggttcacaaacggagagcgcgcttagtaaaaaattaagggctattcttccaaaacaaagtagaaaaagcatgttagatgctggacccgattcttggggctcagatgctgagcagtctacctctggacagccatatcccacatcggatcaagaaggagaccctggctccaagcagcctcggaagaaaagagggcgttacagacagtacaacagtgagatactggaggaagcaatctcagtggttatgagtggaaaaatgagtgtttccaaagctcagagtatttatgggattccccacagtacactggagtacaaagtaaaggagaggctgggcactttgaaaaaccctccaaagaaaaagatgaaattaatgaggtcggaggggccagatgtttctgtaaagattgaattagatccccagggagaggcagcacaaagtgcaaatgaatcaaaaaacgagtaggaatactgtagagtgccaattactgtacaaactgggtgagcactactgcatcattgttcagctatcattgcttgcacgtaatttcatttactgtgacacttgcttctttgcagattttgcattgacttgtgtgtacagagatgaaatgtgcattctgaatgttgcatattttaaatttttcatgtgcagtatggctcggaatatgtttggccttttgcatgtttctctacaaaagagaattgagttacctcacagagaacagatacatggaagtggactccttgcctgtagagcctgcatgcttttttgtttttttttgttgttgttgttttttcttaagttatatttgtttttactttttaaaaaagaagaggaaacaaagcccccttttagaaactacgtctgtcatactgggagctttatcactgcaaattggaaagccatcttatacaaaattattcacatttttcatctacgattcaactaatcgaaggattaaactaaagaaaaaactaagaagaacaatgaacctttgactttgagaaatttggttattcactgacataattattgggtcatttatagttacattttataattttcttctcactattaaatttatttaaattagcaagctattagtgctcacccagaggggaaggtggtggaaaatgtgcacacactaccttcagaaatgcttcagttaattactttgaacactacctttgctgtaatttcatttgagattttctaagggtagaatttggtctcaccaacaagtgaggatatagccttatctcatggaggacgagctccgtatttactcaggagcagtcagggtacattacataaaacaatggaggatgcctcattttagcaaactaggtttctttgtattcttcagtccttttacagaattgatgtgctaactgaatatcattgcagcaactagactaagatattcaagatctctttattggggatgggagaaatagggaaagaaatgtgtataagtaattatgatattgcaaaagtgatacttagattttacagcctcagtagtctgcccagtgtccacattaatgaaggatccatgtttgtagtgagagaaaaaaaccccaaggtaacccgatatgatttaggatgcatatcagttctaacaattcaatcagaagtcaagctcattggaattccttttttaactgatccaaatactagtagaagggggagggagaggtgttgggttttttttttaagtttttatttaattttgttggttagaatttttttctgtttttggcatcctacataataccccccttcttgactttttctgataattagctgatattcatggttgtttagcacacagttcaggacctttgagatcatgtttgtataagcactccttgaagaatatctaagctttttctgagatgggcttttaaaattataataagggaagtttattttctgcggtttttgcaagaataagcaaagcccatggaatttaatttttcattgtgatcagattaaaattactatttgtgcaaaacaaattccacaccacatgtactgtatattctaatctgctgagaaaggtggtcaggcccttctaaatgcttaaccaaaaacaaacattattggagtttcagtgtaaaataaaattaaaattggagggttggttagattgatttcagatggatactaacagtttgaggggaggtccagatatttccaaggcataaattcttgcctggaaactttggagcaattaattaaattaggttaagttttccctcagcaacctgtgtgttcaaaggttaggcacaccattgctgttactaaaatacatgcactgctcattcttgacatagcttgggtgtgggttcctcttgttttggttattttgtgtagcagtttaatcagtggataactgagcctgtttcctcttagctttctagacttcttaacagaaaaaacagtttgggttcaatagcattttatgattctacaatattttgtcacctagctggaagttgcaataaaaattccttatgaaatatatggttttcatctgtaattgaaggaaatcatagaaagtttgctgaaagcaaagggctaagcttatgaaggaatgcctcctttgttacacactcaagaatttgtcagcacacaattaattgcagccatagtacctttttgcgtaatgtttgggatattcagtagcccaggattgctacaaaaaggtcctttgagaaaattaatttgtgcttgcttttatcccctctcagaaagacatcactaaaggcccattaaaaatctggccctaaaagttcaacttttgtagagtttattgttcagagaggtttaatcctatgtggtagtctatataagtgatgtatgagttgagttatgtaaattttgtcattgtagtgtacatggagtgatcattttactaacataaatattttctatgtgtgtttcagtggatgacaatcgagcagcagaagaatggtgtgcctaccctttaatgctgcagtttaagagaacttgtattgtgtcatttcagattgtaggctgagagttgtaaatagtgaaaatttgagtacttctattatttgttttggttagaaagtgaatttaaaaaacaaaccaaactctaaactttctcagattaaaagtcctgagacctgaagattgtaatattcatgtctgtgaagcttttaaacattacacttgagatcagtcatgacttgatattcaggtaaattttcttttccaagaagcttttgaataagcatatttcctccaaaggtctctctctttctctctctttttttgagtgtagattattttaaagcactaattgcattacattggtaactgcaatataaaatagccattattgttttgtgaagcatggttgaaattagctagtggtcccttttgaatttcatgagcctctcaaaaaagaaaaacttaaaaaaaaaaaaaaaaaaaaacaaaaagctgctggaatatttcaaaagatatatattttaccttattataggttttgtaaagttagtttgtaatat

SEQ ID NO: 7250 - protein, 433 aa, Homo sapiens; identical to SEQ ID NO: 7244

SEQ ID NO: 7251 - DNA, 563 bp, Homo sapiens
cctggggattataattaacaccttcatttgtagcagtctattttgaattaataacaacttggtttcaatagtatataaaatactttgctgctacatagctctcccccctccaataaatctttatgcattgtttgtccatcaacacagagttataattattgttgtatgtagtcttttaagtcatatagggaacaaaagaggcattaacaaactgaaaacataacctctctgccttctttgcttcctaacactttataatataatatctctaatatgctttcagatactattctaaataatttacaaatacttgtctaatcacgttataaatttatagccaaggaaagtgaggtgtgaagaagacaaattcctggccaatatggcgaaacccggtctctactaaaaatacaaaaactaactgggcatggtggtgggcatctgtagtcccagctactcgggaggctgaggcaggagaattgcttgaaccctggaggtggaggttgcagtaagccaagatcgcgccactacactccagcctgggtgacagagcaagactctgtttc

SEQ ID NO: 7252 - protein, 52 aa, Homo sapiens [sequence omitted]

SEQ ID NO: 7253 - DNA, 468 bp, Homo sapiens
ggctgtttggacctgcattattaaaagatctcagtttatttaaagactgtgaacctgaaagcatttctgattggacttttgatgaaaactgtttattctgttgcttgagaagagataaagtaaaggtaactaagaagcctgtgaaacttttatttagtgtagtattttaaagttttcatcttttaaaacattgtgttactttgttggaggatttgtaggaaaaggaaggtatggtttcatacttagttatgaaagagtttgatagtaatcctgggttttgcaatttaagttatttccatcctgttgattagcctattaagaaacctatatcctaccatgcatttattgttgttattttgtttttttgcttttttgttttttttttattttgagacggagtctctctgtgatgcccaggctggagtgaaatggcacgatctctgctcactgcagccgccgcctcctggg

SEQ ID NO: 7254 - protein, 43 aa, Homo sapiens
MHLLLLFCFFAFLFFFYFETESLCDAQAGVKWHDLCSLQPPPP

SEQ ID NO: 7255 - DNA, 2488 bp, Homo sapiens
aaggacaattagtcactagcgagacccagtaggaagagaggtttaaatcagagggattgaatgagggtgctttgtgccttccctgaagccatgccctccagcaactcccgcccccccgcgtgcctagccccgggggctctctacttggctctgttgctccatctctccctttcctcccaggctggagacaggagacccttgcctgtagacagagctgcaggtttgaaggaaaagaccctgattctacttgatgtgagcaccaagaacccagtcaggacagtcaatgagaacttcctctctctgcagctggatccgtccatcattcatgatggctggctcgatttcctaagctccaagcgcttggtgaccctggcccggggactttcgcccgcctttctgcgcttcgggggcaaaaggaccgacttcctgcagttccagaacctgaggaacccggcgaaaagccgcgggggcccgggcccggattactatctcaaaaactatgaggatgagccaaataactatcggaccatgcatggccgggcagtaaatggcagccagttgggaaaggattacatccagctgaagagcctgttgcagcccatccggatttattccagagccagcttatatggccctaatattgggcggccgaggaagaatgtcatcgccctcctagatggattcatgaaggtggcaggaagtacagtagatgcagttacctggcaacattgctacattgatggccgggtggtcaaggtgatggacttcctgaaaactcgcctgttagacacactctctgaccagattaggaaaattcagaaagtggttaatacatacactccaggaaagaagatttggcttgaaggtgtggtgaccacctcagctggaggcacaaacaatctatccgattcctatgctgcaggattcttatggttgaacactttaggaatgctggccaatcagggcattgatgtcgtgatacggcactcattttttgaccatggatacaatcacctcgtggaccagaattttaacccattaccagactactggctctctctcctctacaagcgcctgatcggccccaaagtcttggctgtgcatgtggctgggctccagcggaagccacggcctggccgagtgatccgggacaaactaaggatttatgctcactgcacaaaccaccacaaccacaactacgttcgtgggtccattacactttttatcatcaacttgcatcgatcaagaaagaaaatcaagctggctgggactctcagagacaagctggttcaccagtacctgctgcagccctatgggcaggagggcctaaagtccaagtcagtgcaactgaatggccagcccttagtgatggtggacgacgggaccctcccagaattgaagccccgcccccttcgggccggccggacattggtcatccctccagtcaccatgggcttttatgtggtcaagaatgtcaatgctttggcctgccgctaccgataagctatcctcacactcacggctaccagtgggcctgctgggctgcttccactcctccactccagtagtatcctctgttttcagacatcctagcaaccagcccctgctgccccatcctgctggaatcaacacagacttgctctccaaagagactaaatgtcatagcgtgatcttagcctaggtaggccacatccatcccaaaggaaaatgtagacatcacctgtacctatataaggataaaggcatgtgtatagagcagaatgtttcccttcatgtgcactatgaaaacgagctgacagcacactcccaggagaaatgtttccagacaactccccatgatcctgtcacacagcattataaccacaaatccaaaccttagcctgctgctgctgctgccctcagaggaagatgaggaaggaaaaaaactgggtggacctacaaaaacccatcctctcccaactccttcttctctgcctctttcttgctgctgccctgagttttttgacacatctctttccataggggagtaatgggtgtgtcagccctggcctgctgggagagctgtttgtatgatttcccggctgatgtatgagcgtgcgcatctgggttcctgacagtggcatccatcactggcagttcttctgggaagcgggtgcttcaaaagtaaaattacaatcacactccagatttggtaagaaggttctattcctctgtgaatccagattcccccagagttgtaatgggagtcaagtaacaatattcattgagtggagagcagtttattaggcacaacaaaaagtagtcatcattcttcatgttgctatgagggagagtttgagtacaaagagaaagcatactgaaacatcaggtacacacacacaccccaactggacaaagcaaattagacctctccaaaattaagagaatattaggggctctatagggtaagcccttaattgtttggttaactcaaatcattatttttaaa

SEQ ID NO: 7256 - protein, 480 aa, Homo sapiens
MRVLCAFPEAMPSSNSRPPACLAPGALYLALLLHLSLSSQAGDRRPLPVDRAAGLKEKTLILLDVSTKNPVRTVNENFLSLQLDPSIIHDGWLDFLSSKRLVTLARGLSPAFLRFGGKRTDFLQFQNLRNPAKSRGGPGPDYYLKNYEDEPNNYRTMHGRAVNGSQLGKDYIQLKSLLQPIRIYSRASLYGPNIGRPRKNVIALLDGFMKVAGSTVDAVTWQHCYIDGRVVKVMDFLKTRLLDTLSDQIRKIQKVVNTYTPGKKIWLEGVVTTSAGGTNNLSDSYAAGFLWLNTLGMLANQGIDVVIRHSFFDHGYNHLVDQNFNPLPDYWLSLLYKRLIGPKVLAVHVAGLQRKPRPGRVIRDKLRIYAHCTNHHNHNYVRGSITLFIINLHRSRKKIKLAGTLRDKLVHQYLLQPYGQEGLKSKSVQLNGQPLVMVDDGTLPELKPRPLRAGRTLVIPPVTMGFYVVKNVNALACRYR

SEQ ID NO: 7257 - DNA, 2837 bp, Homo sapiens
acacactttagataaggacaattagtcactagcgagacccagtaggaagagaggtttaaatcagagggattgaatgagggtgctttgtgccttccctgaagccatgccctccagcaactcccgcccccccgcgtgcctagccccgggggctctctacttggctctgttgctccatctctccctttcctcccaggctggagacaggagacccttgcctgtagacagagctgcaggtttgaaggaaaagaccctgattctacttgatgtgagcaccaagaacccagtcaggacagtcaatgagaacttcctctctctgcagctggatccgtccatcattcatgatggctggctcgatttcctaagctccaagcgcttggtgaccctggcccggggactttcgcccgcctttctgcgcttcgggggcaaaaggaccgacttcctgcagttccagaacctgaggaacccggcgaaaagccgcgggggcccgggcccggattactatctcaaaaactatgaggatgacattgttcgaagtgatgttgccttagataaacagaaaggctgcaagattgcccagcaccctgatgttatgctggagctccaaagggagaaggcagctcagatgcatctggttcttctaaaggagcaattctccaatacttacagtaatctcatattaacagccaggtctctagacaaactttataactttgctgattgctctggactccacctgatatttgctctaaatgcactgcgtcgtaatcccaataactcctggaacagttctagtgccctgagtctgttgaagtacagcgccagcaaaaagtacaacatttcttgggaactgggtaatgagccaaataactatcggaccatgcatggccgggcagtaaatggcagccagttgggaaaggattacatccagctgaagagcctgttgcagcccatccggatttattccagagccagcttatatggccctaatattgggcggccgaggaagaatgtcatcgccctcctagatggattcatgaaggtggcaggaagtacagtagatgcagttacctggcaacattgctacattgatggccgggtggtcaaggtgatggacttcctgaaaactcgcctgttagacacactctctgaccagattaggaaaattcagaaagtggttaatacatacactccaggaaagaagatttggcttgaaggtgtggtgaccacctcagctggaggcacaaacaatctatccgattcctatgctgcaggattcttatggttgaacactttaggaatgctggccaatcagggcattgatgtcgtgatacggcactcattttttgaccatggatacaatcacctcgtggaccagaattttaacccattaccagactactggctctctctcctctacaagcgcctgatcggccccaaagtcttggctgtgcatgtggctgggctccagcggaagccacggcctggccgagtgatccgggacaaactaaggatttatgctcactgcacaaaccaccacaaccacaactacgttcgtgggtccattacactttttatcatcaacttgcatcgatcaagaaagaaaatcaagctggctgggactctcagagacaagctggttcaccagtacctgctgcagccctatgggcaggagggcctaaagtccaagtcagtgcaactgaatggccagcccttagtgatggtggacgacgggaccctcccagaattgaagccccgcccccttcgggccggccggacattggtcatccctccagtcaccatgggcttttatgtggtcaagaatgtcaatgctttggcctgccgctaccgataagctatcctcacactcacggctaccagtgggcctgctgggctgcttccactcctccactccagtagtatcctctgttttcagacatcctagcaaccagcccctgctgccccatcctgctggaatcaacacagacttgctctccaaagagactaaatgtcatagcgtgatcttagcctaggtaggccacatccatcccaaaggaaaatgtagacatcacctgtacctatataaggataaaggcatgtgtatagagcagaatgtttcccttcatgtgcactatgaaaacgagctgacagcacactcccaggagaaatgtttccagacaactccccatgatcctgtcacacagcattataaccacaaatccaaaccttagcctgctgctgctgctgccctcagaggaagatgaggaaggaaaaaaactgggtggacctacaaaaacccatcctctcccaactccttcttctctgcctctttcttgctgctgccctgagttttttgacacatctctttccataggggagtaatgggtgtgtcagccctggcctgctgggagagctgtttgtatgatttcccggctgatgtatgagcgtgcgcatctgggttcctgacagtggcatccatcactggcagttcttctgggaagcgggtgcttcaaaagtaaaattacaatcacactccagatttggtaagaaggttctattcctctgtgaatccagattcccccagagttgtaatgggagtcaagtaacaatattcattgagtggagagcagtttattaggcacaacaaaaagtagtcatcattcttcatgttgctatgagggagagtttgagtacaaagagaaagcatactgaaacatcaggtacacacacacaccccaactggacaaagcaaattagacctctccaaaattaagagaatattaggggctctatagggtaagcccttaattgtttggttaactcaaatcattatttttaaa

SEQ ID NO: 7258 - protein, 592 aa, Homo sapiens
MRVLCAFPEAMPSSNSRPPACLAPGALYLALLLHLSLSSQAGDRRPLPVDRAAGLKEKTLILLDVSTKNPVRTVNENFLSLQLDPSIIHDGWLDFLSSKRLVTLARGLSPAFLRFGGKRTDFLQFQNLRNPAKSRGGPGPDYYLKNYEDDIVRSDVALDKQKGCKIAQHPDVMLELQREKAAQMHLVLLKEQFSNTYSNLILTARSLDKLYNFADCSGLHLIFALNALRRNPNNSWNSSSALSLLKYSASKKYNISWELGNEPNNYRTMHGRAVNGSQLGKDYIQLKSLLQPIRIYSRASLYGPNIGRPRKNVIALLDGFMKVAGSTVDAVTWQHCYIDGRVVKVMDFLKTRLLDTLSDQIRKIQKVVNTYTPGKKIWLEGVVTTSAGGTNNLSDSYAAGFLWLNTLGMLANQGIDVVIRHSFFDHGYNHLVDQNFNPLPDYWLSLLYKRLIGPKVLAVHVAGLQRKPRPGRVIRDKLRIYAHCTNHHNHNYVRGSITLFIINLHRSRKKIKLAGTLRDKLVHQYLLQPYGQEGLKSKSVQLNGQPLVMVDDGTLPELKPRPLRAGRTLVIPPVTMGFYVVKNVNALACRYR

SEQ ID NO: 7259 - DNA, 2663 bp, Homo sapiens
acacactttagataaggacaattagtcactagcgagacccagtaggaagagaggtttaaatcagagggattgaatgagggtgctttgtgccttccctgaagccatgccctccagcaactcccgcccccccgcgtgcctagccccgggggctctctacttggctctgttgctccatctctccctttcctcccaggctggagacaggagacccttgcctgtagacagagctgcaggtttgaaggaaaagaccctgattctacttgatgtgagcaccaagaacccagtcaggacagtcaatgagaacttcctctctctgcagctggatccgtccatcattcatgatggctggctcgatttcctaagctccaagcgcttggtgaccctggcccggggactttcgcccgcctttctgcgcttcgggggcaaaaggaccgacttcctgcagttccagaacctgaggaacccggcgaaaagccgcgggggcccgggcccggattactatctcaaaaactatgaggatgacattgttcgaagtgatgttgccttagataaacagaaaggctgcaagattgcccagcaccctgatgttatgctggagctccaaagggagaaggcagctcagatgcatctggttcttctaaaggagcaattctccaatacttacagtaatctcatattaacagagccaaataactatcggaccatgcatggccgggcagtaaatggcagccagttgggaaaggattacatccagctgaagagcctgttgcagcccatccggatttattccagagccagcttatatggccctaatattgggcggccgaggaagaatgtcatcgccctcctagatggattcatgaaggtggcaggaagtacagtagatgcagttacctggcaacattgctacattgatggccgggtggtcaaggtgatggacttcctgaaaactcgcctgttagacacactctctgaccagattaggaaaattcagaaagtggttaatacatacactccaggaaagaagatttggcttgaaggtgtggtgaccacctcagctggaggcacaaacaatctatccgattcctatgctgcaggattcttatggttgaacactttaggaatgctggccaatcagggcattgatgtcgtgatacggcactcattttttgaccatggatacaatcacctcgtggaccagaattttaacccattaccagactactggctctctctcctctacaagcgcctgatcggccccaaagtcttggctgtgcatgtggctgggctccagcggaagccacggcctggccgagtgatccgggacaaactaaggatttatgctcactgcacaaaccaccacaaccacaactacgttcgtgggtccattacactttttatcatcaacttgcatcgatcaagaaagaaaatcaagctggctgggactctcagagacaagctggttcaccagtacctgctgcagccctatgggcaggagggcctaaagtccaagtcagtgcaactgaatggccagcccttagtgatggtggacgacgggaccctcccagaattgaagccccgcccccttcgggccggccggacattggtcatccctccagtcaccatgggcttttatgtggtcaagaatgtcaatgctttggcctgccgctaccgataagctatcctcacactcacggctaccagtgggcctgctgggctgcttccactcctccactccagtagtatcctctgttttcagacatcctagcaaccagcccctgctgccccatcctgctggaatcaacacagacttgctctccaaagagactaaatgtcatagcgtgatcttagcctaggtaggccacatccatcccaaaggaaaatgtagacatcacctgtacctatataaggataaaggcatgtgtatagagcagaatgtttcccttcatgtgcactatgaaaacgagctgacagcacactcccaggagaaatgtttccagacaactccccatgatcctgtcacacagcattataaccacaaatccaaaccttagcctgctgctgctgctgccctcagaggaagatgaggaaggaaaaaaactgggtggacctacaaaaacccatcctctcccaactccttcttctctgcctctttcttgctgctgccctgagttttttgacacatctctttccataggggagtaatgggtgtgtcagccctggcctgctgggagagctgtttgtatgatttcccggctgatgtatgagcgtgcgcatctgggttcctgacagtggcatccatcactggcagttcttctgggaagcgggtgcttcaaaagtaaaattacaatcacactccagatttggtaagaaggttctattcctctgtgaatccagattcccccagagttgtaatgggagtcaagtaacaatattcattgagtggagagcagtttattaggcacaacaaaaagtagtcatcattcttcatgttgctatgagggagagtttgagtacaaagagaaagcatactgaaacatcaggtacacacacacaccccaactggacaaagcaaattagacctctccaaaattaagagaatattaggggctctatagggtaagcccttaattgtttggttaactcaaatcattatttttaaa

SEQ ID NO: 7260 - protein, 534 aa, Homo sapiens
MRVLCAFPEAMPSSNSRPPACLAPGALYLALLLHLSLSSQAGDRRPLPVDRAAGLKEKTLILLDVSTKNPVRTVNENFLSLQLDPSIIHDGWLDFLSSKRLVTLARGLSPAFLRFGGKRTDFLQFQNLRNPAKSRGGPGPDYYLKNYEDDIVRSDVALDKQKGCKIAQHPDVMLELQREKAAQMHLVLLKEQFSNTYSNLILTEPNNYRTMHGRAVNGSQLGKDYIQLKSLLQPIRIYSRASLYGPNIGRPRKNVIALLDGFMKVAGSTVDAVTWQHCYIDGRVVKVMDFLKTRLLDTLSDQIRKIQKVVNTYTPGKKIWLEGVVTTSAGGTNNLSDSYAAGFLWLNTLGMLANQGIDVVIRHSFFDHGYNHLVDQNFNPLPDYWLSLLYKRLIGPKVLAVHVAGLQRKPRPGRVIRDKLRIYAHCTNHHNHNYVRGSITLFIINLHRSRKKIKLAGTLRDKLVHQYLLQPYGQEGLKSKSVQLNGQPLVMVDDGTLPELKPRPLRAGRTLVIPPVTMGFYVVKNVNALACRYR

SEQ ID NO: 7261 - DNA, 2907 bp, Homo sapiens
acacactttagataaggacaattagtcactagcgagacccagtaggaagagaggtttaaatcagagggattgaatgagggtgctttgtgccttccctgaagccatgccctccagcaactcccgcccccccgcgtgcctagccccgggggctctctacttggctctgttgctccatctctccctttcctcccaggctggagacaggagacccttgcctgtagacagagctgcaggtttgaaggaaaagaccctgattctacttgatgtgagcaccaagaacccagtcaggacagtcaatgagaacttcctctctctgcagctggatccgtccatcattcatgatggctggctcgatttcctaagctccaagcgcttggtgaccctggcccggggactttcgcccgcctttctgcgcttcgggggcaaaaggaccgacttcctgcagttccagaacctgaggaacccggcgaaaagccgcgggggcccgggcccggattactatctcaaaaactatgaggatgacattgttcgaagtgatgttgccttagataaacagaaaggctgcaagattgcccagcaccctgatgttatgctggagctccaaagggagaaggcagctcagatgcatctggttcttctaaaggagcaattctccaatacttacagtaatctcatattaacagccaggtctctagacaaactttataactttgctgattgctctggactccacctgatatttgctctaaatgcactgcgtcgtaatcccaataactcctggaacagttctagtgccctgagtctgttgaagtacagcgccagcaaaaagtacaacatttcttgggaactgggtaatgagccaaataactatcggaccatgcatggccgggcagtaaatggcagccagttgggaaaggattacatccagctgaagagcctgttgcagcccatccggatttattccagagccagcttatatggccctaatattgggcggccgaggaagaatgtcatcgccctcctagatggattcatgaaggtggcaggaagtacagtagatgcagttacctggcaacattgctacattgatggccgggtggtcaaggtgatggacttcctgaaaactcgcctgttagacacactctctgaccagattaggaaaattcagaaagtggttaatacatacactccaggaaagaagatttggcttgaaggtgtggtgaccacctcagctggaggcacaaacaatctatccgattcctatgctgcaggattcttatggttgaacactttaggaatgctggccaatcagggcattgatgtcgtgatacggcactcattttttgaccatggatacaatcacctcgtggaccagaattttaacccattaccagactactggctctctctcctctacaagcgcctgatcggccccaaagtcttggctgtgcatgtggctgggctccagcggaagccacggcctggccgagtgatccgggacaaactaaggatttatgctcactgcacaaaccaccacaaccacaactacgttcgtgggtccattacactttttatcatcaacttgcatcgatcaagaaagaaaatcaagctggctgggactctcagagacaagctggttcaccagtacctgctgcagccctatgggcaggagggcctaaagtccaaaacccaaagatgtcaatactgtgggatcatctgaatctaaaagggcattacctaattcttcagaagaaaggtcagtgcaactgaatggccagcccttagtgatggtggacgacgggaccctcccagaattgaagccccgcccccttcgggccggccggacattggtcatccctccagtcaccatgggcttttatgtggtcaagaatgtcaatgctttggcctgccgctaccgataagctatcctcacactcacggctaccagtgggcctgctgggctgcttccactcctccactccagtagtatcctctgttttcagacatcctagcaaccagcccctgctgccccatcctgctggaatcaacacagacttgctctccaaagagactaaatgtcatagcgtgatcttagcctaggtaggccacatccatcccaaaggaaaatgtagacatcacctgtacctatataaggataaaggcatgtgtatagagcagaatgtttcccttcatgtgcactatgaaaacgagctgacagcacactcccaggagaaatgtttccagacaactccccatgatcctgtcacacagcattataaccacaaatccaaaccttagcctgctgctgctgctgccctcagaggaagatgaggaaggaaaaaaactgggtggacctacaaaaacccatcctctcccaactccttcttctctgcctctttcttgctgctgccctgagttttttgacacatctctttccataggggagtaatgggtgtgtcagccctggcctgctgggagagctgtttgtatgatttcccggctgatgtatgagcgtgcgcatctgggttcctgacagtggcatccatcactggcagttcttctgggaagcgggtgcttcaaaagtaaaattacaatcacactccagatttggtaagaaggttctattcctctgtgaatccagattcccccagagttgtaatgggagtcaagtaacaatattcattgagtggagagcagtttattaggcacaacaaaaagtagtcatcattcttcatgttgctatgagggagagtttgagtacaaagagaaagcatactgaaacatcaggtacacacacacaccccaactggacaaagcaaattagacctctccaaaattaagagaatattaggggctctatagggtaagcccttaattgtttggttaactcaaatcattatttttaaa

SEQ ID NO: 7262 - protein, 548 aa, Homo sapiens
MRVLCAFPEAMPSSNSRPPACLAPGALYLALLLHLSLSSQAGDRRPLPVDRAAGLKEKTLILLDVSTKNPVRTVNENFLSLQLDPSIIHDGWLDFLSSKRLVTLARGLSPAFLRFGGKRTDFLQFQNLRNPAKSRGGPGPDYYLKNYEDDIVRSDVALDKQKGCKIAQHPDVMLELQREKAAQMHLVLLKEQFSNTYSNLILTARSLDKLYNFADCSGLHLIFALNALRRNPNNSWNSSSALSLLKYSASKKYNISWELGNEPNNYRTMHGRAVNGSQLGKDYIQLKSLLQPIRIYSRASLYGPNIGRPRKNVIALLDGFMKVAGSTVDAVTWQHCYIDGRVVKVMDFLKTRLLDTLSDQIRKIQKVVNTYTPGKKIWLEGVVTTSAGGTNNLSDSYAAGFLWLNTLGMLANQGIDVVIRHSFFDHGYNHLVDQNFNPLPDYWLSLLYKRLIGPKVLAVHVAGLQRKPRPGRVIRDKLRIYAHCTNHHNHNYVRGSITLFIINLHRSRKKIKLAGTLRDKLVHQYLLQPYGQEGLKSKTQRCQYCGII

SEQ ID NO: 7263 - DNA, 557 bp, Homo sapiens
ctctagccccggccaggtcgccctcagggagtaggaagagggcccttctccgtgccccacgcgctctcgtcctgtcctgggaacctttcctctcttattctcttcctctgcagctccaagcgcttggtgaccctggcccggggactttcgcccgcctttctgcgcttcgggggcaaaaggaccgacttcctgcagttccagaacctgaggaacccggcgaaaagccgcgggggcccgggcccggattactatctcaaaaactatgaggatgacattgttcgaagtgatgttgccttagataaacagaaaggctgcaagattgcccagcaccctgatgttatgctggagctccaaagggagaaggcagctcagatgcatctggttcttctaaaggagcaattctccaatacttacagtaatctcatattaacaggaatttgtatggagctgggcttcattagactcttttaaatgtacaaaaatgccaaccacactttgcagacatgatgttttcaggcactattcatgaaggtggcaggaagtacagtagatgcagt

SEQ ID NO: 7264 - protein, 43 aa, Homo sapiens
MLELQREKAAQMHLVLLKEQFSNTYSNLILTGICMELGFIRLF

SEQ ID NO: 7265 - DNA, 580 bp, Homo sapiens
acagagcctctagccccggccaggtcgccctcagggagtaggaagagggcccttctccgtgccccacgcgctctcgtcctgtcctgggaacctttcctctcttattctcttcctctgcagctccaagcgcttggtgaccctggcccggggactttcgcccgcctttctgcgcttcgggggcaaaaggaccgacttcctgcagttccagaacctgaggaacccggcgaaaagccgcgggggcccgggcccggattactatctcaaaaactatgaggatgacattgttcgaagtgatgttgccttagataaacagaaaggctgcaagattgcccagcaccctgatgttatgctggagctccaaagggagaaggcagctcagatgcatctggttcttctaaaggagcaattctccaatacttacagtaatctcatattaacagccaggtctctagacaaactttataactttgctgattgctctggactccacctgatatttgctctaaatgcactgcgtcgtaatcccaataactcctggaacagttctagtgccctgagtctgttgaagtacagcgccagc

SEQ ID NO: 7266 - protein, 77 aa, Homo sapiens
MLELQREKAAQMHLVLLKEQFSNTYSNLILTARSLDKLYNFADCSGLHLIFALNALRRNPNNSWNSSSALSLLKYSA

SEQ ID NO: 7267 - DNA, 574 bp, Homo sapiens
aaggacaattagtcactagcgagacccagtaggaagagaggtttaaatcagagggattgaatgagggtgctttgtgccttccctgaagccatgccctccagcaactcccgcccccccgcgtgcctagccccgggggctctctacttggctctgttgctccatctctccctttcctcccaggctggagacaggagacccttgcctgtagacagagctgcaggtttgaaggaaaagaccctgattctacttgatgtgagcaccaagaacccagtcaggacagtcaatgagaacttcctctctctgcagctggatccgtccatcattcatgatggctggctcgatttcctaagctccaagcgcttggtgaccctggcccggggactttcgcccgcctttctgcgcttcgggggcaaaaggaccgacttcctgcagttccagaacctgaggaacccggcgaaaagccgcgggggcccgggcccggattactatctcaaaaactatgaggatgccaggtctctagacaaactttataactttgctgattgctctggactccacctgatatttgctctaa

SEQ ID NO: 7268 - protein, 170 aa, Homo sapiens
MRVLCAFPEAMPSSNSRPPACLAPGALYLALLLHLSLSSQAGDRRPLPVDRAAGLKEKTLILLDVSTKNPVRTVNENFLSLQLDPSIIHDGWLDFLSSKRLVTLARGLSPAFLRFGGKRTDFLQFQNLRNPAKSRGGPGPDYYLKNYEDARSLDKLYNFADCSGLHLIFA

SEQ ID NO: 7269 - DNA, 3297 bp, Homo sapiens
gcgccgagcgcgggtttccgctcggggcgggcgatagagacagcgcgtcgcgcctttagcttctttcccagactccggcccagctcctgcgatctccacagcagcctctgaggccgcccccagagagcatcaggatggctgaggaaaagggtggaaagcaagtcctggaagaatctgcatttgaagaaatggaaagagattttcagggagttctccatgaactttctggagacaaaagtttggaaaaatttcggattgaatatgagaggcttcatgctgtcatgaaaaagtcttatgacaatgaaaagcgtctgatggccaaatgcagagagctaaatgcagagattgtagtgaattctgcgaaggtcgccactgcccttaagctctctcaggatgatcagaccaccattgcatccctaaagaaggaaattgaaaaggcctggaagatggtggactcagcctatgacaaagagcagaaggccaaggagacgattcttgctctgaaagaggaaatagtgaacctgaccaaactagtggagcaggggtctggactgtcaatggaccagcatagcaacatccgagatttactgaggttcaaagaagaagtgacaaaggagagagaccagctcttatcagaagtggtaaaattacgagaatccctagctcagaccactgaacagcagcaggaaacagagcgatcaaaagaggaggctgaacatgccatcagtcagttccaacaagaaatccagcaacgtcagaacgaagcttcccgggagttccggaagaaggaaaaactagagaaagagctcaagcagattcaggcagacatggacagcaggcagacagaaataaaagccctgcagcagtatgtgcagaagagcaaggaggagcttcagaagctggagcagcagctgaaggagcagaagatattgaatgagagagctgcaaaggaactcgagcaatttcagatgagaaatgctaaacttcagcaagagaatgaacagcacagtttggtctgtgagcagctatcccaggaaaaccaacagaaggcgttggagctcaaagccaaagaggaagaagtccatcaaatgcgccttgacatcgggaagctcaacaaaatcagagaacaaattcataagaaattgcaccacaccgaagatcaaaaggcagaagtcgaacagcacaaagaaaccctaaaaaatcagattgtgggattagagagagaggtagaggcttcaaagaaacaagcagaacttgacagaaaggcaatggacgagcttctaagagaaagggacatactaaataagaacatgcttaaggcggtcaatgcgacccagaagcagacagacttggtaaagctccatgaacaagccaagaggaacctggagggagaaatccagaactacaaggatgaggctcagaagcagagaaagatcatctttcatctggaaaaggagcgtgaccggtacatcaaccaagccagtgaccttacgcaaaaggtccttatgaacatggaagacataaaagttcgtgaaacacagatttttgactacaggaaaaaaatagctgaatcagagattaaattaaaacagcaacagaacctatatgaagctgtgagatcagacagaaatctgtatagcaaaaatctggttgaggctcaggatgaaataacagatatgaagagaaagttaaagattatgatccatcaggtagatgagctgaaagaagacatctctgccaaagagtccgcacttgtgaagctgcacctggaacagcagcgaatagaaaaggaaaaggaaacattgaaggctgagctgcagaagctgagacaacaagccctggagacaaaacactttattgaaaagcaagaagctgaagagagaaaactcctgcgaataattgctgaggctgacggggagaggttgagacagaagaaggaattagaccaggtcatcagtgagagagatatcctggggtctcagcttgttcggcgcaatgatgagttagctttgctctatgagaagatcaagatccaacagtctgtgctgaataaaggggagagccagtacaaccagaggttggaggacatgagaatcctcagacttgagatcaagaagcttcgccgggaaaaggggattcttgccaggagtatggctaatgttgaagaactcagacaggagttttttcacatgcaaagagaattgttgaaggagaggacacgctgccgagccctggaggaggagctggagaatcccctgaatgtgcacagatggaggaagctcgaggccagcgaccccaatgcatatgagctgatacagaaaattcacaccctgcagaagcgtctcatcagcaagactgaagaggtggttgaaaaagagctgctcctccaggaaaaggagaaactctacatggaactaaagcacgtcttggcccgccagcctggacctgaggctgcggaacagctgaagctgtaccgacgcacgctgcatgacaagaagcagcagctgaaagttttgtcttcagaattgaatatgtatgaagtacagagcaaagaatataaatatgaggtagagaaacttaccaatgagctccagaatttaaagaagaaatacctcgctcagaaacgtaaagaacaacttcaaaaaaacaaggacacagcacccatggataacaccttcttaatggtcaaaccaaatggtcctggttttactgggggcggatttcctctcaggtcaaccaaaatgacgttctaacctgaagctgctggctgtttccagttgaacaactcatgaaatctgctctgggacattttgggggaatctcaaagtccttggatcatagaactgagtgctgagaatccaggatggaaagaaatgcagaactatcatagtcacatacatataagagggatggtgttttgtctggttcacgttgatattaacagatcataattctctctgttcagttaggctgacctattgcatgaagcaaatcttttgttgctaccccattgattgaaatgtactagaccttaatttctttattacagacattggtgtacttgaaggttttatatttaaaagtatttttgaaatgcaatgtgtcccctctcaccttattaacaataatctattttaattattcctcattaacaagtcattgcatgagatgagaaagaaggacaaactcttaagaatttaaaaagtgttttgagaatgatttctatatggaatttcttttcaggcccggaatgggaaaatctattccaaagagacacactaataaatacttcattat

SEQ ID NO: 7270 - protein, 872 aa, Homo sapiens; identical to SEQ ID NO: 803

SEQ ID NO: 7271 - DNA, 3330 bp, Homo sapiens
gcgccgagcgcgggtttccgctcggggcgggcgatagagacagcgcgtcgcgcctttagcttctttcccagactccggcccagctcctgcgatctccacagcagcctctgaggccgcccccagagagcatcaggatggctgaggaaaagggtggaaagcaagtcctggaagaatctgcatttgaagaaatggaaagagattttcagggagttctccatgaactttctggagacaaaagtttggaaaaatttcggattgaatatgagaggcttcatgctgtcatgaaaaagtcttatgacaatgaaaagcgtctgatggccaaatgcagagagctaaatgcagagattgtagtgaattctgcgaaggtcgccactgcccttaagctctctcaggatgatcagaccaccattgcatccctaaagaaggaaattgaaaaggcctggaagatggtggactcagcctatgacaaagagcagaaggccaaggagacgattcttgctctgaaagaggaaatagtgaacctgaccaaactagtggagcaggggtctggactgtcaatggaccagcatagcaacatccgagatttactgaggttcaaagaagaagtgacaaaggagagagaccagctcttatcagaagtggtaaaattacgagaatccctagctcagaccactgaacagcagcaggaaacagagcgatcaaaagaggaggctgaacatgccatcagtcagttccaacaagaaatccagcaacgtcagaacgaagcttcccgggagttccggaagaaggaaaaactagagaaagagctcaagcagattcaggcagacatggacagcaggcagacagaaataaaagccctgcagcagtatgtgcagaagagcaaggaggagcttcagaagctggagcagcagctgaaggagcagaagatattgaatgagagagctgcaaaggaactcgagcaatttcagatgagaaatgctaaacttcagcaagagaatgaacagcacagtttggtctgtgagcagctatcccaggaaaaccaacagaaggcgttggagctcaaagccaaagaggaagaagtccatcaaatgcgccttgacatcgggaagctcaacaaaatcagagaacaaattcataagaaattgcaccacaccgaagatcaaaaggcagaagtcgaacagcacaaagaaaccctaaaaaatcagattgtgggattagagagagaggtagaggcttcaaagaaacaagcagaacttgacagaaaggcaatggacgagcttctaagagaaagggacatactaaataagaacatgcttaaggcggtcaatgcgacccagaagcagacagacttggtaaagctccatgaacaagccaagaggaacctggagggagaaatccagaactacaaggatgaggctcagaagcagagaaagatcatctttcatctggaaaaggagcgtgaccggtacatcaaccaagccagtgaccttacgcaaaaggtccttatgaacatggaagacataaaagttcgtgaaacacagatttttgactacaggaaaaaaatagctgaatcagagattaaattaaaacagcaacagaacctatatgaagctgtgagatcagacagaaatctgtatagcaaaaatctggttgaggctcaggatgaaataacagatatgaagagaaagttaaagattatgatccatcaggtagatgagctgaaagaagacatctctgccaaagagtccgcacttgtgaagctgcacctggaacagcagcgaatagaaaaggaaaaggaaacattgaaggctgagctgcagaagctgagacaacaagccctggagacaaaacactttattgaaaagcaagaagctgaagagagaaaactcctgcgaataattgctgaggctgacggggagaggttgagacagaagaaggaattagaccaggtcatcagtgagagagatatcctggggtctcagcttgttcggcgcaatgatgagttagctttgctctatgagaagatcaagatccaacagtctgtgctgaataaaggggagagccagtacaaccagaggttggaggacatgagaatcctcagacttgagatcaagaagcttcgccgggaaaaggggattcttgccaggagtatggctaatgttgaagaactcagacaggagttttttcacatgcaaagagaattgttgaaggagaggacacgctgccgagccctggaggaggagctggagaatcccctgaatgtgcacagatggaggaagctcgaggccagcgaccccaatgcatatgagctgatacagaaaattcacaccctgcagaagcgtctcatcagcaagactgaagaggtggttgaaaaagagctgctcctccaggaaaaggagaaactctacatggaactaaagcacgtcttggcccgccagcctggacctgaggctgcggaacagctgaagctgtaccgacgcacgctgcatgacaagaagcagcagctgaaagttttgtcttcagaattgaatatgtatgaagtacagagcaaagaatataaatatgaggtagagaaacttaccaatgagctccagaatttaaagaagaaatacctcgctcagaaacgtaaagaacaacttcaaaaaaacaaggacacagcacccatggataacaccttcttaatggtcaaaccaaatggtcctggttttactgggggcggatttcctctcaggtcaaccaaaatgacgttctaacctgaagctgctggctgtttccagttgaacaactcatgaaatctgctctgggacattttgggggaatctcaaagtccttggatcatagaactgagtgctgagaatccaggatggaaagaaatgcagaactatcatagtcacatacatataagagggatggtgttttgtctggttcacgttgatattaacagatcataattctctctgttcagttaggctgacctattgcatgaagcaaatcttttgttgctaccccattgattgaaatgtactagaccttaatttctttattacagacattggtgtacttgaaggttttatatttaaaagtatttttgaaatgcaatgtgtcccctctcaccttattaacaataatctattttaattattcctcattaacaagtcattgcatgagatgagaaagaaggacaaactcttaagaatttaaaaagtgttttgagaatgatttctatatggaatttcttttcaggcccggaatgggaaaatctattccaaagagacacactaataaatacttcattataaaaaataaaaaagaatctttgtagagattttg

SEQ ID NO: 7272 - protein, 872 aa, Homo sapiens; identical to SEQ ID NO: 803

SEQ ID NO: 7273 - DNA, 1011 bp, Homo sapiens
ggttgccaaatggtgttttgggctcttcttttcccaagaagagactagcccattgtcaccaatgcagagctggaagctgaaattgttaaggcagaatgaaagggagaaaagcacgtcctgagcaccaagaagaagataactcgaagttaagaagacgtgatggtactttggagaagaaagcaacacctgagtcaaattgcactgagcaacgttctttgttgttgtgagatattgataaatctccaggtcttcaacaaggggagtcgagaataggaaactcatttcaaatcatatctcaggtgacaagaaggttaccatatttgaggcagcctgttgggttgcctgacggcgaaaatctacagaacattctgccttacattgctggagactgtctcctacaacttgagtctttgatactggtgtcactttcaggagctctaagaatacgtcaactctcgcttctgagttggtgacccctcaaccaagaaaggacggtgatctcattcctctcagcaggagtgttgagctcagacaactatgaaaaccaaaaatcatcccaggtaggttataagggattgaagagaaccagagagtggctcattcataggaagaagctgtgatttggcaccatgtgagcgtcgtcagagataaatgaagatccaacactgccagagctttcaaatctccaagagaagcattcaacctgaattggtatgtgaaatgtctcagtttttaaaagttgacaaccaaatcagaaaataattttaaacaccatgtaggcccaatgaaacacatctccaagccagatccaaatcacagaattccaatcacaggttgaaatccacttctctaaaatcttttcgtctctgaccgggcatggtggcacacgtctgtagtcccagctactcaggaggccaaggtaggagaattgcttgagccctggagttcgacgctagcctgggcaacacagcacgactcagtctctaaaagtaaaaataaaatattttctcc

SEQ ID NO: 7274 - protein, 43 aa, Homo sapiens
MKGRKARPEHQEEDNSKLRRRDGTLEKKATPESNCTEQRSLLL

SEQ ID NO: 7275 - DNA, 7344 bp, Homo sapiens
atgtgggaccagtgtgggaaggtcttgtttatgtgggaggggggaccacagataacaaagaacagccccttgcccccctcattgaaaaccagctgtgcatctagacctctgtcttcccacagtgccgccaagctcctggacaagaacccattctcggtcagtaacccgaaccctctgcttccttcacctgccagtctccagctggctcaactgcaggcccagctcaccctccaccggctgaagctggcacagacagctgtcaccaacaacactgcagccgccacagtcctgaaccaagtcctctccaaagtggccatgtcccagcctctcttcaatcaactgaggcatccgtctgtgatcactggcccccacggccatgctggggttccccaacatgctgcagccatacccagtacccggtttccctctaatgcaattgccttttcaccccccagccagacacgaggccccggaccctccatgaaccttcccaaccagccacccagtgccatggtgatgcatcctttcactggggtaatgcctcagacccctggccagccagcagtcatcttgggcattggcaagactgggcctgctccagctacagcaggattctatgagtatggcaaagccagctctggccagacatatggccctgaaacagatggtcagcctggcttcctgccatcctcggcctcaacctcgggcagtgtgacctatgaagggcactacagccacacagggcaggatggtcaagctgccttttccaaagatttttacggacccaactcccaaggttcacatgtggccagcggatttccagctgagcaggctgggggcctgaaaagtgaggtcgggccactgctgcagggcacaaacagccaatgggagagcccccatggattctcgggccaaagcaagcctgatctcacagcaggtcccatgtggcctccaccccacaaccagccctatgagctgtacgaccccgaggaaccaacctcagacaggacacctccttccttcgggggtcggcttaacaacagcaaacagggttttatcggtgctgggcggagggccaaggaggaccaggcgttgctatctgtgcggcccctgcaggctcatgagctgaacgactttcacggtgtggcccccctccacttgccgcatatctgtagcatctgtgacaagaaggtgtttgatttgaaggactgggagctgcatgtgaaagggaagctgcacgctcagaaatgcctggtcttctctgaaaagagccggtttccctttctcgccctctccagtgctggcatccggtgtatacttggttcggcagagggaacattgtgtgcttctcccaacagcacagctgtttataaccctgctgggaatgaaggtgagcaaggccctacaggtcagcagcttgaagcagaagtgggctacccacaggcacattatgtcctgtctttaataaccaggacttccctgatgtccccttctcacggatgtagaaagcaaacagatcccaagacactaaaatgcattgggcctgctgtctgggcccatcagtattctctgagatacttgagacgtaaagctttgctgattatcagcatgtccagagtttccagggatgttgaagctgctaaacaggtgaatcgtccaagatccgtaggcaatcctatggatttaccagtaaaatttgcacagcggaaaggggctggccgtgtggtgcacatctgcaatctccctgaaggaagctgcactgagaatgacgtcattaacctggggctgccctttggaaaggtcactaattacatcctcatgaagtcgactaatcaggcctttttagagatggcttacacagaagctgcacaggccatggtccagtattatcaagaaaaatctgctgtgatcaatggtgagaagttgctcattcggatgtccaagagatacaaggaattgcagctcaagaaacccgggaaggccgtggctgccatcatccaggacatccattcccagagggagagggacatgttccgggaagcagacagatatggcccagaaaggccgcggtctcgtagtccggtgagccggtcactctccccgaggtcccacactcccagcttcacctcctgcagctcttcccacagccctccgggcccctcccgggctgactggggcaatggccgggactcctgggagcactctccctatgccaggagggaggaagagcgagacccggctccctggagggacaacggagatgacaagagggacaggatggacccctgggcacatgatcgcaaacaccacccccggcaactggacaaggctgagttggacgagcgaccagaaggagggaggccccaccgggagaagtacccgagatctgggtctcccaacctgccccactctgtgtccagctacaaaagccgtgaagacggctactaccggaaagagcccaaagccaagtgggacaagtatctgaagcagcagcaggatgcccccgggaggtccaggaggaaagacgaggccaggctgcgggaaagcagacacccccatccggatgactcaggcaaggaagatgggctggggccaaaggtcactagggcccctgagggcgccaaggccaagcagaatgagaaaaataaaaccaagagaactgatagagaccaagaaggagctgatgatagaaaagaaaacacaatggcagagaatgaggctggaaaagaggaacaggagggcatggaagaaagccctcaatcagtgggcagacaggagaaagaagcagagttctctgatccggaaaacacaaggacaaagaaggaacaagattgggagagtgaaagtgaggcagagggggagagctggtatcccactaacatggaggagctggtgacagtggacgaggttggggaagaagaagattttatcgtggaaccagacatcccagagctggaagaaattgtgcccattgaccagaaagacaaaatttgcccagaaacatgtctgtgtgtgacaaccaccttagacttagacctggcccaggatttccccaaggaaggagtcaaggccgtagggaatggggctgcagaaatcagcctcaagtcacccagagaactgccctctgcttccacaagctgtcccagtgacatggacgtggaaatgcctggcctaaatctggatgctgagcggaagccagctgaaagtgagacaggcctctccctggaggattcagattgctacgagaaggaggcaaagggagtggagagctcagatgttcatccagcccctacagtccagcaaatgtcttcccctaagccagcagaggagagggcccggcagccaagcccatttgtggatgattgcaagaccagggggacccccgaagatggggcttgtgaaggcagccccctggaggagaaagccagcccccccatcgaaactgacctccaaaaccaagcttgccaagaagtgttgaccccggaaaactccaggtacgtggaaatgaaatctctggaggtgaggtcaccagagtacactgaagtggaactgaaacagcccctttctttgccctcttgggaaccagaggatgtgttcagtgaacttagcattcctctaggggtggagttcgtggttcccaggactggcttttattgcaagctgtgtgggctgttctacacgagcgaggagacagcaaagatgagccactgccgcagcgctgtccactacaggaacttacagaaatatttgtcccagctggccgaggagggcctcaaggagaccgagggggcagatagcccgaggccagaggacagcggaatcgtgccacgcttcgaaaggaaaaagctctgatgcttctgcttctgctgctactgctgctgctgcaaggttggaaaggagagcttgctgaagtggggccttcctgattctggggacaggactaaagcctgagaggaaggaaaaccaagcagggcacattgcttgggcttgttcccagagactcagtgaaatgcccctgatatgtctccaggagcaagtcacccaggtgtgtccagcccactgagggtcaccaactctctccctgctgactcttgtttctctcaatctttcaattcgtttttctctcttttcctcttgttctttctctccctccctccttatgtgccaaggatcgtttccttttcacaaaacccaacttctcagggattttcacagtgtttaaattcttggtaggatataacaggtcaggcctagctgagtcaggcaaggaaaaggtttaatggaaactcctgggtcaggcgaacccctgcagtgagtctacagcagtatctctgcctggtgtcccatgtatcccctgcatgaggagctgagtcaggtctgcagtcctggtgaggggacatcacggacaatctgttggcagagctgggagggtcttcattaacctcttcctccaactgggccacccttttgaaaagcccctgtttttaataactgtttcatcctctcagttattctagaaatctgccagacttatgccttaaagtaaaattaaatgaattttagagaagatgaaaagagcccttcattttggaagctctgataagtttcctccaaacttattcccctcctcttgatttcaggagatgtcagggtttttctattctggacaatgaatttggtacagagtcactgtaattaaatataaaaacagaagcatcttcctccagctaaagcagcagttggcgcgggcttaggttgaatgctggcctctctgcaaagcacagctttggctcgagaggcacagctccaggctgtggaaaacagagttgtcttgggggttaaatgagcttatttaagtcaaggaaacatcatctgtccttgattcagccttggtgcctgcactctggggtacaaccacctcacagtaggatggtttttaaatggccccccagttgggggagaagctaaggaaagagaaggctgcagatccaaagagtggcattgaagtttgctgggtgtctgtaggtggaccctttccagctgggcagatagttgagggctccctgggtttgactgtatgtgcagactttgataccaaaatgttatgaaaagtcgtgattcccgctgctctttctggtactggagggtgggtaccttcaggctgtggggtctctagcctgatattccattgaaagggtgtgggataaaggtgctgggggaaatgaggctctgccacagccatagagaggccctcgggcagttaagaagggagcctggagctgttttcatgagcagagatactctcctgaaagcacccttcatagcttagcccaggaaaaataaaacaaggaagacaggtcactctcccctaggcagttcctgttgtttctgttcctgaccttgggcaggcagactgagaagggactgtgtagggttttgttttgttttttttcattttcctttttatggcatgtgagagcatactgtacattctgtcctctgtactaatggaggaagggcagagagattagttcaaggctaacattttatatcaggtaactgaggcacacaaagggaacaaatgaagaacataaaatgatcagtgtaaacctgaaagcacgcagtcattggcaagggacaggctcatgggagctggtgagagagagcagttaaggcaagcaccaggggaaagcagaccaacttgaacagatgtgatgcggagaggttggaagaagcaagaaacctgaactcatcatcaggctattaaataaaatttataggaggctgttggtttggactgagctcctgcaataggcccaacagaccaaaacaaaagggagtcactcatgttgaagttctgtcttccaggaaatcaggagagagagagagagaaagaatagccaaatccccaaacaggccagttttaaccagcatgatgaagtgtccttggttttaacctttataaggaaagcagctttgagatgaccagtctggtttttgttctttgtgtctgctttcctcagcccttttctgtctataaagccaacctcctccgctcagctcatgggaacactcattctattttatagaatgacatgttgcccaattctagaatcaaaaataaaggccaactaagatcttcaaagtaaatttgttgtaattttatcttttgagaagaccatatgggggctgctgaaaagttggtatctcaaataaagtctgaagatcacggctcagcccagattgttcccctggccaactccacaggtttgaacctggcattctggacaccagctatgcctcctccatttctcagaaaacctttgatcttgtgtgtctttcttcctactgaagggaattgtgggggcagttctttggccttcttgctgaactttgctggaaatagcccacaatttttatcagaggttagaactgtacattatcagagagactggacactttatcccctagcaaagtgggagaagattttaccagctcattccactccaccctggccttcccccaccccccatccccagcagcatttccatggaaatccagatggtcgtgtagtgttatggctctcttgtgatagactggccttcatattggagagctagggagagcccctgggagggagagagataaggcgctatctgccttcaatcagaaccttcggtttaaaatcatctaagagtctatacttgtgtgtacatacgtatttatttttatttatttttatacaattccattggcatggtccttcaccgaccctatgatttgcactttttatttctatgtgtgccacacacaatgcagtattaatggcaaccaggtaaatattgatttattttttaaagcttttcttcagtgttttgtcaaccatttcaaagtgtctcccaaaaaaggatgctgaagagcaattgctcccttaagcaacagattcatatttaccctgggttaatacaacaaaaggcctgtataattgtcttttcattgttaacacccaaaatagcatctatctagacagtatccccaaagaatttggaaaatctgatggtgtgagcagcagccgttagtatcagggtttcccattcttggacagtccgaggctgtgacctgttagataattagattatacttgaactggaccagagtttgttttttgaatttatgagaaaaaccaaaacactaagttaagtttgaacttgtaaagtattgaaatttgttgagtgtcctataaattgtcactacttttcctgatctgtataactgactgcaaagtgtttgtttttacaaaagagaaaagaaaagatttttaataaagagaatttgaaagctgtg

SEQ ID NO: 7276 - protein, 1283 aa, Homo sapiens
MWDQCGKVLFMWEGGPQITKNSPLPPSLKTSCASRPLSSHSAAKLLDKNPFSVSNPNPLLPSPASLQLAQLQAQLTLHRLKLAQTAVTNNTAAATVLNQVLSKVAMSQPLFNQLRHPSVITGPHGHAGVPQHAAAIPSTRFPSNAIAFSPPSQTRGPGPSMNLPNQPPSAMVMHPFTGVMPQTPGQPAVILGIGKTGPAPATAGFYEYGKASSGQTYGPETDGQPGFLPSSASTSGSVTYEGHYSHTGQDGQAAFSKDFYGPNSQGSHVASGFPAEQAGGLKSEVGPLLQGTNSQWESPHGFSGQSKPDLTAGPMWPPPHNQPYELYDPEEPTSDRTPPSFGGRLNNSKQGFIGAGRRAKEDQALLSVRPLQAHELNDFHGVAPLHLPHICSICDKKVFDLKDWELHVKGKLHAQKCLVFSEKSRFPFLALSSAGIRCILGSAEGTLCASPNSTAVYNPAGNEGEQGPTGQQLEAEVGYPQAHYVLSLITRTSLMSPSHGCRKQTDPKTLKCIGPAVWAHQYSLRYLRRKALLIISMSRVSRDVEAAKQVNRPRSVGNPMDLPVKFAQRKGAGRVVHICNLPEGSCTENDVINLGLPFGKVTNYILMKSTNQAFLEMAYTEAAQAMVQYYQEKSAVINGEKLLIRMSKRYKELQLKKPGKAVAAIIQDIHSQRERDMFREADRYGPERPRSRSPVSRSLSPRSHTPSFTSCSSSHSPPGPSRADWGNGRDSWEHSPYARREEERDPAPWRDNGDDKRDRMDPWAHDRKHHPRQLDKAELDERPEGGRPHREKYPRSGSPNLPHSVSSYKSREDGYYRKEPKAKWDKYLKQQQDAPGRSRRKDEARLRESRHPHPDDSGKEDGLGPKVTRAPEGAKAKQNEKNKTKRTDRDQEGADDRKENTMAENEAGKEEQEGMEESPQSVGRQEKEAEFSDPENTRTKKEQDWESESEAEGESWYPTNMEELVTVDEVGEEEDFIVEPDIPELEEIVPIDQKDKICPETCLCVTTTLDLDLAQDFPKEGVKAVGNGAAEISLKSPRELPSASTSCPSDMDVEMPGLNLDAERKPAESETGLSLEDSDCYEKEAKGVESSDVHPAPTVQQMSSPKPAEERARQPSPFVDDCKTRGTPEDGACEGSPLEEKASPPIETDLQNQACQEVLTPENSRYVEMKSLEVRSPEYTEVELKQPLSLPSWEPEDVFSELSIPLGVEFVVPRTGFYCKLCGLFYTSEETAKMSHCRSAVHYRNLQKYLSQLAEEGLKETEGADSPRPEDSGIVPRFERKKL

SEQ ID NO: 7277 - DNA, 566 bp, Homo sapiens
acagtccagcaaatgtcttcccctaagccagcagaggagagggcccggcagccaagcccatttgtggatgattgcaagaccagggggacccccgaagatggggcttgtgaaggcagccccctggaggagaaagccagcccccccatcgaaactgacctccaaaaccaagcttgccaagaagtgttgaccccggaaaactccaggtacgtggaaatgaaatctctggaggtgaggtcaccagagtacactgaagtggaactgaaacagcccctttctttgccctcttgggaaccagaggatgtgttcagtgaacttagcattcctctaggggtggagttcgtggttcccaggactggcttttattgcaagctgtgtgggctgttctacacgagcgaggagacagcaaagatgagccactgccgcagcgctgtccactacaggaacttacagatggagtttcactcttgttgcccaggctggattgcaacggtgcgatctcggttcacagcaacctccgcctcccgggttcaagtgattctcctgcctcagcctcccgagtagctggg

SEQ ID NO: 7278 - protein, 182 aa, Homo sapiens
MSSPKPAEERARQPSPFVDDCKTRGTPEDGACEGSPLEEKASPPIETDLQNQACQEVLTPENSRYVEMKSLEVRSPEYTEVELKQPLSLPSWEPEDVFSELSIPLGVEFVVPRTGFYCKLCGLFYTSEETAKMSHCRSAVHYRNLQMEFHSCCPGWIATVRSRFTATSASRVQVILLPQPPE

SEQ ID NO: 7279 - DNA, 573 bp, Homo sapiens
acctattatggctcctctcaccggggctgcataaccctttagcctgcaggactggtcactactggcatggagacttctagggaggggtggagttcgtggttcccaggactggcttttattgcaagctgtgtgggctgttctacacgagcgaggagacagcaaagatgagccactgccgcagcgctgtccactacaggaacttacagaaatatttgtcccagctggccgaggagggcctcaaggagaccgagggggcagatagcccgaggccagaggacagcggaatcgtgccacgcttcgaaaggaaaaagctctgatgcttctgcttctgctgctactgctgctgctgcaaggttggaaaggagagcttgctgaagtggggccttcctgattctggggacaggactaaagcctgagaggaaggaaaaccaagcagggcacattgcttgggcttgttcccagagactcagtgaaatgcccctgatatgtctccaggagcaagtcacccaggtgtgtccagcccactgagggtcaccaactctctccctgctgactcttgtttctctcaatctt

SEQ ID NO: 7280 - protein, 50 aa, Homo sapiens
MSHCRSAVHYRNLQKYLSQLAEEGLKETEGADSPRPEDSGIVPRFERKKL

SEQ ID NO: 7281 - DNA, 892 bp, Homo sapiens
aaaacagagttgttttgggagttaaatgagcttatttaagtcaagcagttagaacagcacttgacactagataagggctttggaagtgtttgctattatagctgtactttctactctttcttttcttttctttttttcttttttttttcttttttttttttttagatggagtttcactcttgttgcccaggctggattgcaacggtgcgatctcggttcacagcaacctccgcctcccgggttcaagtgattctcctgcctcagcctcccgagtagctgggattacaggcatgtgccaccacacccagctaattttttgtattttaattagagacggggtttctccatgttggtcaggctggtctcaactcccgacctcaggtgatccacccacctcggcctcccaagtgctgggattacaggtgtgagacaccacgctcggcctgtactttctacattttctacaggagacatgtattacttgcaagctaacataatgagaaatatttgtcccagctggccgaggagggcctcaaggagaccgagggggcagatagcccgaggccagaggacagcggaatcgtgccacgcttcgaaaggaaaaagctctgatgcttctgcttctgctgctactgctgctgctgcaaggttggaaaggagagcttgctgaagtggggccttcctgattctggggacaggactaaagcctgagaggaaggaaaaccaagcagggcacattgcttgggcttgttcccagagactcagtgaaatgcccctgatatgtctccaggagcaagtcacccaggtgtgtccagcccactgagggtcaccaactctctccctgctgactcttgtttctctcaatctttcaattcgtttttctctcttttcc

SEQ ID NO: 7282 - protein, 65 aa, Homo sapiens
MYYLQANIMRNICPSWPRRASRRPRGQIARGQRTAESCHASKGKSSDASASAATAAAARLERRAC

SEQ ID NO: 7283 - DNA, 1826 bp, Homo sapiens
ggctccgggagggggcgggcccgcgccgacacgctccaggctgggctcagaaagagggaaccaggccggatgcccgcagtccggggcgttggggagggcgcggctggacctgcggggctacaagaaggcagccggacccccgcaccgcaggcccggacctgacaggaccgcgacccccacgcctccgcccccgccccctcccatcttgcggctgcctccgaggagggatgggggagagggcgcagtcttcccgagcgtgtgagccgcgcctactgggtttcatcatgttgtccaggctggtcttgaactcctgggctcaagcaatcagcccacctctgcctcccaaagcgttgagattacaagcgtgagccaccattcctggaccctcgtagtttttctggagcctcgtgatttgatatgatcttcctgccgctgattcctcacagtgttggcttgccacacctccaggggcactgatcacattctacctggcattatttcatctgagtccctgtcctagcccttctgcccattagactgtaaccttgtttagggaaagacctgtgtcttactcatctgtgattttgttgttgttgttgttttgagacagggtcttgccctgttgcccaggctggagagcagtggtgcaatcttggctcactgcagcctcaacctgttggggtcaagccatcctcccacctcagctttccaagtagctgagactacaggcctgtgccaccacacccagctagttttttgtatttttagtagagatggggttttgccatgttgcccaggcttctcttgaactcctgagctcaagggatctgcctgcctcggcctcccaaagtgctgggattacaggcgtgagccactgtgcctgacccactcacctgtcattgtagtacttaagatgccttgttcatttattgtgcctgtgcaataaatacaccttgatttgagtttacaaagattctcagcagttggtggtcatcctcatctcctgggcgggggcctcctggtgtggccagtatctgaattagtctcataactcatgttcactttttaaaatcggagcttcccagacctcagttttgttttgttattttccattatctgcagctgtctcctttcccctctctcacctatactctactgatcagtgactgctggctcctttgttacccatccttctctttctccacattttttctcttctcatccctttcagttctggactgtttccttcttcctccctgtctttcatttagtcattcattgaatgtacttactaagcacatatagcataatcaggctgtgttgggtaggcatcccgagttctatgagataaagaaagaatgggatatgattaccaattttaagaagcatctaaaacaacctgttatgttttagcaaattgcccccaaaggacccattagggaggaaaacgttcatgtcctttttgcgtatcatctcaagcagtacccatgatggctgggatcccagaacccacctttgagaatgctgccgtatttgcgtgtggttgacaaggttgggccagacactcaggaaatagggttgtcgtcctacctcccccactaacttcctgtaagaacttcagcccctctcaggacctttttctttaccaataaaattcagaaattgggctcaatcagtaattcccaagttattttccaaagaacatgaattttgtggaactttaatagatatcatgcaaaaaaaaatgtgggagggattgttccatggtcaaatggtcttggaaataactcgtttaaacaaaaataaaactgtttctttacccacaa

SEQ ID NO: 7284 - protein, 46 aa, Homo sapiens
MGERAQSSRACEPRLLGFIMLSRLVLNSWAQAISPPLPPKALRLQA

SEQ ID NO: 7285 - DNA, 395 bp, Homo sapiens
cattctcctcacagggcgttctgcaaactcggctgaagcaaaggttttgagcttcctgatggtccctgcctccatttctagaaactgcttaggcgaacactccaagtgatcagcctgtccgattcctcctccctctggccgctgctttctctgtggcttccagtttctggagatcccatgctaagaagtttctctcagcgaatcccctcaaacctttgagatggaaataattcccatttcacagatataaagcaggctccaaaactctttgaagttcctttgctaatcatgactagccaagccttgtgcctgacccactcacctgtcattgtagtacttaagatgccttgttcatttattgtgcctgtgcaataaatacaccttgatttgagttt

SEQ ID NO: 7286 - protein, 45 aa, Homo sapiens
ANTPSDQPVRFLLPLAAAFSVASSFWRSHAKKFLSANPLKPLRWK

SEQ ID NO: 7287 - DNA, 723 bp, Homo sapiens
cctcctcagctccggctccgccgccacgattggccagccgaccacccggcctcggccaataagcgccgccctctcgcccccgtgttactgggtagaagaaaacaaaaacaaacagagcgagaagggccagagactctccgaggcggcggcagagacagaagagcggggtcggggccggctgaccaggaacctgggcgagcagcggcgggggcccgagggattctgaaggaagatttccattaggtaatttgtttaatcagtgcaagcgaaattaagggaaaatggatgtagaaaatgagcagatactgaatgtaaaccctgcagatcctgataacttaagtgactctctcttttccggtgatgaagaaaatgctgggactgaggaaataaagaatgaaataaatggaaattggatttcagcatcctccattaacgaagctagaattaatgccaaggcaaaaaggcgactaaggaaaaactcatcccgggactctggcagaggcgattcggtcagcgacagtgggagtgacgcccttagaagtggattaactgtgccaaccagtccaaagggaaggttgctggataggcgatccagatctgggaaaggaaggggactaccaaagaaaggtggtgcaggaggcaaaggtgtctggggtacacctggacaggtgtatgatgtggaggaggtggatgtgaaagatcctaactatgatgatgaccagg

SEQ ID NO: 7288 - protein, 146 aa, Homo sapiens
MDVENEQILNVNPADPDNLSDSLFSGDEENAGTEEIKNEINGNWISASSINEARINAKAKRRLRKNSSRDSGRGDSVSDSGSDALRSGLTVPTSPKGRLLDRRSRSGKGRGLPKKGGAGGKGVWGTPGQVYDVEEVDVKDPNYDDD

SEQ ID NO: 7289 - DNA, 869 bp, Homo sapiens
cctcctcagctccggctccgccgccacgattggccagccgaccacccggcctcggccaataagcgccgccctctcgcccccgtgttactgggtagaagaaaacaaaaacaaacagagcgagaagggccagagactctccgaggcggcggcagagacagaagagcggggtcggggccggctgaccaggaacctgggcgagcagcggcgggggcccgagggattctgaaggaagatttccattaggtaatttgtttaatcagtgcaagcgaaattaagggaaaatggatgtagaaaatgagcagatactgaatgtaaaccctgcagatcctgataacttaagtgactctctcttttccggtgatgaagaaaatgctgggactgaggaaataaagaatgaaataaatggaaattggatttcagcatcctccattaacgaagctagaattaatgccaaggcaaaaaggcgactaaggaaaaactcatcccgggactctggcagaggcgattcggtcagcgacagtgggagtgacgcccttagaagtggattaactgtgccaaccagtccaaagggaaggttgctggataggcgatccagatctgggaaaggaaggggactaccaaagaaaggtggtgcaggaggcaaaggtgtctggggtacacctggacaggtgtatgatgtggaggaggtggatgtgaaagatcctaactatgatgatgaccaggagaactgtgtttatgaaactgtagttttgcctttggatgaaagggcatttgagaagactttaacaccaatcatacaggaatattttgagcatggagatactaatgaagttgcggaaatgttaagagatttaaatcttggtgaaatg

SEQ ID NO: 7290 - protein, 195 aa, Homo sapiens
MDVENEQILNVNPADPDNLSDSLFSGDEENAGTEEIKNEINGNWISASSINEARINAKAKRRLRKNSSRDSGRGDSVSDSGSDALRSGLTVPTSPKGRLLDRRSRSGKGRGLPKKGGAGGKGVWGTPGQVYDVEEVDVKDPNYDDDQENCVYETVVLPLDERAFEKTLTPIIQEYFEHGDTNEVAEMLRDLNLGE

SEQ ID NO: 7291 - DNA, 1156 bp, Homo sapiens
cctcctcagctccggctccgccgccacgattggccagccgaccacccggcctcggccaataagcgccgccctctcgcccccgtgttactgggtagaagaaaacaaaaacaaacagagcgagaagggccagagactctccgaggcggcggcagagacagaagagcggggtcggggccggctgaccaggaacctgggcgagcagcggcgggggcccgagggattctgaaggaagatttccattaggtaatttgtttaatcagtgcaagcgaaattaagggaaaatggatgtagaaaatgagcagatactgaatgtaaaccctgcagatcctgataacttaagtgactctctcttttccggtgatgaagaaaatgctgggactgaggaaataaagaatgaaataaatggaaattggatttcagcatcctccattaacgaagctagaattaatgccaaggcaaaaaggcgactaaggaaaaactcatcccgggactctggcagaggcgattcggtcagcgacagtgggagtgacgcccttagaagtggattaactgtgccaaccagtccaaagggaaggttgctggataggcgatccagatctgggaaaggaaggggactaccaaagaaaggtggtgcaggaggcaaaggtgtctggggtacacctggacaggtgtatgatgtggaggaggtggatgtgaaagatcctaactatgatgatgaccaggagaactgtgtttatgaaactgtagttttgcctttggatgaaagggcatttgagaagactttaacaccaatcatacaggaatattttgagcatggagatactaatgaagttgcggaaatgttaagagatttaaatcttggtgaaatgaaaagtggagtaccagtgttggcagtatccttagcattggaggggaaggctagtcatagagagatgacatctaagcttctttctgacctttgtgggacagtaatgagcacaactgatgtggaaaaatcatttgataaattgttgaaagatctacctgaattagcactggatactcctagagcaccacagttggtgggccagtttattgctagagctgttggagatggaattttatgtaatacctatattgatagttacaaaggaactgtagattgtgtgcaggctag

SEQ ID NO: 7292 - protein, 290 aa, Homo sapiens
MDVENEQILNVNPADPDNLSDSLFSGDEENAGTEEIKNEINGNWISASSINEARINAKAKRRLRKNSSRDSGRGDSVSDSGSDALRSGLTVPTSPKGRLLDRRSRSGKGRGLPKKGGAGGKGVWGTPGQVYDVEEVDVKDPNYDDDQENCVYETVVLPLDERAFEKTLTPIIQEYFEHGDTNEVAEMLRDLNLGEMKSGVPVLAVSLALEGKASHREMTSKLLSDLCGTVMSTTDVEKSFDKLLKDLPELALDTPRAPQLVGQFIARAVGDGILCNTYIDSYKGTVDCVQ

SEQ ID NO: 7293 - DNA, 2149 bp, Homo sapiens
cctcctcagctccggctccgccgccacgattggccagccgaccacccggcctcggccaataagcgccgccctctcgcccccgtgttactgggtagaagaaaacaaaaacaaacagagcgagaagggccagagactctccgaggcggcggcagagacagaagagcggggtcggggccggctgaccaggaacctgggcgagcagcggcgggggcccgagggattctgaaggaagatttccattaggtaatttgtttaatcagtgcaagcgaaattaagggaaaatggatgtagaaaatgagcagatactgaatgtaaaccctgcagatcctgataacttaagtgactctctcttttccggtgatgaagaaaatgctgggactgaggaaataaagaatgaaataaatggaaattggatttcagcatcctccattaacgaagctagaattaatgccaaggcaaaaaggcgactaaggaaaaactcatcccgggactctggcagaggcgattcggtcagcgacagtgggagtgacgcccttagaagtggattaactgtgccaaccagtccaaagggaaggttgctggataggcgatccagatctgggaaaggaaggggactaccaaagaaaggtggtgcaggaggcaaaggtgtctggggtacacctggacaggtgtatgatgtggaggaggtggatgtgaaagatcctaactatgatgatgaccaggagaactgtgtttatgaaactgtagttttgcctttggatgaaagggcatttgagaagactttaacaccaatcatacaggaatattttgagcatggagatactaatgaagttgcggaaatgttaagagatttaaatcttggtgaaatgaaaagtggagtaccagtgttggcagtatccttagcattggaggggaaggctagtcatagagagatgacatctaagcttctttctgacctttgtgggacagtaatgagcacaactgatgtggaaaaatcatttgataaattgttgaaagatctacctgaattagcactggatactcctagagcaccacagttggtgggccagtttattgctagagctgttggagatggaattttatgtaatacctatattgatagttacaaaggaactgtagattgtgtgcaggctagagctgctctggataaggctaccgtgcttctgagtatgtctaaaggtggaaagcgtaaagatagtgtgtggggctctggaggtgggcagcaatctgtcaatcaccttgttaaagagattgatatgctgctgaaagaatatttactctctggagacatatctgaagctgaacattgccttaaggaactggaagtacctcattttcaccatgagcttgtatatgaagctattataatggttttagagtcaactggagaaagtacatttaagatgattttggatttattaaagtccctttggaagtcttctaccattactgtagaccaaatgaaaagaggttatgagagaatttacaatgaaattccggacattaatctggatgtcccacattcatactctgtgctggagcggtttgtagaagaatgttttcaggctggaataatttccaaacaactcagagatctttgtccttcaaggggcagaaagcgttttgtaagcgaaggagatggaggtcgtcttaaaccagagagctactgaatataagaactcttgcagtcttagatgttataaaaatatatatctgaattgtaagagttgttagcacaagttttttttttttttttttttaagcacttgttttgggtacaaggcatttctgacattttataaacctacatttaaggggaatttttaaaggaaatgttttttcttttttttttgtttttcgagggggcaaggagggacagaaaagtaacctcttcttaagtggaatattctaataagctaccttttgtaagtgccatgtttattatctaatcattccaagttttgcattgatgtctgactgccactcctttctttcaaggacagtgttttttgtagtaaaatcactggtttatacaaagctttatttagggggtaaagttaagctgctaaaaccccatgttggctgctgctgttgagatactgtgctttgggagtaaaaaaagaaagtt

SEQ ID NO: 7294 - protein, 469 aa, Homo sapiens; identical to SEQ ID NO: 807

SEQ ID NO: 7295 - DNA, 2352 bp, Homo sapiens
cctcctcagctccggctccgccgccacgattggccagccgaccacccggcctcggccaataagcgccgccctctcgcccccgtgttactgggtagaagaaaacaaaaacaaacagagcgagaagggccagagactctccgaggcggcggcagagacagaagagcggggtcggggccggctgaccaggaacctgggcgagcagcggcgggggcccgagggattctgaaggaagatttccattaggtaatttgtttaatcagtgcaagcgaaattaagggaaaatggatgtagaaaatgagcagatactgaatgtaaaccctgcagatcctgataacttaagtgactctctcttttccggtgatgaagaaaatgctgggactgaggaaataaagaatgaaataaatggaaattggatttcagcatcctccattaacgaagctagaattaatgccaaggcaaaaaggcgactaaggaaaaactcatcccgggactctggcagaggcgattcggtcagcgacagtgggagtgacgcccttagaagtggattaactgtgccaaccagtccaaagggaaggttgctggataggcgatccagatctgggaaaggaaggggactaccaaagaaaggtggtgcaggaggcaaaggtgtctggggtacacctggacaggtgtatgatgtggaggaggtggatgtgaaagatcctaactatgatgatgaccaggagaactgtgtttatgaaactgtagttttgcctttggatgaaagggcatttgagaagactttaacaccaatcatacaggaatattttgagcatggagatactaatgaagttgcggaaatgttaagagatttaaatcttggtgaaatgaaaagtggagtaccagtgttggcagtatccttagcattggaggggaaggctagtcatagagagatgacatctaagcttctttctgacctttgtgggacagtaatgagcacaactgatgtggaaaaatcatttgataaattgttgaaagatctacctgaattagcactggatactcctagagcaccacagttggtgggccagtttattgctagagctgttggagatggaattttatgtaatacctatattgatagttacaaaggaactgtagattgtgtgcaggctagagctgctctggataaggctaccgtgcttctgagtatgtctaaaggtggaaagcgtaaagatagtgtgtggggctctggaggtgggcagcaatctgtcaatcaccttgttaaagagattgatatgctgctgaaagaatatttactctctggagacatatctgaagctgaacattgccttaaggaactggaagtacctcattttcaccatgagcttgtatatgaagctattataatggttttagagtcaactggagaaagtacatttaagatgattttggatttattaaagtccctttggaagtcttctaccattactgtagaccaaatgaaaagaggttatgagagaatttacaatgaaattccggacattaatctggatgtcccacattcatactctgtgctggagcggtttgtagaagaatgttttcaggctggaataatttccaaacaactcagagatctttgtccttcaaggggcagaaagcgttttgtaagcgaaggagatggaggtcgtcttaaaccagagagctactgaatataagaactcttgcagtcttagatgttataaaaatatatatctgaattgtaagagttgttagcacaagttttttttttttttttttttaagcacttgttttgggtacaaggcatttctgacattttataaacctacatttaaggggaatttttaaaggaaatgttttttcttttttttttgtttttcgagggggcaaggagggacagaaaagtaacctcttcttaagtggaatattctaataagctaccttttgtaagtgccatgtttattatctaatcattccaagttttgcattgatgtctgactgccactcctttctttcaaggacagtgttttttgtagtaaaatcactggtttatacaaagctttatttagggggtaaagttaagctgctaaaaccccatgttggctgctgctgttgagatactgtgctttgggagtaaaaaaagaaagttatttctttgtcttaaagaatttttaaaaaattagtcatgagacttattcatctttccagggaacatactgattggtcttaaaagactagacagttaagtaaaaggtggctggaacatctatttttctacaaaactggaaaaatgaacctggttctagaagaatgtacaccaaaataaaacatgtgaagcagtattgattcttt

SEQ ID NO: 7296 - protein, 469 aa, Homo sapiens; identical to SEQ ID NO: 807

SEQ ID NO: 7297 - DNA, 2748 bp, Homo sapiens
cctcctcagctccggctccgccgccacgattggccagccgaccacccggcctcggccaataagcgccgccctctcgcccccgtgttactgggtagaagaaaacaaaaacaaacagagcgagaagggccagagactctccgaggcggcggcagagacagaagagcggggtcggggccggctgaccaggaacctgggcgagcagcggcgggggcccgagggattctgaaggaagatttccattaggtaatttgtttaatcagtgcaagcgaaattaagggaaaatggatgtagaaaatgagcagatactgaatgtaaaccctgcagatcctgataacttaagtgactctctcttttccggtgatgaagaaaatgctgggactgaggaaataaagaatgaaataaatggaaattggatttcagcatcctccattaacgaagctagaattaatgccaaggcaaaaaggcgactaaggaaaaactcatcccgggactctggcagaggcgattcggtcagcgacagtgggagtgacgcccttagaagtggattaactgtgccaaccagtccaaagggaaggttgctggataggcgatccagatctgggaaaggaaggggactaccaaagaaaggtggtgcaggaggcaaaggtgtctggggtacacctggacaggtgtatgatgtggaggaggtggatgtgaaagatcctaactatgatgatgaccaggagaactgtgtttatgaaactgtagttttgcctttggatgaaagggcatttgagaagactttaacaccaatcatacaggaatattttgagcatggagatactaatgaagttgcggaaatgttaagagatttaaatcttggtgaaatgaaaagtggagtaccagtgttggcagtatccttagcattggaggggaaggctagtcatagagagatgacatctaagcttctttctgacctttgtgggacagtaatgagcacaactgatgtggaaaaatcatttgataaattgttgaaagatctacctgaattagcactggatactcctagagcaccacagttggtgggccagtttattgctagagctgttggagatggaattttatgtaatacctatattgatagttacaaaggaactgtagattgtgtgcaggctagagctgctctggataaggctaccgtgcttctgagtatgtctaaaggtggaaagcgtaaagatagtgtgtggggctctggaggtgggcagcaatctgtcaatcaccttgttaaagagattgatatgctgctgaaagaatatttactctctggagacatatctgaagctgaacattgccttaaggaactggaagtacctcattttcaccatgagcttgtatatgaagctattataatggttttagagtcaactggagaaagtacatttaagatgattttggatttattaaagtccctttggaagtcttctaccattactgtagaccaaatgaaaagaggttatgagagaatttacaatgaaattccggacattaatctggatgtcccacattcatactctgtgctggagcggtttgtagaagaatgttttcaggctggaataatttccaaacaactcagagatctttgtccttcaaggggcagaaagcgttttgtaagcgaaggagatggaggtcgtcttaaaccagagagctactgaatataagaactcttgcagtcttagatgttataaaaatatatatctgaattgtaagagttgttagcacaagttttttttttttttttttttaagcacttgttttgggtacaaggcatttctgacattttataaacctacatttaaggggaatttttaaaggaaatgttttttcttttttttttgtttttcgagggggcaaggagggacagaaaagtaacctcttcttaagtggaatattctaataagctaccttttgtaagtgccatgtttattatctaatcattccaagttttgcattgatgtctgactgccactcctttctttcaaggacagtgttttttgtagtaaaatcactggtttatacaaagctttatttagggggtaaagttaagctgctaaaaccccatgttggctgctgctgttgagatactgtgctttgggagtaaaaaaagaaagttatttctttgtcttaaagaatttttaaaaaattagtcatgagacttattcatctttccagggaacatactgattggtcttaaaagactagacagttaagtaaaaggtggctggaacatctatttttctacaaaactggaaaaatgaacctggttctagaagaatgtacaccaaaataaaacatgtgaagcagtattgattctttattgggagtacatttttttaggtctcttaaactttaatttcacacagtaaattttgaatctcataaggaagcatatttgaacctagtcaatttaatcttagtgttcccttgaaaactttttttccctacaaaattttaagtgaaaaatacaatagtaaattaagattacactggggaaaaaaatgcaggtatcactttactccattgttatctgacctagagcttaattaagttttagaaatatgtaataccttccatcattccatcatccttaaattctgttaccaaataatggctaatgttacaaaaagttatactccagagacccaaagcttgacatttacctaatgtatgagaaaatattaccaattaacaataaagaatgatcatattttt

SEQ ID NO: 7298 - protein, 469 aa, Homo sapiens; identical to SEQ ID NO: 807

SEQ ID NO: 7299 - DNA, 3608 bp, Homo sapiens
cctcctcagctccggctccgccgccacgattggccagccgaccacccggcctcggccaataagcgccgccctctcgcccccgtgttactgggtagaagaaaacaaaaacaaacagagcgagaagggccagagactctccgaggcggcggcagagacagaagagcggggtcggggccggctgaccaggaacctgggcgagcagcggcgggggcccgagggattctgaaggaagatttccattaggtaatttgtttaatcagtgcaagcgaaattaagggaaaatggatgtagaaaatgagcagatactgaatgtaaaccctgcagatcctgataacttaagtgactctctcttttccggtgatgaagaaaatgctgggactgaggaaataaagaatgaaataaatggaaattggatttcagcatcctccattaacgaagctagaattaatgccaaggcaaaaaggcgactaaggaaaaactcatcccgggactctggcagaggcgattcggtcagcgacagtgggagtgacgcccttagaagtggattaactgtgccaaccagtccaaagggaaggttgctggataggcgatccagatctgggaaaggaaggggactaccaaagaaaggtggtgcaggaggcaaaggtgtctggggtacacctggacaggtgtatgatgtggaggaggtggatgtgaaagatcctaactatgatgatgaccaggagaactgtgtttatgaaactgtagttttgcctttggatgaaagggcatttgagaagactttaacaccaatcatacaggaatattttgagcatggagatactaatgaagttgcggaaatgttaagagatttaaatcttggtgaaatgaaaagtggagtaccagtgttggcagtatccttagcattggaggggaaggctagtcatagagagatgacatctaagcttctttctgacctttgtgggacagtaatgagcacaactgatgtggaaaaatcatttgataaattgttgaaagatctacctgaattagcactggatactcctagagcaccacagttggtgggccagtttattgctagagctgttggagatggaattttatgtaatacctatattgatagttacaaaggaactgtagattgtgtgcaggctagagctgctctggataaggctaccgtgcttctgagtatgtctaaaggtggaaagcgtaaagatagtgtgtggggctctggaggtgggcagcaatctgtcaatcaccttgttaaagagattgatatgctgctgaaagaatatttactctctggagacatatctgaagctgaacattgccttaaggaactggaagtacctcattttcaccatgagcttgtatatgaagctattataatggttttagagtcaactggagaaagtacatttaagatgattttggatttattaaagtccctttggaagtcttctaccattactgtagaccaaatgaaaagaggttatgagagaatttacaatgaaattccggacattaatctggatgtcccacattcatactctgtgctggagcggtttgtagaagaatgttttcaggctggaataatttccaaacaactcagagatctttgtccttcaaggggcagaaagcgttttgtaagcgaaggagatggaggtcgtcttaaaccagagagctactgaatataagaactcttgcagtcttagatgttataaaaatatatatctgaattgtaagagttgttagcacaagttttttttttttttttttttaagcacttgttttgggtacaaggcatttctgacattttataaacctacatttaaggggaatttttaaaggaaatgttttttcttttttttttgtttttcgagggggcaaggagggacagaaaagtaacctcttcttaagtggaatattctaataagctaccttttgtaagtgccatgtttattatctaatcattccaagttttgcattgatgtctgactgccactcctttctttcaaggacagtgttttttgtagtaaaatcactggtttatacaaagctttatttagggggtaaagttaagctgctaaaaccccatgttggctgctgctgttgagatactgtgctttgggagtaaaaaaagaaagttatttctttgtcttaaagaatttttaaaaaattagtcatgagacttattcatctttccagggaacatactgattggtcttaaaagactagacagttaagtaaaaggtggctggaacatctatttttctacaaaactggaaaaatgaacctggttctagaagaatgtacaccaaaataaaacatgtgaagcagtattgattctttattgggagtacatttttttaggtctcttaaactttaatttcacacagtaaattttgaatctcataaggaagcatatttgaacctagtcaatttaatcttagtgttcccttgaaaactttttttccctacaaaattttaagtgaaaaatacaatagtaaattaagattacactggggaaaaaaatgcaggtatcactttactccattgttatctgacctagagcttaattaagttttagaaatatgtaataccttccatcattccatcatccttaaattctgttaccaaataatggctaatgttacaaaaagttatactccagagacccaaagcttgacatttacctaatgtatgagaaaatattaccaattaacaataaagaatgatcatatttttaacctcttttacatagcctaataactcagcaaggcctcaacgtctgtgctaatttaaactgccaaatattgactgcagcaaacaagaattatattcagaatttatgagggtactgttaggagtatactgcttacaggtttagatatagtctgttagaattaaaaccaagtttagtgttcatatttacctcatgggctttatcaagcccatattacctcagcttatatatagttaccatttttaggtttttaattgtttgacacttggatgataaatgcagtcattttattctcaagtgcttaaaattaatgtaattaaaagcttagctgactacagaataggtgagggtttcttaaaaatgagatttaagggctgggcacggtggctcatgcctgtaatcccagcactttgggaggccgaggtgggcggatcacttgaggttgggagttcatgaccagcttgaccaacatgaagaaaccctgtctctattaaaaatacaaaagtagccaggcatggtggcgcatgcgtgtaatcccagctacttgggaggctgaggcaggagaattgcttgaacctgggaggcagaggttgcagtgagtcgagatggtgccattgctctcgtttgggcaacaagagtgaaactcttgtctcaaaaaaaaaaaaaaatgaggtttaagacagttttgtcattactggtgggatctggtcacacaagatagcattaaacgtgacatggcacataaaattggttaaaaaattttgttttttaattacgtaatgtaaaagcccaacaaacactttatgcaagattggaatgtatcttcaaattcagatttaataaacatgtaaagatcctctgt

SEQ ID NO: 7300 - protein, 469 aa, Homo sapiens; identical to SEQ ID NO: 807

SEQ ID NO: 7301 - DNA, 3631 bp, Homo sapiens
cctcctcagctccggctccgccgccacgattggccagccgaccacccggcctcggccaataagcgccgccctctcgcccccgtgttactgggtagaagaaaacaaaaacaaacagagcgagaagggccagagactctccgaggcggcggcagagacagaagagcggggtcggggccggctgaccaggaacctgggcgagcagcggcgggggcccgagggattctgaaggaagatttccattaggtaatttgtttaatcagtgcaagcgaaattaagggaaaatggatgtagaaaatgagcagatactgaatgtaaaccctgcagatcctgataacttaagtgactctctcttttccggtgatgaagaaaatgctgggactgaggaaataaagaatgaaataaatggaaattggatttcagcatcctccattaacgaagctagaattaatgccaaggcaaaaaggcgactaaggaaaaactcatcccgggactctggcagaggcgattcggtcagcgacagtgggagtgacgcccttagaagtggattaactgtgccaaccagtccaaagggaaggttgctggataggcgatccagatctgggaaaggaaggggactaccaaagaaaggtggtgcaggaggcaaaggtgtctggggtacacctggacaggtgtatgatgtggaggaggtggatgtgaaagatcctaactatgatgatgaccaggagaactgtgtttatgaaactgtagttttgcctttggatgaaagggcatttgagaagactttaacaccaatcatacaggaatattttgagcatggagatactaatgaagttgcggaaatgttaagagatttaaatcttggtgaaatgaaaagtggagtaccagtgttggcagtatccttagcattggaggggaaggctagtcatagagagatgacatctaagcttctttctgacctttgtgggacagtaatgagcacaactgatgtggaaaaatcatttgataaattgttgaaagatctacctgaattagcactggatactcctagagcaccacagttggtgggccagtttattgctagagctgttggagatggaattttatgtaatacctatattgatagttacaaaggaactgtagattgtgtgcaggctagagctgctctggataaggctaccgtgcttctgagtatgtctaaaggtggaaagcgtaaagatagtgtgtggggctctggaggtgggcagcaatctgtcaatcaccttgttaaagagattgatatgctgctgaaagaatatttactctctggagacatatctgaagctgaacattgccttaaggaactggaagtacctcattttcaccatgagcttgtatatgaagctattataatggttttagagtcaactggagaaagtacatttaagatgattttggatttattaaagtccctttggaagtcttctaccattactgtagaccaaatgaaaagaggttatgagagaatttacaatgaaattccggacattaatctggatgtcccacattcatactctgtgctggagcggtttgtagaagaatgttttcaggctggaataatttccaaacaactcagagatctttgtccttcaaggggcagaaagcgttttgtaagcgaaggagatggaggtcgtcttaaaccagagagctactgaatataagaactcttgcagtcttagatgttataaaaatatatatctgaattgtaagagttgttagcacaagttttttttttttttttttttaagcacttgttttgggtacaaggcatttctgacattttataaacctacatttaaggggaatttttaaaggaaatgttttttcttttttttttgtttttcgagggggcaaggagggacagaaaagtaacctcttcttaagtggaatattctaataagctaccttttgtaagtgccatgtttattatctaatcattccaagttttgcattgatgtctgactgccactcctttctttcaaggacagtgttttttgtagtaaaatcactggtttatacaaagctttatttagggggtaaagttaagctgctaaaaccccatgttggctgctgctgttgagatactgtgctttgggagtaaaaaaagaaagttatttctttgtcttaaagaatttttaaaaaattagtcatgagacttattcatctttccagggaacatactgattggtcttaaaagactagacagttaagtaaaaggtggctggaacatctatttttctacaaaactggaaaaatgaacctggttctagaagaatgtacaccaaaataaaacatgtgaagcagtattgattctttattgggagtacatttttttaggtctcttaaactttaatttcacacagtaaattttgaatctcataaggaagcatatttgaacctagtcaatttaatcttagtgttcccttgaaaactttttttccctacaaaattttaagtgaaaaatacaatagtaaattaagattacactggggaaaaaaatgcaggtatcactttactccattgttatctgacctagagcttaattaagttttagaaatatgtaataccttccatcattccatcatccttaaattctgttaccaaataatggctaatgttacaaaaagttatactccagagacccaaagcttgacatttacctaatgtatgagaaaatattaccaattaacaataaagaatgatcatatttttaacctcttttacatagcctaataactcagcaaggcctcaacgtctgtgctaatttaaactgccaaatattgactgcagcaaacaagaattatattcagaatttatgagggtactgttaggagtatactgcttacaggtttagatatagtctgttagaattaaaaccaagtttagtgttcatatttacctcatgggctttatcaagcccatattacctcagcttatatatagttaccatttttaggtttttaattgtttgacacttggatgataaatgcagtcattttattctcaagtgcttaaaattaatgtaattaaaagcttagctgactacagaataggtgagggtttcttaaaaatgagatttaagggctgggcacggtggctcatgcctgtaatcccagcactttgggaggccgaggtgggcggatcacttgaggttgggagttcatgaccagcttgaccaacatgaagaaaccctgtctctattaaaaatacaaaagtagccaggcatggtggcgcatgcgtgtaatcccagctacttgggaggctgaggcaggagaattgcttgaacctgggaggcagaggttgcagtgagtcgagatggtgccattgctctcgtttgggcaacaagagtgaaactcttgtctcaaaaaaaaaaaaaaatgaggtttaagacagttttgtcattactggtgggatctggtcacacaagatagcattaaacgtgacatggcacataaaattggttaaaaaattttgttttttaattacgtaatgtaaaagcccaacaaacactttatgcaagattggaatgtatcttcaaattcagatttaataaacatgtaaagatcctctgtatataaaagttgtatttaatccc

SEQ ID NO: 7302 - protein, 469 aa, Homo sapiens; identical to SEQ ID NO: 807

SEQ ID NO: 7303 - DNA, 3654 bp, Homo sapiens
cgaccacccggcctcggccaataagcgccgccctctcgcccccgtgttactgggtagaagaaaacaaaaacaaacagagcgagaagggccagagactctccgaggcggcggcagagacagaagagcggggtcggggccggctgaccaggaacctgggcgagcagcggcgggggcccgagggattctgaaggaagatttccattaggtaatttgtttaatcagtgcaagcgaaattaagggaaaatggatgtagaaaatgagcagatactgaatgtaaaccctgcagggtattttccctaattctccatggtgcttcaatagcatgttattatcataaaaatgaacagttttgtggaatagatgaccaaatatcctgataacttaagtgactctctcttttccggtgatgaagaaaatgctgggactgaggaaataaagaatgaaataaatggaaattggatttcagcatcctccattaacgaagctagaattaatgccaaggcaaaaaggcgactaaggaaaaactcatcccgggactctggcagaggcgattcggtcagcgacagtgggagtgacgcccttagaagtggattaactgtgccaaccagtccaaagggaaggttgctggataggcgatccagatctgggaaaggaaggggactaccaaagaaaggtggtgcaggaggcaaaggtgtctggggtacacctggacaggtgtatgatgtggaggaggtggatgtgaaagatcctaactatgatgatgaccaggagaactgtgtttatgaaactgtagttttgcctttggatgaaagggcatttgagaagactttaacaccaatcatacaggaatattttgagcatggagatactaatgaagttgcggaaatgttaagagatttaaatcttggtgaaatgaaaagtggagtaccagtgttggcagtatccttagcattggaggggaaggctagtcatagagagatgacatctaagcttctttctgacctttgtgggacagtaatgagcacaactgatgtggaaaaatcatttgataaattgttgaaagatctacctgaattagcactggatactcctagagcaccacagttggtgggccagtttattgctagagctgttggagatggaattttatgtaatacctatattgatagttacaaaggaactgtagattgtgtgcaggctagagctgctctggataaggctaccgtgcttctgagtatgtctaaaggtggaaagcgtaaagatagtgtgtggggctctggaggtgggcagcaatctgtcaatcaccttgttaaagagattgatatgctgctgaaagaatatttactctctggagacatatctgaagctgaacattgccttaaggaactggaagtacctcattttcaccatgagcttgtatatgaagctattataatggttttagagtcaactggagaaagtacatttaagatgattttggatttattaaagtccctttggaagtcttctaccattactgtagaccaaatgaaaagaggttatgagagaatttacaatgaaattccggacattaatctggatgtcccacattcatactctgtgctggagcggtttgtagaagaatgttttcaggctggaataatttccaaacaactcagagatctttgtccttcaaggggcagaaagcgttttgtaagcgaaggagatggaggtcgtcttaaaccagagagctactgaatataagaactcttgcagtcttagatgttataaaaatatatatctgaattgtaagagttgttagcacaagttttttttttttttttttttaagcacttgttttgggtacaaggcatttctgacattttataaacctacatttaaggggaatttttaaaggaaatgttttttcttttttttttgtttttcgagggggcaaggagggacagaaaagtaacctcttcttaagtggaatattctaataagctaccttttgtaagtgccatgtttattatctaatcattccaagttttgcattgatgtctgactgccactcctttctttcaaggacagtgttttttgtagtaaaatcactggtttatacaaagctttatttagggggtaaagttaagctgctaaaaccccatgttggctgctgctgttgagatactgtgctttgggagtaaaaaaagaaagttatttctttgtcttaaagaatttttaaaaaattagtcatgagacttattcatctttccagggaacatactgattggtcttaaaagactagacagttaagtaaaaggtggctggaacatctatttttctacaaaactggaaaaatgaacctggttctagaagaatgtacaccaaaataaaacatgtgaagcagtattgattctttattgggagtacatttttttaggtctcttaaactttaatttcacacagtaaattttgaatctcataaggaagcatatttgaacctagtcaatttaatcttagtgttcccttgaaaactttttttccctacaaaattttaagtgaaaaatacaatagtaaattaagattacactggggaaaaaaatgcaggtatcactttactccattgttatctgacctagagcttaattaagttttagaaatatgtaataccttccatcattccatcatccttaaattctgttaccaaataatggctaatgttacaaaaagttatactccagagacccaaagcttgacatttacctaatgtatgagaaaatattaccaattaacaataaagaatgatcatatttttaacctcttttacatagcctaataactcagcaaggcctcaacgtctgtgctaatttaaactgccaaatattgactgcagcaaacaagaattatattcagaatttatgagggtactgttaggagtatactgcttacaggtttagatatagtctgttagaattaaaaccaagtttagtgttcatatttacctcatgggctttatcaagcccatattacctcagcttatatatagttaccatttttaggtttttaattgtttgacacttggatgataaatgcagtcattttattctcaagtgcttaaaattaatgtaattaaaagcttagctgactacagaataggtgagggtttcttaaaaatgagatttaagggctgggcacggtggctcatgcctgtaatcccagcactttgggaggccgaggtgggcggatcacttgaggttgggagttcatgaccagcttgaccaacatgaagaaaccctgtctctattaaaaatacaaaagtagccaggcatggtggcgcatgcgtgtaatcccagctacttgggaggctgaggcaggagaattgcttgaacctgggaggcagaggttgcagtgagtcgagatggtgccattgctctcgtttgggcaacaagagtgaaactcttgtctcaaaaaaaaaaaaaaatgaggtttaagacagttttgtcattactggtgggatctggtcacacaagatagcattaaacgtgacatggcacataaaattggttaaaaaattttgttttttaattacgtaatgtaaaagcccaacaaacactttatgcaagattggaatgtatcttcaaattcagatttaataaacatgtaaagatcctctgt

SEQ ID NO: 7304 - protein, 458 aa, Homo sapiens; identical to SEQ ID NO: 809

SEQ ID NO: 7305 - DNA, 714 bp, Homo sapiens
agaagaaaacaaaaacaaacagagcgagaagggccagagactctccgaggcggcggcagagacagaagagcggggtcggggccggctgaccaggaacctgggcgagcagcggcgggggcccgagggattctgaaggaagatttccattaggtaatttgtttaatcagtgcaagcgaaattaagggaaaatggatgtagaaaatgagcagatactgaatgtaaaccctgcagggtattttccctaattctccatggtgcttcaatagcatgttattatcataaaaatgaacagttttgtggaatagatgaccaaatatcctgataacttaagtgactctctcttttccggtgatgaagaaaatgctgggactgaggaaataaagaatgaaataaatggaaattggatttcagcatcctccattaacgaagctagaattaatgccaaggcaaaaaggcgactaaggaaaaactcatcccgggactctggcagaggcgattcggtcagcgacagtgggagtgacgcccttagaagtggattaactgtgccaaccagtccaaagggaaggttgctggataggcgatccagatctgggaaaggaaggggactaccaaagaaaggtggtgcaggaggcaaaggtgtctggggtacacctggacaggtgtatgatgtggaggaggtggatgtgaaagatcctaactatgatgatgaccagg

SEQ ID NO: 7306 - protein, 135 aa, Homo sapiens
MTKYPDNLSDSLFSGDEENAGTEEIKNEINGNWISASSINEARINAKAKRRLRKNSSRDSGRGDSVSDSGSDALRSGLTVPTSPKGRLLDRRSRSGKGRGLPKKGGAGGKGVWGTPGQVYDVEEVDVKDPNYDDD

SEQ ID NO: 7307 - DNA, 593 bp, Homo sapiens
agagactctccgaggcggcggcagagacagaagagcggggtcggggccggctgaccaggaacctgggcgagcagcggcgggggcccgagggatcctgataacttaagtgactctctcttttccggtgatgaagaaaatgctgggactgaggaaataaagaatgaaataaatggaaattggatttcagcatcctccattaacgaagctagaattaatgccaaggcaaaaaggcgactaaggaaaaactcatcccgggactctggcagaggcgattcggtcagcgacagtgggagtgacgcccttagaagtggattaactgtgccaaccagtccaaagggaaggttgctggataggcgatccagatctgggaaaggaaggggactaccaaagaaaggtggtgcaggaggcaaaggtgtctggggtacacctggacaggtgtatgatgtggaggaggtggatgtgaaagatcctaactatgatgatgaccaggtatcagtgctttgctttttcataatatttaaaatgtttatgaacttttttgacttcatgtttgtagtttactcatacatgtgtcaaatcatatgtataaatgt

SEQ ID NO: 7308 - protein, 34 aa, Homo sapiens
ETLRGGGRDRRAGSGPADQEPGRAAAGARGILIT

SEQ ID NO: 7309 - DNA, 6237 bp, Homo sapiens
gccccctttctgtgaaacgcatgccatcttctccatttgtcagtttgatgctgtaacgtacatggggttttgcaagagcttcaaaactgtctgcagacgtcaatttcgcccccctcccccttgtgagaactcgctacgtagccagcaactgtgtagtgtctacaaatgatgaaaacgatcagaaatgcgattaggtgtcggggaaaaaagggtttcccctgtttttaacttgtatttttactttaattgttacaatcttgatattcttaacgtgacttttttgggaaaccaccaagtgctttttaagcaaggagttactggtatttatgcccttaatattccttcattataggcttattgaatacgttaatatctcagtaagtgtatttgaattataattgactggctttttctgtggtactaatgtgaaaggaaaaaatattaggactgcaaaaataaatgccgcttgaatattatctgtagtgcttgcttttgcattactgtagtagaatgcttttagctggttttaagctgctaattagccgttcgtagccgaagaatgaatacaagtaatcctagttaataaatggccaaagcttgactccccaaaatgccagagcaatttatgaggtatatttcaggaaatacatatgtatatatttcgtgggggagtggagggtctgtctcttagggaatgtcttggcagttgaatacttctgattgtatatttcgtgtaacacactggagaaaagaacagtgtttaatgtcagccttcattttcttctaacttgtatgtatagttttctcatcgaaaattcatttttgtaggttagtatgaaggaaatagcgtttggattttttgctttatattttcttgtttgggccaattaagggttgttaaataaattggaaaaaatcctactactttaaagagcgtaaaaacgtggaacatgtcttatctaaactcttaaaacgtgtttgttgctgtcaaatatgacttgagttcctgatcgggttatcattgcctaaagacacaggactattttttttattaagataactttgtttttatcttaataaaagagatgatagtcatttcctgacagttttgtctgacggaatgccttctgtataatagtttaaaataattatttttagtgtttggaaaacagcatttaaaagtttgaacagcagaagtctgttttaagaagcttctgttaacccttgaaaagaatcttcctgtgggatattaaaattttggattgaacttgtgcaaacagtactggatttggaaggtctggattctcatcctggctgttccactaagcagctgtctgtccttggacatatcacctaccctctctgaatctgtttagttgtgtgtaaggtggaatacctacccgaaggtttttctgtaaggtacattaaataatacatgtacaattctttttgaattgtaaagggctttatgaacatcaattataatcatttcgcttattaggttctgcagaaagtattctctcaaaagttatactttcatcaagaatgaaaaagactttgtaatggaactctaaaaaactgaaacacgtatcatatgacattattcctttcctatatgtatttcatgcatggaattaaaacagaatgtagccttttcagccatgaaggatgctgagtgtttagatttgcaaaccatttttgttcatatatttatatgaatctctacatatttttaagatttttttttcatatctaaagttggcgggagttatagtgaaaagtgattataaagattcacatatattaatttattcttaacagaattagagaatgatctcaccattttcttaagttcccaagcaatatgatagcatattagtctgaggattataccatagtaagaagcctataattttaacataaggtccatttgtttttgtttcacaaaataataccgttttctgaagaaaagggctataaacttatgttagcaaatagtagtacataatgaggaatttaaaagtcagtttcacctttgagtcccaggaggctctgtatatatcattgttatcctaaaatgacatctaacagtaggttaagttatataggaaaaaatgtgcttttctgtaattaatttattaggcattttcactaatttgtgcattttatatctctgaagagcacactgctagcaacctgattgtaaatgaccagaaggacttatatccaacctatgtgacttaaacatacacttaagtactctaaaccactatttaaaaaatacttctagagagattctgaaatcttaatttggttgcactttctggtaatatattttttgaaaactattttgatatttctttcatataacattattggatctgtatcactaagttaattgtctaaaaggtaactgatttcatcaaaccttccagtattaataatttttaagccattttgaaactgaggcctaaaatactgaaatgcttatgtcgttgtacttactcctttctgaaatgatcagatttttaaaaaatggatttctcatataaataatattatcaaaaaaggatttctcatataaataatattatcaaaaaagctgattttaaaagtttctcccaaagtcttattctagtaattatagagacctaggtaatgagtggcagatatatctgcctttcagatatgccgtaatgtgaaaaataacacagtcatgtgatattctttattaactaaaactgtgttgtttttattttggagtagttctcataattcattggtagggaactatccagtatttatattcctatgtatgtatatcagattaattttgaggcttggtattcctaaaagatttggatgtgtgtatttctttaacttgacgtaaacatgtatcacaaacatatcttttaattccaattaaaggggtgctttggcacatgctgaaatctgggatttttttttttgactttgataaatttatcaaaaagattggaaccaaatgttaattagggtaagttgtctttgaaagtaaagtgaactgttttatttaatggaattgtgtgttttttgttgttgtcgtttgtttttacagtgtgcttaagtaagtttaattcagcttaattacatcagtttaaaagatcttgaagctttctttttttcttttaaaaaaacagattctgaaggaagatttccattaggtaatttgtttaatcagtgcaagcgaaattaagggaaaatggatgtagaaaatgagcagatactgaatgtaaaccctgcagatcctgataacttaagtgactctctcttttccggtgatgaagaaaatgctgggactgaggaaataaagaatgaaataaatggaaattggatttcagcatcctccattaacgaagctagaattaatgccaaggcaaaaaggcgactaaggaaaaactcatcccgggactctggcagaggcgattcggtcagcgacagtgggagtgacgcccttagaagtggattaactgtgccaaccagtccaaagggaaggttgctggataggcgatccagatctgggaaaggaaggggactaccaaagaaaggtggtgcaggaggcaaaggtgtctggggtacacctggacaggtgtatgatgtggaggaggtggatgtgaaagatcctaactatgatgatgaccaggagaactgtgtttatgaaactgtagttttgcctttggatgaaagggcatttgagaagactttaacaccaatcatacaggaatattttgagcatggagatactaatgaagttgcggaaatgttaagagatttaaatcttggtgaaatgaaaagtggagtaccagtgttggcagtatccttagcattggaggggaaggctagtcatagagagatgacatctaagcttctttctgacctttgtgggacagtaatgagcacaactgatgtggaaaaatcatttgataaattgttgaaagatctacctgaattagcactggatactcctagagcaccacagttggtgggccagtttattgctagagctgttggagatggaattttatgtaatacctatattgatagttacaaaggaactgtagattgtgtgcaggctaggtaagtaaatcacttttcctacttagaatttcaaaataggggaaaattctacaggatcctattgaaatgacacttgtgttaatcagacactctgtacatctgtttgtcacttctctatattctccactgttaaaatggagagactattggcatgatataccaggaagaggacagtactataatggaaaagttctggagtttagctaaatcattaattaccttcatgtcaagccactcttctttgggcctcagtttctttatttatgaaacaaaaccattggacagatctttaagttctgttttcaggttctagcattgtgtaatagtttaatattctaataagatggataaccttaagaagagaggcctgatttatagttttattttgtatttatctactgtagaaatcttagtcagaaagtatctttttcactcttgtgatttagtataattaatatgatatttggtataactaaatgtgatatttgggagttatgctatttgatttttcttaacttcttggagacttggactcagccatgtcttagttttcctcaggtctatatattaacttaattttctagggctacttcacatcatagtggaatggtgtccctgggtaggaaggcatggatctaggtgaaagttaattatatgtgaagtgtttcttctcagtgtagatcagttattttgtaatgtgttttgatttttcttgaatgagaaatgaaatagagcatgagaatattaacatgaggatcaacttctttttgctcctttttgttttgaaaaagtgttttgaattttattttgcttttatgttatgtgaaagatttagggcatataggattttgtcagctttatccctaatttagtaaactttaggtatgtccagctatcaaacttaaatttttttctttctctgtagagctgctctggataaggctaccgtgcttctgagtatgtctaaaggtggaaagcgtaaagatagtgtgtggggctctggaggtgggcagcaatctgtcaatcaccttgttaaagagattgatatgctgctgaaagaatatttactctctggagacatatctgaagctgaacattgccttaaggaactggaagtacctcattttcaccatgagcttgtatatgaagctattataatggttttagagtcaactggagaaagtacatttaagatgattttggatttattaaagtccctttggaagtcttctaccattactgtagaccaaatgaaaagaggttatgagagaatttacaatgaaattccggacattaatctggatgtcccacattcatactctgtgctggagcggtttgtagaagaatgttttcaggctggaataatttccaaacaactcagagatctttgtccttcaaggggcagaaagcgttttgtaagcgaaggagatggaggtcgtcttaaaccagagagctactgaatataagaactcttgcagtcttagatgttataaaaatatatatctgaattgtaagagttgttagcacaagttttttttttttttttttttaagcacttgttttgggtacaaggcatttctgacattttataaacctacatttaaggggaatttttaaaggaaatgttttttcttttttttttgtttttcgagggggcaaggagggacagaaaagtaacctcttcttaagtggaatattctaataagctaccttttgtaagtgccatgtttattatctaatcattccaagttttgcattgatgtctgactgccactcctttctttcaaggacagtgttttttgtagtaaaatcactggtttatacaaagctttatttagggggtaaagttaagctgctaaaaccccatgttggctgctgctgttgagatactgtgctttgggagtaaaaaaagaaagttatttctttgtcttaaagaatttttaaaaaattagtcatgagacttattcatctttccagggaacatactgattggtcttaaaagactagacagttaagtaaaaggtggctggaacatctatttttctacaaaactggaaaaatgaacctggttctagaagaatgtacaccaaaataaaacatgtgaagcagtattgattcttt

SEQ ID NO: 7310 - protein, 292 aa, Homo sapiens
MDVENEQILNVNPADPDNLSDSLFSGDEENAGTEEIKNEINGNWISASSINEARINAKAKRRLRKNSSRDSGRGDSVSDSGSDALRSGLTVPTSPKGRLLDRRSRSGKGRGLPKKGGAGGKGVWGTPGQVYDVEEVDVKDPNYDDDQENCVYETVVLPLDERAFEKTLTPIIQEYFEHGDTNEVAEMLRDLNLGEMKSGVPVLAVSLALEGKASHREMTSKLLSDLCGTVMSTTDVEKSFDKLLKDLPELALDTPRAPQLVGQFIARAVGDGILCNTYIDSYKGTVDCVQAR

SEQ ID NO: 7311 - DNA, 6633 bp, Homo sapiens
gccccctttctgtgaaacgcatgccatcttctccatttgtcagtttgatgctgtaacgtacatggggttttgcaagagcttcaaaactgtctgcagacgtcaatttcgcccccctcccccttgtgagaactcgctacgtagccagcaactgtgtagtgtctacaaatgatgaaaacgatcagaaatgcgattaggtgtcggggaaaaaagggtttcccctgtttttaacttgtatttttactttaattgttacaatcttgatattcttaacgtgacttttttgggaaaccaccaagtgctttttaagcaaggagttactggtatttatgcccttaatattccttcattataggcttattgaatacgttaatatctcagtaagtgtatttgaattataattgactggctttttctgtggtactaatgtgaaaggaaaaaatattaggactgcaaaaataaatgccgcttgaatattatctgtagtgcttgcttttgcattactgtagtagaatgcttttagctggttttaagctgctaattagccgttcgtagccgaagaatgaatacaagtaatcctagttaataaatggccaaagcttgactccccaaaatgccagagcaatttatgaggtatatttcaggaaatacatatgtatatatttcgtgggggagtggagggtctgtctcttagggaatgtcttggcagttgaatacttctgattgtatatttcgtgtaacacactggagaaaagaacagtgtttaatgtcagccttcattttcttctaacttgtatgtatagttttctcatcgaaaattcatttttgtaggttagtatgaaggaaatagcgtttggattttttgctttatattttcttgtttgggccaattaagggttgttaaataaattggaaaaaatcctactactttaaagagcgtaaaaacgtggaacatgtcttatctaaactcttaaaacgtgtttgttgctgtcaaatatgacttgagttcctgatcgggttatcattgcctaaagacacaggactattttttttattaagataactttgtttttatcttaataaaagagatgatagtcatttcctgacagttttgtctgacggaatgccttctgtataatagtttaaaataattatttttagtgtttggaaaacagcatttaaaagtttgaacagcagaagtctgttttaagaagcttctgttaacccttgaaaagaatcttcctgtgggatattaaaattttggattgaacttgtgcaaacagtactggatttggaaggtctggattctcatcctggctgttccactaagcagctgtctgtccttggacatatcacctaccctctctgaatctgtttagttgtgtgtaaggtggaatacctacccgaaggtttttctgtaaggtacattaaataatacatgtacaattctttttgaattgtaaagggctttatgaacatcaattataatcatttcgcttattaggttctgcagaaagtattctctcaaaagttatactttcatcaagaatgaaaaagactttgtaatggaactctaaaaaactgaaacacgtatcatatgacattattcctttcctatatgtatttcatgcatggaattaaaacagaatgtagccttttcagccatgaaggatgctgagtgtttagatttgcaaaccatttttgttcatatatttatatgaatctctacatatttttaagatttttttttcatatctaaagttggcgggagttatagtgaaaagtgattataaagattcacatatattaatttattcttaacagaattagagaatgatctcaccattttcttaagttcccaagcaatatgatagcatattagtctgaggattataccatagtaagaagcctataattttaacataaggtccatttgtttttgtttcacaaaataataccgttttctgaagaaaagggctataaacttatgttagcaaatagtagtacataatgaggaatttaaaagtcagtttcacctttgagtcccaggaggctctgtatatatcattgttatcctaaaatgacatctaacagtaggttaagttatataggaaaaaatgtgcttttctgtaattaatttattaggcattttcactaatttgtgcattttatatctctgaagagcacactgctagcaacctgattgtaaatgaccagaaggacttatatccaacctatgtgacttaaacatacacttaagtactctaaaccactatttaaaaaatacttctagagagattctgaaatcttaatttggttgcactttctggtaatatattttttgaaaactattttgatatttctttcatataacattattggatctgtatcactaagttaattgtctaaaaggtaactgatttcatcaaaccttccagtattaataatttttaagccattttgaaactgaggcctaaaatactgaaatgcttatgtcgttgtacttactcctttctgaaatgatcagatttttaaaaaatggatttctcatataaataatattatcaaaaaaggatttctcatataaataatattatcaaaaaagctgattttaaaagtttctcccaaagtcttattctagtaattatagagacctaggtaatgagtggcagatatatctgcctttcagatatgccgtaatgtgaaaaataacacagtcatgtgatattctttattaactaaaactgtgttgtttttattttggagtagttctcataattcattggtagggaactatccagtatttatattcctatgtatgtatatcagattaattttgaggcttggtattcctaaaagatttggatgtgtgtatttctttaacttgacgtaaacatgtatcacaaacatatcttttaattccaattaaaggggtgctttggcacatgctgaaatctgggatttttttttttgactttgataaatttatcaaaaagattggaaccaaatgttaattagggtaagttgtctttgaaagtaaagtgaactgttttatttaatggaattgtgtgttttttgttgttgtcgtttgtttttacagtgtgcttaagtaagtttaattcagcttaattacatcagtttaaaagatcttgaagctttctttttttcttttaaaaaaacagattctgaaggaagatttccattaggtaatttgtttaatcagtgcaagcgaaattaagggaaaatggatgtagaaaatgagcagatactgaatgtaaaccctgcagatcctgataacttaagtgactctctcttttccggtgatgaagaaaatgctgggactgaggaaataaagaatgaaataaatggaaattggatttcagcatcctccattaacgaagctagaattaatgccaaggcaaaaaggcgactaaggaaaaactcatcccgggactctggcagaggcgattcggtcagcgacagtgggagtgacgcccttagaagtggattaactgtgccaaccagtccaaagggaaggttgctggataggcgatccagatctgggaaaggaaggggactaccaaagaaaggtggtgcaggaggcaaaggtgtctggggtacacctggacaggtgtatgatgtggaggaggtggatgtgaaagatcctaactatgatgatgaccaggagaactgtgtttatgaaactgtagttttgcctttggatgaaagggcatttgagaagactttaacaccaatcatacaggaatattttgagcatggagatactaatgaagttgcggaaatgttaagagatttaaatcttggtgaaatgaaaagtggagtaccagtgttggcagtatccttagcattggaggggaaggctagtcatagagagatgacatctaagcttctttctgacctttgtgggacagtaatgagcacaactgatgtggaaaaatcatttgataaattgttgaaagatctacctgaattagcactggatactcctagagcaccacagttggtgggccagtttattgctagagctgttggagatggaattttatgtaatacctatattgatagttacaaaggaactgtagattgtgtgcaggctaggtaagtaaatcacttttcctacttagaatttcaaaataggggaaaattctacaggatcctattgaaatgacacttgtgttaatcagacactctgtacatctgtttgtcacttctctatattctccactgttaaaatggagagactattggcatgatataccaggaagaggacagtactataatggaaaagttctggagtttagctaaatcattaattaccttcatgtcaagccactcttctttgggcctcagtttctttatttatgaaacaaaaccattggacagatctttaagttctgttttcaggttctagcattgtgtaatagtttaatattctaataagatggataaccttaagaagagaggcctgatttatagttttattttgtatttatctactgtagaaatcttagtcagaaagtatctttttcactcttgtgatttagtataattaatatgatatttggtataactaaatgtgatatttgggagttatgctatttgatttttcttaacttcttggagacttggactcagccatgtcttagttttcctcaggtctatatattaacttaattttctagggctacttcacatcatagtggaatggtgtccctgggtaggaaggcatggatctaggtgaaagttaattatatgtgaagtgtttcttctcagtgtagatcagttattttgtaatgtgttttgatttttcttgaatgagaaatgaaatagagcatgagaatattaacatgaggatcaacttctttttgctcctttttgttttgaaaaagtgttttgaattttattttgcttttatgttatgtgaaagatttagggcatataggattttgtcagctttatccctaatttagtaaactttaggtatgtccagctatcaaacttaaatttttttctttctctgtagagctgctctggataaggctaccgtgcttctgagtatgtctaaaggtggaaagcgtaaagatagtgtgtggggctctggaggtgggcagcaatctgtcaatcaccttgttaaagagattgatatgctgctgaaagaatatttactctctggagacatatctgaagctgaacattgccttaaggaactggaagtacctcattttcaccatgagcttgtatatgaagctattataatggttttagagtcaactggagaaagtacatttaagatgattttggatttattaaagtccctttggaagtcttctaccattactgtagaccaaatgaaaagaggttatgagagaatttacaatgaaattccggacattaatctggatgtcccacattcatactctgtgctggagcggtttgtagaagaatgttttcaggctggaataatttccaaacaactcagagatctttgtccttcaaggggcagaaagcgttttgtaagcgaaggagatggaggtcgtcttaaaccagagagctactgaatataagaactcttgcagtcttagatgttataaaaatatatatctgaattgtaagagttgttagcacaagttttttttttttttttttttaagcacttgttttgggtacaaggcatttctgacattttataaacctacatttaaggggaatttttaaaggaaatgttttttcttttttttttgtttttcgagggggcaaggagggacagaaaagtaacctcttcttaagtggaatattctaataagctaccttttgtaagtgccatgtttattatctaatcattccaagttttgcattgatgtctgactgccactcctttctttcaaggacagtgttttttgtagtaaaatcactggtttatacaaagctttatttagggggtaaagttaagctgctaaaaccccatgttggctgctgctgttgagatactgtgctttgggagtaaaaaaagaaagttatttctttgtcttaaagaatttttaaaaaattagtcatgagacttattcatctttccagggaacatactgattggtcttaaaagactagacagttaagtaaaaggtggctggaacatctatttttctacaaaactggaaaaatgaacctggttctagaagaatgtacaccaaaataaaacatgtgaagcagtattgattctttattgggagtacatttttttaggtctcttaaactttaatttcacacagtaaattttgaatctcataaggaagcatatttgaacctagtcaatttaatcttagtgttcccttgaaaactttttttccctacaaaattttaagtgaaaaatacaatagtaaattaagattacactggggaaaaaaatgcaggtatcactttactccattgttatctgacctagagcttaattaagttttagaaatatgtaataccttccatcattccatcatccttaaattctgttaccaaataatggctaatgttacaaaaagttatactccagagacccaaagcttgacatttacctaatgtatgagaaaatattaccaattaacaataaagaatgatcatattttt

SEQ ID NO: 7312 - protein, 292 aa, Homo sapiens; identical to SEQ ID NO: 7310

SEQ ID NO: 7313 - DNA, 7493 bp, Homo sapiens
gccccctttctgtgaaacgcatgccatcttctccatttgtcagtttgatgctgtaacgtacatggggttttgcaagagcttcaaaactgtctgcagacgtcaatttcgcccccctcccccttgtgagaactcgctacgtagccagcaactgtgtagtgtctacaaatgatgaaaacgatcagaaatgcgattaggtgtcggggaaaaaagggtttcccctgtttttaacttgtatttttactttaattgttacaatcttgatattcttaacgtgacttttttgggaaaccaccaagtgctttttaagcaaggagttactggtatttatgcccttaatattccttcattataggcttattgaatacgttaatatctcagtaagtgtatttgaattataattgactggctttttctgtggtactaatgtgaaaggaaaaaatattaggactgcaaaaataaatgccgcttgaatattatctgtagtgcttgcttttgcattactgtagtagaatgcttttagctggttttaagctgctaattagccgttcgtagccgaagaatgaatacaagtaatcctagttaataaatggccaaagcttgactccccaaaatgccagagcaatttatgaggtatatttcaggaaatacatatgtatatatttcgtgggggagtggagggtctgtctcttagggaatgtcttggcagttgaatacttctgattgtatatttcgtgtaacacactggagaaaagaacagtgtttaatgtcagccttcattttcttctaacttgtatgtatagttttctcatcgaaaattcatttttgtaggttagtatgaaggaaatagcgtttggattttttgctttatattttcttgtttgggccaattaagggttgttaaataaattggaaaaaatcctactactttaaagagcgtaaaaacgtggaacatgtcttatctaaactcttaaaacgtgtttgttgctgtcaaatatgacttgagttcctgatcgggttatcattgcctaaagacacaggactattttttttattaagataactttgtttttatcttaataaaagagatgatagtcatttcctgacagttttgtctgacggaatgccttctgtataatagtttaaaataattatttttagtgtttggaaaacagcatttaaaagtttgaacagcagaagtctgttttaagaagcttctgttaacccttgaaaagaatcttcctgtgggatattaaaattttggattgaacttgtgcaaacagtactggatttggaaggtctggattctcatcctggctgttccactaagcagctgtctgtccttggacatatcacctaccctctctgaatctgtttagttgtgtgtaaggtggaatacctacccgaaggtttttctgtaaggtacattaaataatacatgtacaattctttttgaattgtaaagggctttatgaacatcaattataatcatttcgcttattaggttctgcagaaagtattctctcaaaagttatactttcatcaagaatgaaaaagactttgtaatggaactctaaaaaactgaaacacgtatcatatgacattattcctttcctatatgtatttcatgcatggaattaaaacagaatgtagccttttcagccatgaaggatgctgagtgtttagatttgcaaaccatttttgttcatatatttatatgaatctctacatatttttaagatttttttttcatatctaaagttggcgggagttatagtgaaaagtgattataaagattcacatatattaatttattcttaacagaattagagaatgatctcaccattttcttaagttcccaagcaatatgatagcatattagtctgaggattataccatagtaagaagcctataattttaacataaggtccatttgtttttgtttcacaaaataataccgttttctgaagaaaagggctataaacttatgttagcaaatagtagtacataatgaggaatttaaaagtcagtttcacctttgagtcccaggaggctctgtatatatcattgttatcctaaaatgacatctaacagtaggttaagttatataggaaaaaatgtgcttttctgtaattaatttattaggcattttcactaatttgtgcattttatatctctgaagagcacactgctagcaacctgattgtaaatgaccagaaggacttatatccaacctatgtgacttaaacatacacttaagtactctaaaccactatttaaaaaatacttctagagagattctgaaatcttaatttggttgcactttctggtaatatattttttgaaaactattttgatatttctttcatataacattattggatctgtatcactaagttaattgtctaaaaggtaactgatttcatcaaaccttccagtattaataatttttaagccattttgaaactgaggcctaaaatactgaaatgcttatgtcgttgtacttactcctttctgaaatgatcagatttttaaaaaatggatttctcatataaataatattatcaaaaaaggatttctcatataaataatattatcaaaaaagctgattttaaaagtttctcccaaagtcttattctagtaattatagagacctaggtaatgagtggcagatatatctgcctttcagatatgccgtaatgtgaaaaataacacagtcatgtgatattctttattaactaaaactgtgttgtttttattttggagtagttctcataattcattggtagggaactatccagtatttatattcctatgtatgtatatcagattaattttgaggcttggtattcctaaaagatttggatgtgtgtatttctttaacttgacgtaaacatgtatcacaaacatatcttttaattccaattaaaggggtgctttggcacatgctgaaatctgggatttttttttttgactttgataaatttatcaaaaagattggaaccaaatgttaattagggtaagttgtctttgaaagtaaagtgaactgttttatttaatggaattgtgtgttttttgttgttgtcgtttgtttttacagtgtgcttaagtaagtttaattcagcttaattacatcagtttaaaagatcttgaagctttctttttttcttttaaaaaaacagattctgaaggaagatttccattaggtaatttgtttaatcagtgcaagcgaaattaagggaaaatggatgtagaaaatgagcagatactgaatgtaaaccctgcagatcctgataacttaagtgactctctcttttccggtgatgaagaaaatgctgggactgaggaaataaagaatgaaataaatggaaattggatttcagcatcctccattaacgaagctagaattaatgccaaggcaaaaaggcgactaaggaaaaactcatcccgggactctggcagaggcgattcggtcagcgacagtgggagtgacgcccttagaagtggattaactgtgccaaccagtccaaagggaaggttgctggataggcgatccagatctgggaaaggaaggggactaccaaagaaaggtggtgcaggaggcaaaggtgtctggggtacacctggacaggtgtatgatgtggaggaggtggatgtgaaagatcctaactatgatgatgaccaggagaactgtgtttatgaaactgtagttttgcctttggatgaaagggcatttgagaagactttaacaccaatcatacaggaatattttgagcatggagatactaatgaagttgcggaaatgttaagagatttaaatcttggtgaaatgaaaagtggagtaccagtgttggcagtatccttagcattggaggggaaggctagtcatagagagatgacatctaagcttctttctgacctttgtgggacagtaatgagcacaactgatgtggaaaaatcatttgataaattgttgaaagatctacctgaattagcactggatactcctagagcaccacagttggtgggccagtttattgctagagctgttggagatggaattttatgtaatacctatattgatagttacaaaggaactgtagattgtgtgcaggctaggtaagtaaatcacttttcctacttagaatttcaaaataggggaaaattctacaggatcctattgaaatgacacttgtgttaatcagacactctgtacatctgtttgtcacttctctatattctccactgttaaaatggagagactattggcatgatataccaggaagaggacagtactataatggaaaagttctggagtttagctaaatcattaattaccttcatgtcaagccactcttctttgggcctcagtttctttatttatgaaacaaaaccattggacagatctttaagttctgttttcaggttctagcattgtgtaatagtttaatattctaataagatggataaccttaagaagagaggcctgatttatagttttattttgtatttatctactgtagaaatcttagtcagaaagtatctttttcactcttgtgatttagtataattaatatgatatttggtataactaaatgtgatatttgggagttatgctatttgatttttcttaacttcttggagacttggactcagccatgtcttagttttcctcaggtctatatattaacttaattttctagggctacttcacatcatagtggaatggtgtccctgggtaggaaggcatggatctaggtgaaagttaattatatgtgaagtgtttcttctcagtgtagatcagttattttgtaatgtgttttgatttttcttgaatgagaaatgaaatagagcatgagaatattaacatgaggatcaacttctttttgctcctttttgttttgaaaaagtgttttgaattttattttgcttttatgttatgtgaaagatttagggcatataggattttgtcagctttatccctaatttagtaaactttaggtatgtccagctatcaaacttaaatttttttctttctctgtagagctgctctggataaggctaccgtgcttctgagtatgtctaaaggtggaaagcgtaaagatagtgtgtggggctctggaggtgggcagcaatctgtcaatcaccttgttaaagagattgatatgctgctgaaagaatatttactctctggagacatatctgaagctgaacattgccttaaggaactggaagtacctcattttcaccatgagcttgtatatgaagctattataatggttttagagtcaactggagaaagtacatttaagatgattttggatttattaaagtccctttggaagtcttctaccattactgtagaccaaatgaaaagaggttatgagagaatttacaatgaaattccggacattaatctggatgtcccacattcatactctgtgctggagcggtttgtagaagaatgttttcaggctggaataatttccaaacaactcagagatctttgtccttcaaggggcagaaagcgttttgtaagcgaaggagatggaggtcgtcttaaaccagagagctactgaatataagaactcttgcagtcttagatgttataaaaatatatatctgaattgtaagagttgttagcacaagttttttttttttttttttttaagcacttgttttgggtacaaggcatttctgacattttataaacctacatttaaggggaatttttaaaggaaatgttttttcttttttttttgtttttcgagggggcaaggagggacagaaaagtaacctcttcttaagtggaatattctaataagctaccttttgtaagtgccatgtttattatctaatcattccaagttttgcattgatgtctgactgccactcctttctttcaaggacagtgttttttgtagtaaaatcactggtttatacaaagctttatttagggggtaaagttaagctgctaaaaccccatgttggctgctgctgttgagatactgtgctttgggagtaaaaaaagaaagttatttctttgtcttaaagaatttttaaaaaattagtcatgagacttattcatctttccagggaacatactgattggtcttaaaagactagacagttaagtaaaaggtggctggaacatctatttttctacaaaactggaaaaatgaacctggttctagaagaatgtacaccaaaataaaacatgtgaagcagtattgattctttattgggagtacatttttttaggtctcttaaactttaatttcacacagtaaattttgaatctcataaggaagcatatttgaacctagtcaatttaatcttagtgttcccttgaaaactttttttccctacaaaattttaagtgaaaaatacaatagtaaattaagattacactggggaaaaaaatgcaggtatcactttactccattgttatctgacctagagcttaattaagttttagaaatatgtaataccttccatcattccatcatccttaaattctgttaccaaataatggctaatgttacaaaaagttatactccagagacccaaagcttgacatttacctaatgtatgagaaaatattaccaattaacaataaagaatgatcatatttttaacctcttttacatagcctaataactcagcaaggcctcaacgtctgtgctaatttaaactgccaaatattgactgcagcaaacaagaattatattcagaatttatgagggtactgttaggagtatactgcttacaggtttagatatagtctgttagaattaaaaccaagtttagtgttcatatttacctcatgggctttatcaagcccatattacctcagcttatatatagttaccatttttaggtttttaattgtttgacacttggatgataaatgcagtcattttattctcaagtgcttaaaattaatgtaattaaaagcttagctgactacagaataggtgagggtttcttaaaaatgagatttaagggctgggcacggtggctcatgcctgtaatcccagcactttgggaggccgaggtgggcggatcacttgaggttgggagttcatgaccagcttgaccaacatgaagaaaccctgtctctattaaaaatacaaaagtagccaggcatggtggcgcatgcgtgtaatcccagctacttgggaggctgaggcaggagaattgcttgaacctgggaggcagaggttgcagtgagtcgagatggtgccattgctctcgtttgggcaacaagagtgaaactcttgtctcaaaaaaaaaaaaaaatgaggtttaagacagttttgtcattactggtgggatctggtcacacaagatagcattaaacgtgacatggcacataaaattggttaaaaaattttgttttttaattacgtaatgtaaaagcccaacaaacactttatgcaagattggaatgtatcttcaaattcagatttaataaacatgtaaagatcctctgt

SEQ ID NO: 7314 - protein, 292 aa, Homo sapiens; identical to SEQ ID NO: 7310

SEQ ID NO: 7315 - DNA, 7516 bp, Homo sapiens
gccccctttctgtgaaacgcatgccatcttctccatttgtcagtttgatgctgtaacgtacatggggttttgcaagagcttcaaaactgtctgcagacgtcaatttcgcccccctcccccttgtgagaactcgctacgtagccagcaactgtgtagtgtctacaaatgatgaaaacgatcagaaatgcgattaggtgtcggggaaaaaagggtttcccctgtttttaacttgtatttttactttaattgttacaatcttgatattcttaacgtgacttttttgggaaaccaccaagtgctttttaagcaaggagttactggtatttatgcccttaatattccttcattataggcttattgaatacgttaatatctcagtaagtgtatttgaattataattgactggctttttctgtggtactaatgtgaaaggaaaaaatattaggactgcaaaaataaatgccgcttgaatattatctgtagtgcttgcttttgcattactgtagtagaatgcttttagctggttttaagctgctaattagccgttcgtagccgaagaatgaatacaagtaatcctagttaataaatggccaaagcttgactccccaaaatgccagagcaatttatgaggtatatttcaggaaatacatatgtatatatttcgtgggggagtggagggtctgtctcttagggaatgtcttggcagttgaatacttctgattgtatatttcgtgtaacacactggagaaaagaacagtgtttaatgtcagccttcattttcttctaacttgtatgtatagttttctcatcgaaaattcatttttgtaggttagtatgaaggaaatagcgtttggattttttgctttatattttcttgtttgggccaattaagggttgttaaataaattggaaaaaatcctactactttaaagagcgtaaaaacgtggaacatgtcttatctaaactcttaaaacgtgtttgttgctgtcaaatatgacttgagttcctgatcgggttatcattgcctaaagacacaggactattttttttattaagataactttgtttttatcttaataaaagagatgatagtcatttcctgacagttttgtctgacggaatgccttctgtataatagtttaaaataattatttttagtgtttggaaaacagcatttaaaagtttgaacagcagaagtctgttttaagaagcttctgttaacccttgaaaagaatcttcctgtgggatattaaaattttggattgaacttgtgcaaacagtactggatttggaaggtctggattctcatcctggctgttccactaagcagctgtctgtccttggacatatcacctaccctctctgaatctgtttagttgtgtgtaaggtggaatacctacccgaaggtttttctgtaaggtacattaaataatacatgtacaattctttttgaattgtaaagggctttatgaacatcaattataatcatttcgcttattaggttctgcagaaagtattctctcaaaagttatactttcatcaagaatgaaaaagactttgtaatggaactctaaaaaactgaaacacgtatcatatgacattattcctttcctatatgtatttcatgcatggaattaaaacagaatgtagccttttcagccatgaaggatgctgagtgtttagatttgcaaaccatttttgttcatatatttatatgaatctctacatatttttaagatttttttttcatatctaaagttggcgggagttatagtgaaaagtgattataaagattcacatatattaatttattcttaacagaattagagaatgatctcaccattttcttaagttcccaagcaatatgatagcatattagtctgaggattataccatagtaagaagcctataattttaacataaggtccatttgtttttgtttcacaaaataataccgttttctgaagaaaagggctataaacttatgttagcaaatagtagtacataatgaggaatttaaaagtcagtttcacctttgagtcccaggaggctctgtatatatcattgttatcctaaaatgacatctaacagtaggttaagttatataggaaaaaatgtgcttttctgtaattaatttattaggcattttcactaatttgtgcattttatatctctgaagagcacactgctagcaacctgattgtaaatgaccagaaggacttatatccaacctatgtgacttaaacatacacttaagtactctaaaccactatttaaaaaatacttctagagagattctgaaatcttaatttggttgcactttctggtaatatattttttgaaaactattttgatatttctttcatataacattattggatctgtatcactaagttaattgtctaaaaggtaactgatttcatcaaaccttccagtattaataatttttaagccattttgaaactgaggcctaaaatactgaaatgcttatgtcgttgtacttactcctttctgaaatgatcagatttttaaaaaatggatttctcatataaataatattatcaaaaaaggatttctcatataaataatattatcaaaaaagctgattttaaaagtttctcccaaagtcttattctagtaattatagagacctaggtaatgagtggcagatatatctgcctttcagatatgccgtaatgtgaaaaataacacagtcatgtgatattctttattaactaaaactgtgttgtttttattttggagtagttctcataattcattggtagggaactatccagtatttatattcctatgtatgtatatcagattaattttgaggcttggtattcctaaaagatttggatgtgtgtatttctttaacttgacgtaaacatgtatcacaaacatatcttttaattccaattaaaggggtgctttggcacatgctgaaatctgggatttttttttttgactttgataaatttatcaaaaagattggaaccaaatgttaattagggtaagttgtctttgaaagtaaagtgaactgttttatttaatggaattgtgtgttttttgttgttgtcgtttgtttttacagtgtgcttaagtaagtttaattcagcttaattacatcagtttaaaagatcttgaagctttctttttttcttttaaaaaaacagattctgaaggaagatttccattaggtaatttgtttaatcagtgcaagcgaaattaagggaaaatggatgtagaaaatgagcagatactgaatgtaaaccctgcagatcctgataacttaagtgactctctcttttccggtgatgaagaaaatgctgggactgaggaaataaagaatgaaataaatggaaattggatttcagcatcctccattaacgaagctagaattaatgccaaggcaaaaaggcgactaaggaaaaactcatcccgggactctggcagaggcgattcggtcagcgacagtgggagtgacgcccttagaagtggattaactgtgccaaccagtccaaagggaaggttgctggataggcgatccagatctgggaaaggaaggggactaccaaagaaaggtggtgcaggaggcaaaggtgtctggggtacacctggacaggtgtatgatgtggaggaggtggatgtgaaagatcctaactatgatgatgaccaggagaactgtgtttatgaaactgtagttttgcctttggatgaaagggcatttgagaagactttaacaccaatcatacaggaatattttgagcatggagatactaatgaagttgcggaaatgttaagagatttaaatcttggtgaaatgaaaagtggagtaccagtgttggcagtatccttagcattggaggggaaggctagtcatagagagatgacatctaagcttctttctgacctttgtgggacagtaatgagcacaactgatgtggaaaaatcatttgataaattgttgaaagatctacctgaattagcactggatactcctagagcaccacagttggtgggccagtttattgctagagctgttggagatggaattttatgtaatacctatattgatagttacaaaggaactgtagattgtgtgcaggctaggtaagtaaatcacttttcctacttagaatttcaaaataggggaaaattctacaggatcctattgaaatgacacttgtgttaatcagacactctgtacatctgtttgtcacttctctatattctccactgttaaaatggagagactattggcatgatataccaggaagaggacagtactataatggaaaagttctggagtttagctaaatcattaattaccttcatgtcaagccactcttctttgggcctcagtttctttatttatgaaacaaaaccattggacagatctttaagttctgttttcaggttctagcattgtgtaatagtttaatattctaataagatggataaccttaagaagagaggcctgatttatagttttattttgtatttatctactgtagaaatcttagtcagaaagtatctttttcactcttgtgatttagtataattaatatgatatttggtataactaaatgtgatatttgggagttatgctatttgatttttcttaacttcttggagacttggactcagccatgtcttagttttcctcaggtctatatattaacttaattttctagggctacttcacatcatagtggaatggtgtccctgggtaggaaggcatggatctaggtgaaagttaattatatgtgaagtgtttcttctcagtgtagatcagttattttgtaatgtgttttgatttttcttgaatgagaaatgaaatagagcatgagaatattaacatgaggatcaacttctttttgctcctttttgttttgaaaaagtgttttgaattttattttgcttttatgttatgtgaaagatttagggcatataggattttgtcagctttatccctaatttagtaaactttaggtatgtccagctatcaaacttaaatttttttctttctctgtagagctgctctggataaggctaccgtgcttctgagtatgtctaaaggtggaaagcgtaaagatagtgtgtggggctctggaggtgggcagcaatctgtcaatcaccttgttaaagagattgatatgctgctgaaagaatatttactctctggagacatatctgaagctgaacattgccttaaggaactggaagtacctcattttcaccatgagcttgtatatgaagctattataatggttttagagtcaactggagaaagtacatttaagatgattttggatttattaaagtccctttggaagtcttctaccattactgtagaccaaatgaaaagaggttatgagagaatttacaatgaaattccggacattaatctggatgtcccacattcatactctgtgctggagcggtttgtagaagaatgttttcaggctggaataatttccaaacaactcagagatctttgtccttcaaggggcagaaagcgttttgtaagcgaaggagatggaggtcgtcttaaaccagagagctactgaatataagaactcttgcagtcttagatgttataaaaatatatatctgaattgtaagagttgttagcacaagttttttttttttttttttttaagcacttgttttgggtacaaggcatttctgacattttataaacctacatttaaggggaatttttaaaggaaatgttttttcttttttttttgtttttcgagggggcaaggagggacagaaaagtaacctcttcttaagtggaatattctaataagctaccttttgtaagtgccatgtttattatctaatcattccaagttttgcattgatgtctgactgccactcctttctttcaaggacagtgttttttgtagtaaaatcactggtttatacaaagctttatttagggggtaaagttaagctgctaaaaccccatgttggctgctgctgttgagatactgtgctttgggagtaaaaaaagaaagttatttctttgtcttaaagaatttttaaaaaattagtcatgagacttattcatctttccagggaacatactgattggtcttaaaagactagacagttaagtaaaaggtggctggaacatctatttttctacaaaactggaaaaatgaacctggttctagaagaatgtacaccaaaataaaacatgtgaagcagtattgattctttattgggagtacatttttttaggtctcttaaactttaatttcacacagtaaattttgaatctcataaggaagcatatttgaacctagtcaatttaatcttagtgttcccttgaaaactttttttccctacaaaattttaagtgaaaaatacaatagtaaattaagattacactggggaaaaaaatgcaggtatcactttactccattgttatctgacctagagcttaattaagttttagaaatatgtaataccttccatcattccatcatccttaaattctgttaccaaataatggctaatgttacaaaaagttatactccagagacccaaagcttgacatttacctaatgtatgagaaaatattaccaattaacaataaagaatgatcatatttttaacctcttttacatagcctaataactcagcaaggcctcaacgtctgtgctaatttaaactgccaaatattgactgcagcaaacaagaattatattcagaatttatgagggtactgttaggagtatactgcttacaggtttagatatagtctgttagaattaaaaccaagtttagtgttcatatttacctcatgggctttatcaagcccatattacctcagcttatatatagttaccatttttaggtttttaattgtttgacacttggatgataaatgcagtcattttattctcaagtgcttaaaattaatgtaattaaaagcttagctgactacagaataggtgagggtttcttaaaaatgagatttaagggctgggcacggtggctcatgcctgtaatcccagcactttgggaggccgaggtgggcggatcacttgaggttgggagttcatgaccagcttgaccaacatgaagaaaccctgtctctattaaaaatacaaaagtagccaggcatggtggcgcatgcgtgtaatcccagctacttgggaggctgaggcaggagaattgcttgaacctgggaggcagaggttgcagtgagtcgagatggtgccattgctctcgtttgggcaacaagagtgaaactcttgtctcaaaaaaaaaaaaaaatgaggtttaagacagttttgtcattactggtgggatctggtcacacaagatagcattaaacgtgacatggcacataaaattggttaaaaaattttgttttttaattacgtaatgtaaaagcccaacaaacactttatgcaagattggaatgtatcttcaaattcagatttaataaacatgtaaagatcctctgtatataaaagttgtatttaatccc

SEQ ID NO: 7316 - protein, 292 aa, Homo sapiens; identical to SEQ ID NO: 7310

SEQ ID NO: 7317 - DNA, 461 bp, Homo sapiens
agtgcaagcgaaattaagggaaaatggatgtagaaaatgagcagatactgaatgtaaaccctgcagatcctgataacttaagtgactctctcttttccggtgatgaagaaaatgctgggactgaggaaataaagaatgaaataaatggaaattggatttcagcatcctccattaacgaagctagaattaatgccaaggcaaaaaggcgactaaggaaaaactcatcccgggactctggcagaggcgattcggtcagcgacagtgggagtgacgcccttagaagtggattaactgtgccaaccagtccaaagggaaggttgctggataggcgatccagatctgggaaaggaaggggactaccaaagaaaggttggtatatatcatgtccaacaaatggaagataaacaagtggaaaaaaattgtctggttcttgtactacactttccttgttctaggaatga

SEQ ID NO: 7318 - protein, 126 aa, Homo sapiens
MDVENEQILNVNPADPDNLSDSLFSGDEENAGTEEIKNEINGNWISASSINEARINAKAKRRLRKNSSRDSGRGDSVSDSGSDALRSGLTVPTSPKGRLLDRRSRSGKGRGLPKKGWYISCPTNGR

SEQ ID NO: 7319 - DNA, 4899 bp, Homo sapiens
gtttatgaacttttttgacttcatgtttgtagtttactcatacatgtgtcaaatcatatgtataaatgttttggattaggaaaccaagtaaactgacagtaatacatgcataactttcacttggtttctgtagtgagtcaaaaatagctctttagaaattcacttaggattattaagttgtccatttttcagtaaattctgttaatatagtttgtttctatagtaatgataattgagaatatcttcttttgaatattatgagttacagatattagattccttttaaatattactgtttagaatggtaactatataatacattttgttttggggacatgcgcatctttcttttagggataatgctgaaaatgtaaatttttaatagattgtgaagtgaattttttattttttttaatggaaaaaatttaaagtagaatagtataatctgcttgtactcctctcttagctttacaaacttaaataattacaaactcataggcagtcttgtttaattccatttactctccgtcttctattggcccctttgccccaccctgttttggattattttgaagcaaatcccaaatgttttgattatgttttttgaaaatttgtctttgcacaaggtgagacacggtgatggaaattttagacaggaaaacgttaagagtatgtgttaggttgtttttattgtgtgttgtatgtatgtatttaagtgttttaactaatagatatggaaatatttctaagagaacatgaaaaatatgaaactagtaggattcaagtactgtagaatctttgctaaaaatgtattaatctttcaagtatatgtttttaggctgaagccagtcacaagttgtaaatatagcagtcccctcttatccgtggtttcactttccgcagtttcagttacccatggtccaatgtggtttgaaaatattgagtggaaactttcagaagtaattcataagttttaaattgcatgccattctgagtagtgtgatgagatctcctgctgtccagcttcatccacctcatcctgcccaggatgtgagccattccgttgtccagcgtgtatccgcaatgtatacactactcgtgcattcgtcacatggtagctgtctaggttatcggattgagaaaacagtatttattgggttcggtactatctgtggtttaaggcatcctcggacggggcttggaacataccccttgtagataagggggcactacatttcagagcttttttagcatggggagagaggaatggtttgatgatggatgttaattttctttttgaaatttcaattgaacagtgcttttttccttagagattttttttctgtcactacaacattgatctttgtgttatactttttattataataatgctaatcgtgaaggctttggttcctgcttcatttttttttaaagtgaaattttaattaaaacaccatttatgataggaagccatcatgaaactttttgattactaaaagattggttttgagagagacataaaaattttgagagaaaaaattaacagaagacatgggggttgggagcaaattatgtatttgctgtggttaatgattctaatctatatattggcttattgtattctgattttgtaaaagagcagtgacatataaattctactatttttattatgatttattattattattttttagctttgttgtccaggctggagtgcagtgatgaattatagctcactgcagcctcgaactcttgggcttaagagatccttctgcctcagcttcctgagtagctaggactacaggggcaagctaccatgtctggctaatttttaaaacttttttgtagagacagggtcttgctatgtttcccaggctagtattgaactccaggcctcaagtgaacctcccgcctttgcctcccaaagtgttgggattataggtatgagtctccttgcctggcctagattctatttttatatgcgatcaatgtatgtagcatgtctttgtcttgtgctaagtggggattattaaccacttagaatataaaattgtacaacaatttcacttgtttatttgcattttgttttttataactcttactcccttttcccctcaaaggagaactgtgtttatgaaactgtagttttgcctttggatgaaagggcatttgagaagactttaacaccaatcatacaggaatattttgagcatggagatactaatgaagttgcggaaatgttaagagatttaaatcttggtgaaatgaaaagtggagtaccagtgttggcagtatccttagcattggaggggaaggctagtcatagagagatgacatctaagcttctttctgacctttgtgggacagtaatgagcacaactgatgtggaaaaatcatttgataaattgttgaaagatctacctgaattagcactggatactcctagagcaccacagttggtgggccagtttattgctagagctgttggagatggaattttatgtaatacctatattgatagttacaaaggaactgtagattgtgtgcaggctaggtaagtaaatcacttttcctacttagaatttcaaaataggggaaaattctacaggatcctattgaaatgacacttgtgttaatcagacactctgtacatctgtttgtcacttctctatattctccactgttaaaatggagagactattggcatgatataccaggaagaggacagtactataatggaaaagttctggagtttagctaaatcattaattaccttcatgtcaagccactcttctttgggcctcagtttctttatttatgaaacaaaaccattggacagatctttaagttctgttttcaggttctagcattgtgtaatagtttaatattctaataagatggataaccttaagaagagaggcctgatttatagttttattttgtatttatctactgtagaaatcttagtcagaaagtatctttttcactcttgtgatttagtataattaatatgatatttggtataactaaatgtgatatttgggagttatgctatttgatttttcttaacttcttggagacttggactcagccatgtcttagttttcctcaggtctatatattaacttaattttctagggctacttcacatcatagtggaatggtgtccctgggtaggaaggcatggatctaggtgaaagttaattatatgtgaagtgtttcttctcagtgtagatcagttattttgtaatgtgttttgatttttcttgaatgagaaatgaaatagagcatgagaatattaacatgaggatcaacttctttttgctcctttttgttttgaaaaagtgttttgaattttattttgcttttatgttatgtgaaagatttagggcatataggattttgtcagctttatccctaatttagtaaactttaggtatgtccagctatcaaacttaaatttttttctttctctgtagagctgctctggataaggctaccgtgcttctgagtatgtctaaaggtggaaagcgtaaagatagtgtgtggggctctggaggtgggcagcaatctgtcaatcaccttgttaaagaggtaatgattgggtattgtttttaacttaatttatatgtattcctctgagtgaaataaattgtggctactagctggtatttttatggacaaaaattaagttcggtcttacagctgcaattggaaaatgaaataatttttttaatatgtggctttataaccttttattataaattatatgattaaaaaatgagtctgttaaaatggctttcatgaataattataagcaagccatctatgaacttcaaaggaatgcctgaaatctttttcttatagtattatttaataattttcaaatgctgttgaaatgagattttctgtgttttagctattcaataaatacgcttttatatgagcaatttaaaactagatagtcttaaataatgagttatgaattatgagcactagagcagatcagagtgttagatttttgtgaggacattcactacccatatgcatgttttaaaagaaaattgattgtaatcccagcactttgagaggctgaggcgggtggattgcttgaggccaggagtttgagaccagcctggtcaacatggtgaaaccccgtttctactaaaaatacataataattagccaggcatggtggtgcgcacctgtaatcccagctactcgggaggctgaggcaccagtattgcttgaacccaggaggaggaggttgcagtgagctgagatcacaccactgcactccagcatgggtgacagagcaagactctgtctcaaaaaaaaaaaaaaaaaaaagcgatttattgcattaaaatgccagatttattccctatggattttttttttttctggctgcaatgtggtgtcctataacaagaaaccaaaaaacagaaaaaactccttatctgcagatctctttaagaaaaggcatgcaactagaagatttgtagttcatgtgcttctgatttttgagtataatcttttcatgtaactacaattttgatttttagtaagtcttttaatgaggtgtgtgtgtgtgtttgtgtatgtgtatctagcttaagtgttaaggagttcaaattgtagttagagccttgactgtttttgcttttatatatgttaaaatagatgagtcagtgtttgtaatgtcgtgattgcagtatctgttttttaaaaattaaacaattattagaaaaattgaggtataaaaatagtcaagatgccagggcaattaggcaggaaagataaaaggcatccagattggaaaggaggagataaaactagttgtattcccagataacatgatctgtatacagaaaatttgaatgaatccacattttttaa

SEQ ID NO: 7320 - protein, 106 aa, Homo sapiens
MLRDLNLGEMKSGVPVLAVSLALEGKASHREMTSKLLSDLCGTVMSTTDVEKSFDKLLKDLPELALDTPRAPQLVGQFIARAVGDGILCNTYIDSYKGTVDCVQAR

SEQ ID NO: 7321 - DNA, 906 bp, Homo sapiens
catgggggttgggagcaaattatgtatttgctgtggttaatgattctaatctatatattggcttattgtattctgattttgtaaaagagcagtgacatataaattctactatttttattatgatttattattattattttttagctttgttgtccaggctggagtgcagtgatgaattatagctcactgcagcctcgaactcttgggcttaagagatccttctgcctcagcttcctgagtagctaggactacaggggcaagctaccatgtctggctaatttttaaaacttttttgtagagacagggtcttgctatgtttcccaggctagtattgaactccaggcctcaagtgaacctcccgcctttgcctcccaaagtgttgggattataggtatgagtctccttgcctggcctagattctatttttatatgcgatcaatgtatgtagcatgtctttgtcttgtgctaagtggggattattaaccacttagaatataaaattgtacaacaatttcacttgtttatttgcattttgttttttataactcttactcccttttcccctcaaaggagaactgtgtttatgaaactgtagttttgcctttggatgaaagggcatttgagaagactttaacaccaatcatacaggaatattttgagcatggagatactaatgaagttgcggaaatgttaagagatttaaatcttggtgaaatgaaaagtggagtaccagtgttggcagtatccttagcattggaggggaaggctagtcatagagagatgacatctaagcttctttctgacctttgtgggacagtaatgagcacaactgatgtggaaaaatcatttgataaattgttgaaagatctacctgaattagcactggatactcctagagcaccacag

SEQ ID NO: 7322 - protein, 72 aa, Homo sapiens
MLRDLNLGEMKSGVPVLAVSLALEGKASHREMTSKLLSDLCGTVMSTTDVEKSFDKLLKDLPELALDTPRAP

SEQ ID NO: 7323 - DNA, 590 bp, Homo sapiens
tagagctgctctggataaggctaccgtgcttctgagtatgtctaaaggtggaaagcgtaaagatagtgtgtggggctctggaggtgggcagcaatctgtcaatcaccttgttaaagagattgatatgctgctgaaagaatatttactctctggagacatatctgaagctgaacattgccttaaggaactggaagtacctcattttcaccatgagcttgtatatgaagctattataatggttttagagtcaactggagaaagtacatttaagatgattttggatttattaaagtccctttggaagtcttctaccattactgtagaccaaatgaaaagaggttatgagagaatttacaatgaaattccggacattaatctggatgtcccacattcatactctgtgctggagcggtttgtagaagaatgttttcaggctggaataatttccaaacaactcagagatctttgtccttcaaggggcagaaagcgttttgtaagcgaaggagatggaggtcgtcttaaaccagagagctactgaatataagaactcttgcagtcttagatgttataaaaatatatatctgaattgt

SEQ ID NO: 7324 - protein, 166 aa, Homo sapiens
MSKGGKRKDSVWGSGGGQQSVNHLVKEIDMLLKEYLLSGDISEAEHCLKELEVPHFHHELVYEAIIMVLESTGESTFKMILDLLKSLWKSSTITVDQMKRGYERIYNEIPDINLDVPHSYSVLERFVEECFQAGIISKQLRDLCPSRGRKRFVSEGDGGRLKPESY

SEQ ID NO: 7325 - DNA, 996 bp, Homo sapiens
tagagctgctctggataaggctaccgtgcttctgagtatgtctaaaggtggaaagcgtaaagatagtgtgtggggctctggaggtgggcagcaatctgtcaatcaccttgttaaagagattgatatgctgctgaaagaatatttactctctggagacatatctgaagctgaacattgccttaaggaactggaagtacctcattttcaccatgagcttgtatatgaagctattataatggttttagagtcaactggagaaagtacatttaagatgattttggatttattaaagtccctttggaagtcttctaccattactgtagaccaaatgaaaagaggttatgagagaatttacaatgaaattccggacattaatctggatgtcccacattcatactctgtgctggagcggtttgtagaagaatgttttcaggctggaataatttccaaacaactcagagatctttgtccttcaaggggcagaaagcgttttgtaagcgaaggagatggaggtcgtcttaaaccagagagctactgaatataagaactcttgcagtcttagatgttataaaaatatatatctgaattgtaagagttgttagcacaagttttttttttttttttttttaagcacttgttttgggtacaaggcatttctgacattttataaacctacatttaaggggaatttttaaaggaaatgttttttcttttttttttgtttttcgagggggcaaggagggacagaaaagtaacctcttcttaagtggaatattctaataagctaccttttgtaagtgccatgtttattatctaatcattccaagttttgcattgatgtctgactgccactcctttctttcaaggacagtgttttttgtagtaaaatcactggtttatacaaagctttatttagggggtaaagttaagctgctaaaaccccatgttggctgctgctgttgagatactgtgctttgggagtaaaaaaagaaagtt

SEQ ID NO: 7326 - protein, 166 aa, Homo sapiens; identical to SEQ ID NO: 7324

SEQ ID NO: 7327 - DNA, 1084 bp, Homo sapiens
gctctggataaggctaccgtgcttctgagtatgtctaaaggtggaaagcgtaaagatagtgtgtggggctctggaggtgggcagcaatctgtcaatcaccttgttaaagaggctattataatggttttagagtcaactggagaaagtacatttaagatgattttggatttattaaagtccctttggaagtcttctaccattactgtagaccaaatgaaaagaggttatgagagaatttacaatgaaattccggacattaatctggatgtcccacattcatactctgtgctggagcggtttgtagaagaatgttttcaggctggaataatttccaaacaactcagagatctttgtccttcaaggggcagaaagcgttttgtaagcgaaggagatggaggtcgtcttaaaccagagagctactgaatataagaactcttgcagtcttagatgttataaaaatatatatctgaattgtaagagttgttagcacaagttttttttttttttttttttaagcacttgttttgggtacaaggcatttctgacattttataaacctacatttaaggggaatttttaaaggaaatgttttttcttttttttttgtttttcgagggggcaaggagggacagaaaagtaacctcttcttaagtggaatattctaataagctaccttttgtaagtgccatgtttattatctaatcattccaagttttgcattgatgtctgactgccactcctttctttcaaggacagtgttttttgtagtaaaatcactggtttatacaaagctttatttagggggtaaagttaagctgctaaaaccccatgttggctgctgctgttgagatactgtgctttgggagtaaaaaaagaaagttatttctttgtcttaaagaatttttaaaaaattagtcatgagacttattcatctttccagggaacatactgattggtcttaaaagactagacagttaagtaaaaggtggctggaacatctatttttctacaaaactggaaaaatgaacctggttctagaagaatgtacaccaaaataaaacatgtgaagcagtattgattcttt

SEQ ID NO: 7328 - protein, 130 aa, Homo sapiens
MSKGGKRKDSVWGSGGGQQSVNHLVKEAIIMVLESTGESTFKMILDLLKSLWKSSTITVDQMKRGYERIYNEIPDINLDVPHSYSVLERFVEECFQAGIISKQLRDLCPSRGRKRFVSEGDGGRLKPESY

SEQ ID NO: 7329 - DNA, 1480 bp, Homo sapiens
gctctggataaggctaccgtgcttctgagtatgtctaaaggtggaaagcgtaaagatagtgtgtggggctctggaggtgggcagcaatctgtcaatcaccttgttaaagaggctattataatggttttagagtcaactggagaaagtacatttaagatgattttggatttattaaagtccctttggaagtcttctaccattactgtagaccaaatgaaaagaggttatgagagaatttacaatgaaattccggacattaatctggatgtcccacattcatactctgtgctggagcggtttgtagaagaatgttttcaggctggaataatttccaaacaactcagagatctttgtccttcaaggggcagaaagcgttttgtaagcgaaggagatggaggtcgtcttaaaccagagagctactgaatataagaactcttgcagtcttagatgttataaaaatatatatctgaattgtaagagttgttagcacaagttttttttttttttttttttaagcacttgttttgggtacaaggcatttctgacattttataaacctacatttaaggggaatttttaaaggaaatgttttttcttttttttttgtttttcgagggggcaaggagggacagaaaagtaacctcttcttaagtggaatattctaataagctaccttttgtaagtgccatgtttattatctaatcattccaagttttgcattgatgtctgactgccactcctttctttcaaggacagtgttttttgtagtaaaatcactggtttatacaaagctttatttagggggtaaagttaagctgctaaaaccccatgttggctgctgctgttgagatactgtgctttgggagtaaaaaaagaaagttatttctttgtcttaaagaatttttaaaaaattagtcatgagacttattcatctttccagggaacatactgattggtcttaaaagactagacagttaagtaaaaggtggctggaacatctatttttctacaaaactggaaaaatgaacctggttctagaagaatgtacaccaaaataaaacatgtgaagcagtattgattctttattgggagtacatttttttaggtctcttaaactttaatttcacacagtaaattttgaatctcataaggaagcatatttgaacctagtcaatttaatcttagtgttcccttgaaaactttttttccctacaaaattttaagtgaaaaatacaatagtaaattaagattacactggggaaaaaaatgcaggtatcactttactccattgttatctgacctagagcttaattaagttttagaaatatgtaataccttccatcattccatcatccttaaattctgttaccaaataatggctaatgttacaaaaagttatactccagagacccaaagcttgacatttacctaatgtatgagaaaatattaccaattaacaataaagaatgatcatattttt

SEQ ID NO: 7330 - protein, 130 aa, Homo sapiens; identical to SEQ ID NO: 7328

SEQ ID NO: 7331 - DNA, 2340 bp, Homo sapiens
gctctggataaggctaccgtgcttctgagtatgtctaaaggtggaaagcgtaaagatagtgtgtggggctctggaggtgggcagcaatctgtcaatcaccttgttaaagaggctattataatggttttagagtcaactggagaaagtacatttaagatgattttggatttattaaagtccctttggaagtcttctaccattactgtagaccaaatgaaaagaggttatgagagaatttacaatgaaattccggacattaatctggatgtcccacattcatactctgtgctggagcggtttgtagaagaatgttttcaggctggaataatttccaaacaactcagagatctttgtccttcaaggggcagaaagcgttttgtaagcgaaggagatggaggtcgtcttaaaccagagagctactgaatataagaactcttgcagtcttagatgttataaaaatatatatctgaattgtaagagttgttagcacaagttttttttttttttttttttaagcacttgttttgggtacaaggcatttctgacattttataaacctacatttaaggggaatttttaaaggaaatgttttttcttttttttttgtttttcgagggggcaaggagggacagaaaagtaacctcttcttaagtggaatattctaataagctaccttttgtaagtgccatgtttattatctaatcattccaagttttgcattgatgtctgactgccactcctttctttcaaggacagtgttttttgtagtaaaatcactggtttatacaaagctttatttagggggtaaagttaagctgctaaaaccccatgttggctgctgctgttgagatactgtgctttgggagtaaaaaaagaaagttatttctttgtcttaaagaatttttaaaaaattagtcatgagacttattcatctttccagggaacatactgattggtcttaaaagactagacagttaagtaaaaggtggctggaacatctatttttctacaaaactggaaaaatgaacctggttctagaagaatgtacaccaaaataaaacatgtgaagcagtattgattctttattgggagtacatttttttaggtctcttaaactttaatttcacacagtaaattttgaatctcataaggaagcatatttgaacctagtcaatttaatcttagtgttcccttgaaaactttttttccctacaaaattttaagtgaaaaatacaatagtaaattaagattacactggggaaaaaaatgcaggtatcactttactccattgttatctgacctagagcttaattaagttttagaaatatgtaataccttccatcattccatcatccttaaattctgttaccaaataatggctaatgttacaaaaagttatactccagagacccaaagcttgacatttacctaatgtatgagaaaatattaccaattaacaataaagaatgatcatatttttaacctcttttacatagcctaataactcagcaaggcctcaacgtctgtgctaatttaaactgccaaatattgactgcagcaaacaagaattatattcagaatttatgagggtactgttaggagtatactgcttacaggtttagatatagtctgttagaattaaaaccaagtttagtgttcatatttacctcatgggctttatcaagcccatattacctcagcttatatatagttaccatttttaggtttttaattgtttgacacttggatgataaatgcagtcattttattctcaagtgcttaaaattaatgtaattaaaagcttagctgactacagaataggtgagggtttcttaaaaatgagatttaagggctgggcacggtggctcatgcctgtaatcccagcactttgggaggccgaggtgggcggatcacttgaggttgggagttcatgaccagcttgaccaacatgaagaaaccctgtctctattaaaaatacaaaagtagccaggcatggtggcgcatgcgtgtaatcccagctacttgggaggctgaggcaggagaattgcttgaacctgggaggcagaggttgcagtgagtcgagatggtgccattgctctcgtttgggcaacaagagtgaaactcttgtctcaaaaaaaaaaaaaaatgaggtttaagacagttttgtcattactggtgggatctggtcacacaagatagcattaaacgtgacatggcacataaaattggttaaaaaattttgttttttaattacgtaatgtaaaagcccaacaaacactttatgcaagattggaatgtatcttcaaattcagatttaataaacatgtaaagatcctctgt

SEQ ID NO: 7332 - protein, 130 aa, Homo sapiens; identical to SEQ ID NO: 7328

SEQ ID NO: 7333 - DNA, 2363 bp, Homo sapiens
gctctggataaggctaccgtgcttctgagtatgtctaaaggtggaaagcgtaaagatagtgtgtggggctctggaggtgggcagcaatctgtcaatcaccttgttaaagaggctattataatggttttagagtcaactggagaaagtacatttaagatgattttggatttattaaagtccctttggaagtcttctaccattactgtagaccaaatgaaaagaggttatgagagaatttacaatgaaattccggacattaatctggatgtcccacattcatactctgtgctggagcggtttgtagaagaatgttttcaggctggaataatttccaaacaactcagagatctttgtccttcaaggggcagaaagcgttttgtaagcgaaggagatggaggtcgtcttaaaccagagagctactgaatataagaactcttgcagtcttagatgttataaaaatatatatctgaattgtaagagttgttagcacaagttttttttttttttttttttaagcacttgttttgggtacaaggcatttctgacattttataaacctacatttaaggggaatttttaaaggaaatgttttttcttttttttttgtttttcgagggggcaaggagggacagaaaagtaacctcttcttaagtggaatattctaataagctaccttttgtaagtgccatgtttattatctaatcattccaagttttgcattgatgtctgactgccactcctttctttcaaggacagtgttttttgtagtaaaatcactggtttatacaaagctttatttagggggtaaagttaagctgctaaaaccccatgttggctgctgctgttgagatactgtgctttgggagtaaaaaaagaaagttatttctttgtcttaaagaatttttaaaaaattagtcatgagacttattcatctttccagggaacatactgattggtcttaaaagactagacagttaagtaaaaggtggctggaacatctatttttctacaaaactggaaaaatgaacctggttctagaagaatgtacaccaaaataaaacatgtgaagcagtattgattctttattgggagtacatttttttaggtctcttaaactttaatttcacacagtaaattttgaatctcataaggaagcatatttgaacctagtcaatttaatcttagtgttcccttgaaaactttttttccctacaaaattttaagtgaaaaatacaatagtaaattaagattacactggggaaaaaaatgcaggtatcactttactccattgttatctgacctagagcttaattaagttttagaaatatgtaataccttccatcattccatcatccttaaattctgttaccaaataatggctaatgttacaaaaagttatactccagagacccaaagcttgacatttacctaatgtatgagaaaatattaccaattaacaataaagaatgatcatatttttaacctcttttacatagcctaataactcagcaaggcctcaacgtctgtgctaatttaaactgccaaatattgactgcagcaaacaagaattatattcagaatttatgagggtactgttaggagtatactgcttacaggtttagatatagtctgttagaattaaaaccaagtttagtgttcatatttacctcatgggctttatcaagcccatattacctcagcttatatatagttaccatttttaggtttttaattgtttgacacttggatgataaatgcagtcattttattctcaagtgcttaaaattaatgtaattaaaagcttagctgactacagaataggtgagggtttcttaaaaatgagatttaagggctgggcacggtggctcatgcctgtaatcccagcactttgggaggccgaggtgggcggatcacttgaggttgggagttcatgaccagcttgaccaacatgaagaaaccctgtctctattaaaaatacaaaagtagccaggcatggtggcgcatgcgtgtaatcccagctacttgggaggctgaggcaggagaattgcttgaacctgggaggcagaggttgcagtgagtcgagatggtgccattgctctcgtttgggcaacaagagtgaaactcttgtctcaaaaaaaaaaaaaaatgaggtttaagacagttttgtcattactggtgggatctggtcacacaagatagcattaaacgtgacatggcacataaaattggttaaaaaattttgttttttaattacgtaatgtaaaagcccaacaaacactttatgcaagattggaatgtatcttcaaattcagatttaataaacatgtaaagatcctctgtatataaaagttgtatttaatccc

SEQ ID NO: 7334 - protein, 130 aa, Homo sapiens; identical to SEQ ID NO: 7328

SEQ ID NO: 7335 - DNA, 1083 bp, Homo sapiens
ccttgccaatgtctgttatttcctgactctaataaaagagaacagttgtaaaacactgtaacaaatctactttctgtgcttctcacgattcaaatctgacttcagtttaaccatttgaatatttggccttaaatacaaattgatgacatagtgatggattgtgttttatgacatttattttatatgggctaacaattctgcatgtaatttcattgttgtagggttatgagagaatttacaatgaaattccggacattaatctggatgtcccacattcatactctgtgctggagcggtttgtagaagaatgttttcaggctggaataatttccaaacaactcagagatctttgtccttcaaggggcagaaagcgttttgtaagcgaaggagatggaggtcgtcttaaaccagagagctactgaatataagaactcttgcagtcttagatgttataaaaatatatatctgaattgtaagagttgttagcacaagttttttttttttttttttttaagcacttgttttgggtacaaggcatttctgacattttataaacctacatttaaggggaatttttaaaggaaatgttttttcttttttttttgtttttcgagggggcaaggagggacagaaaagtaacctcttcttaagtggaatattctaataagctaccttttgtaagtgccatgtttattatctaatcattccaagttttgcattgatgtctgactgccactcctttctttcaaggacagtgttttttgtagtaaaatcactggtttatacaaagctttatttagggggtaaagttaagctgctaaaaccccatgttggctgctgctgttgagatactgtgctttgggagtaaaaaaagaaagttatttctttgtcttaaagaatttttaaaaaattagtcatgagacttattcatctttccagggaacatactgattggtcttaaaagactagacagttaagtaaaaggtggctggaacatctatttttctacaaaactggaaaaatgaacctggttctagaagaatgtacaccaaaataaaacatgtgaagcagtattgattcttt

SEQ ID NO: 7336 - protein, 32 aa, Homo sapiens
MFSGWNNFQTTQRSLSFKGQKAFCKRRRWRSS

SEQ ID NO: 7337 - DNA, 1479 bp, Homo sapiens
ccttgccaatgtctgttatttcctgactctaataaaagagaacagttgtaaaacactgtaacaaatctactttctgtgcttctcacgattcaaatctgacttcagtttaaccatttgaatatttggccttaaatacaaattgatgacatagtgatggattgtgttttatgacatttattttatatgggctaacaattctgcatgtaatttcattgttgtagggttatgagagaatttacaatgaaattccggacattaatctggatgtcccacattcatactctgtgctggagcggtttgtagaagaatgttttcaggctggaataatttccaaacaactcagagatctttgtccttcaaggggcagaaagcgttttgtaagcgaaggagatggaggtcgtcttaaaccagagagctactgaatataagaactcttgcagtcttagatgttataaaaatatatatctgaattgtaagagttgttagcacaagttttttttttttttttttttaagcacttgttttgggtacaaggcatttctgacattttataaacctacatttaaggggaatttttaaaggaaatgttttttcttttttttttgtttttcgagggggcaaggagggacagaaaagtaacctcttcttaagtggaatattctaataagctaccttttgtaagtgccatgtttattatctaatcattccaagttttgcattgatgtctgactgccactcctttctttcaaggacagtgttttttgtagtaaaatcactggtttatacaaagctttatttagggggtaaagttaagctgctaaaaccccatgttggctgctgctgttgagatactgtgctttgggagtaaaaaaagaaagttatttctttgtcttaaagaatttttaaaaaattagtcatgagacttattcatctttccagggaacatactgattggtcttaaaagactagacagttaagtaaaaggtggctggaacatctatttttctacaaaactggaaaaatgaacctggttctagaagaatgtacaccaaaataaaacatgtgaagcagtattgattctttattgggagtacatttttttaggtctcttaaactttaatttcacacagtaaattttgaatctcataaggaagcatatttgaacctagtcaatttaatcttagtgttcccttgaaaactttttttccctacaaaattttaagtgaaaaatacaatagtaaattaagattacactggggaaaaaaatgcaggtatcactttactccattgttatctgacctagagcttaattaagttttagaaatatgtaataccttccatcattccatcatccttaaattctgttaccaaataatggctaatgttacaaaaagttatactccagagacccaaagcttgacatttacctaatgtatgagaaaatattaccaattaacaataaagaatgatcatattttt

SEQ ID NO: 7338 - protein, 32 aa, Homo sapiens; identical to SEQ ID NO: 7336

SEQ ID NO: 7339 - DNA, 2339 bp, Homo sapiens
ccttgccaatgtctgttatttcctgactctaataaaagagaacagttgtaaaacactgtaacaaatctactttctgtgcttctcacgattcaaatctgacttcagtttaaccatttgaatatttggccttaaatacaaattgatgacatagtgatggattgtgttttatgacatttattttatatgggctaacaattctgcatgtaatttcattgttgtagggttatgagagaatttacaatgaaattccggacattaatctggatgtcccacattcatactctgtgctggagcggtttgtagaagaatgttttcaggctggaataatttccaaacaactcagagatctttgtccttcaaggggcagaaagcgttttgtaagcgaaggagatggaggtcgtcttaaaccagagagctactgaatataagaactcttgcagtcttagatgttataaaaatatatatctgaattgtaagagttgttagcacaagttttttttttttttttttttaagcacttgttttgggtacaaggcatttctgacattttataaacctacatttaaggggaatttttaaaggaaatgttttttcttttttttttgtttttcgagggggcaaggagggacagaaaagtaacctcttcttaagtggaatattctaataagctaccttttgtaagtgccatgtttattatctaatcattccaagttttgcattgatgtctgactgccactcctttctttcaaggacagtgttttttgtagtaaaatcactggtttatacaaagctttatttagggggtaaagttaagctgctaaaaccccatgttggctgctgctgttgagatactgtgctttgggagtaaaaaaagaaagttatttctttgtcttaaagaatttttaaaaaattagtcatgagacttattcatctttccagggaacatactgattggtcttaaaagactagacagttaagtaaaaggtggctggaacatctatttttctacaaaactggaaaaatgaacctggttctagaagaatgtacaccaaaataaaacatgtgaagcagtattgattctttattgggagtacatttttttaggtctcttaaactttaatttcacacagtaaattttgaatctcataaggaagcatatttgaacctagtcaatttaatcttagtgttcccttgaaaactttttttccctacaaaattttaagtgaaaaatacaatagtaaattaagattacactggggaaaaaaatgcaggtatcactttactccattgttatctgacctagagcttaattaagttttagaaatatgtaataccttccatcattccatcatccttaaattctgttaccaaataatggctaatgttacaaaaagttatactccagagacccaaagcttgacatttacctaatgtatgagaaaatattaccaattaacaataaagaatgatcatatttttaacctcttttacatagcctaataactcagcaaggcctcaacgtctgtgctaatttaaactgccaaatattgactgcagcaaacaagaattatattcagaatttatgagggtactgttaggagtatactgcttacaggtttagatatagtctgttagaattaaaaccaagtttagtgttcatatttacctcatgggctttatcaagcccatattacctcagcttatatatagttaccatttttaggtttttaattgtttgacacttggatgataaatgcagtcattttattctcaagtgcttaaaattaatgtaattaaaagcttagctgactacagaataggtgagggtttcttaaaaatgagatttaagggctgggcacggtggctcatgcctgtaatcccagcactttgggaggccgaggtgggcggatcacttgaggttgggagttcatgaccagcttgaccaacatgaagaaaccctgtctctattaaaaatacaaaagtagccaggcatggtggcgcatgcgtgtaatcccagctacttgggaggctgaggcaggagaattgcttgaacctgggaggcagaggttgcagtgagtcgagatggtgccattgctctcgtttgggcaacaagagtgaaactcttgtctcaaaaaaaaaaaaaaatgaggtttaagacagttttgtcattactggtgggatctggtcacacaagatagcattaaacgtgacatggcacataaaattggttaaaaaattttgttttttaattacgtaatgtaaaagcccaacaaacactttatgcaagattggaatgtatcttcaaattcagatttaataaacatgtaaagatcctctgt

SEQ ID NO: 7340 - protein, 32 aa, Homo sapiens; identical to SEQ ID NO: 7336

SEQ ID NO: 7341 - DNA, 2362 bp, Homo sapiens
ccttgccaatgtctgttatttcctgactctaataaaagagaacagttgtaaaacactgtaacaaatctactttctgtgcttctcacgattcaaatctgacttcagtttaaccatttgaatatttggccttaaatacaaattgatgacatagtgatggattgtgttttatgacatttattttatatgggctaacaattctgcatgtaatttcattgttgtagggttatgagagaatttacaatgaaattccggacattaatctggatgtcccacattcatactctgtgctggagcggtttgtagaagaatgttttcaggctggaataatttccaaacaactcagagatctttgtccttcaaggggcagaaagcgttttgtaagcgaaggagatggaggtcgtcttaaaccagagagctactgaatataagaactcttgcagtcttagatgttataaaaatatatatctgaattgtaagagttgttagcacaagttttttttttttttttttttaagcacttgttttgggtacaaggcatttctgacattttataaacctacatttaaggggaatttttaaaggaaatgttttttcttttttttttgtttttcgagggggcaaggagggacagaaaagtaacctcttcttaagtggaatattctaataagctaccttttgtaagtgccatgtttattatctaatcattccaagttttgcattgatgtctgactgccactcctttctttcaaggacagtgttttttgtagtaaaatcactggtttatacaaagctttatttagggggtaaagttaagctgctaaaaccccatgttggctgctgctgttgagatactgtgctttgggagtaaaaaaagaaagttatttctttgtcttaaagaatttttaaaaaattagtcatgagacttattcatctttccagggaacatactgattggtcttaaaagactagacagttaagtaaaaggtggctggaacatctatttttctacaaaactggaaaaatgaacctggttctagaagaatgtacaccaaaataaaacatgtgaagcagtattgattctttattgggagtacatttttttaggtctcttaaactttaatttcacacagtaaattttgaatctcataaggaagcatatttgaacctagtcaatttaatcttagtgttcccttgaaaactttttttccctacaaaattttaagtgaaaaatacaatagtaaattaagattacactggggaaaaaaatgcaggtatcactttactccattgttatctgacctagagcttaattaagttttagaaatatgtaataccttccatcattccatcatccttaaattctgttaccaaataatggctaatgttacaaaaagttatactccagagacccaaagcttgacatttacctaatgtatgagaaaatattaccaattaacaataaagaatgatcatatttttaacctcttttacatagcctaataactcagcaaggcctcaacgtctgtgctaatttaaactgccaaatattgactgcagcaaacaagaattatattcagaatttatgagggtactgttaggagtatactgcttacaggtttagatatagtctgttagaattaaaaccaagtttagtgttcatatttacctcatgggctttatcaagcccatattacctcagcttatatatagttaccatttttaggtttttaattgtttgacacttggatgataaatgcagtcattttattctcaagtgcttaaaattaatgtaattaaaagcttagctgactacagaataggtgagggtttcttaaaaatgagatttaagggctgggcacggtggctcatgcctgtaatcccagcactttgggaggccgaggtgggcggatcacttgaggttgggagttcatgaccagcttgaccaacatgaagaaaccctgtctctattaaaaatacaaaagtagccaggcatggtggcgcatgcgtgtaatcccagctacttgggaggctgaggcaggagaattgcttgaacctgggaggcagaggttgcagtgagtcgagatggtgccattgctctcgtttgggcaacaagagtgaaactcttgtctcaaaaaaaaaaaaaaatgaggtttaagacagttttgtcattactggtgggatctggtcacacaagatagcattaaacgtgacatggcacataaaattggttaaaaaattttgttttttaattacgtaatgtaaaagcccaacaaacactttatgcaagattggaatgtatcttcaaattcagatttaataaacatgtaaagatcctctgtatataaaagttgtatttaatccc

SEQ ID NO: 7342 - protein, 32 aa, Homo sapiens; identical to SEQ ID NO: 7336

SEQ ID NO: 7343 - DNA, 2761 bp, Homo sapiens
acttccgaattgggtcatggcggaagggtgttaatagcctggccgcccgtgccccagggaatgcttatttttgaccttagttgcaaagtgagtttcttctgtatgcttgagtcaagaactctaagtcatcttggtaataccgggttggatgcttaaagctgcagcaaaaagaccagaactttcaggaaaaaacactatatccaacaactcagatatggcagaagtgaagtcaatgttccgggaagttcttccaaagcaagggccactgtttgtggaagatataatgacaatggtgctgtgtaaacccaaacttttacccttaaaatctctgactctggaaaaactagagaaaatgcatcaagcagcacagaatacaattcgccaacaagaaatggcagaaaaggatcaacggcaaataacccactgaatgataactgagcactttagggaacaacctgccttatctactatttaacaataactagaaaatatgcttctgtgtgctgaaagtagtatgtgttatcaataaaattgatagtattcatagaaatacaaaaatatccaagattgatgaaatttgtattgtgaatgtaaacactctggtttgtattgaacataaacagttaaactatgaaccaagttttatggggtttaagtcatgtttttagaattgcaaattaaattatttgttcaccattcctattgctatcttttatagataacattcttgggatcttttatagcattcttgggcacaagggattaaatacaacttttatatacagaggatctttacatgtttattaaatctgaatttgaagatacattccaatcttgcataaagtgtttgttgggcttttacattacgtaattaaaaaacaaaattttttaaccaattttatgtgccatgtcacgtttaatgctatcttgtgtgaccagatcccaccagtaatgacaaaactgtcttaaacctcatttttttttttttttgagacaagagtttcactcttgttgcccaaacgagagcaatggcaccatctcgactcactgcaacctctgcctcccaggttcaagcaattctcctgcctcagcctcccaagtagctgggattacacgcatgcgccaccatgcctggctacttttgtatttttaatagagacagggtttcttcatgttggtcaagctggtcatgaactcccaacctcaagtgatccgcccacctcggcctcccaaagtgctgggattacaggcatgagccaccgtgcccagcccttaaatctcatttttaagaaaccctcacctattctgtagtcagctaagcttttaattacattaattttaagcacttgagaataaaatgactgcatttatcatccaagtgtcaaacaattaaaaacctaaaaatggtaactatatataagctgaggtaatatgggcttgataaagcccatgaggtaaatatgaacactaaacttggttttaattctaacagactatatctaaacctgtaagcagtatactcctaacagtaccctcataaattctgaatataattcttgtttgctgcagtcaatatttggcagtttaaattagcacagacgttgaggccttgctgagttattaggctatgtaaaagaggttaaaaatatgatcattctttattgttaattggtaatattttctcatacattaggtaaatgtcaagctttgggtctctggagtataactttttgtaacattagccattatttggtaacagaatttaaggatgatggaatgatggaaggtattacatatttctaaaacttaattaagctctaggtcagataacaatggagtaaagtgatacctgcatttttttccccagtgtaatcttaatttactattgtatttttcacttaaaattttgtagggaaaaaaagttttcaagggaacactaagattaaattgactaggttcaaatatgcttccttatgagattcaaaatttactgtgtgaaattaaagtttaagagacctaaaaaaatgtactcccaataaagaatcaatactgcttcacatgttttattttggtgtacattcttctagaaccaggttcatttttccagttttgtagaaaaatagatgttccagccaccttttacttaactgtctagtcttttaagaccaatcagtatgttccctggaaagatgaataagtctcatgactaattttttaaaaattctttaagacaaagaaataactttctttttttactcccaaagcacagtatctcaacagcagcagccaacatggggttttagcagcttaactttaccccctaaataaagctttgtataaaccagtgattttactacaaaaaacactgtccttgaaagaaaggagtggcagtcagacatcaatgcaaaacttggaatgattagataataaacatggcacttacaaaaggtagcttattagaatattccacttaagaagaggttacttttctgtccctccttgccccctcgaaaaacaaaaaaaaaagaaaaaacatttcctttaaaaattccccttaaatgtaggtttataaaatgtcagaaatgccttgtacccaaaacaagtgcttaaaaaaaaaaaaaaaaaaaacttgtgctaacaactcttacaattcagatatatatttttataacatctaagactgcaagagttcttatattcagtagctctctggtttaagacgacctccatctccttcgcttacaaaacgctttctgcccct

SEQ ID NO: 7344 - protein, 92 aa, Homo sapiens
MLKAAAKRPELSGKNTISNNSDMAEVKSMFREVLPKQGPLFVEDIMTMVLCKPKLLPLKSLTLEKLEKMHQAAQNTIRQQEMAEKDQRQITH

SEQ ID NO: 7345 - DNA, 3741 bp, Homo sapiens
ccttcgccagtctcaccgttacccggggcaacagctgagccgtctgggaagggatgcatcttttcttctgtatgcttgagtcaagaactctaagtcatcttggtaataccgggttggatgcttaaagctgcagcaaaaagaccagaactttcaggaaaaaacactatatccaacaactcagatatggcagaagtgaagtcaatgttccgggaagttcttccaaagcaaggtatgtacatcacaaatattgaggtcattgattattacaggactaaagaagtcataggcagtgtcacatagcaggcttaatagctaaacatctgcagctattgtgttccgtattatctcatttactgtcttttactatatgctttttcatgacatccagtaaaaggataacaaatgaaacattgtttcttatacctaaaattgcctattaattagctaattcctaaaattcctaattacaatatgaattttttttaagagacaggttgtcactctgccacccaggcttgggtacagctggcacaaccgtagctcaccgcagccttgaactactgggctcctgccctagcctactgatttgctagtactacaggcatgtgctaccatgcctggctaatttgttcttatttttgtagagaagggatctcaatgtgttgcctaggctggtctcaaacccctgggctcaaacaaacaatccaacccctttggcatcccaaagtgctgggataacaggtaagagctaccatgccctactcaatatgaaacttcagtgaaagaaataatggaatttactatgttaaataaggtctgaaagtggagaaagagaaacctgaagcaacagtaagaaaagccgaaggtttaaaccttcagtcatttgaatatttacgttaaatatcatattttgctatatttttttgcactatgtatatatatattctgccaaatcttattttaagattaaacttctgacacaaaaagttgtgtcttatggtagcatagattcttgggtagaacgctcaaaacttgtcttcctcagaagcaccctactagtaagaaatgcgcttatagaatgacaatgatctttctggttccagagcaaaactcaatttaggtacaagagtttttcagtgacaagagattaattttttagaccttcattctagctgcaaatccaactacaaacaactgggttatctttcttgaattaattcttatttcttgttaaacttagggccactgtttgtggaagatataatgacaatggtgctgtgtaaacccaaacttttacccttaaaatctctgactctggaaaaactagagaaaatgcatcaagcagcacagaatacaattcgccaacaagaaatggcagaaaaggatcaacggcaaataacccactgaatgataactgagcactttagggaacaacctgccttatctactatttaacaataactagaaaatatgcttctgtgtgctgaaagtagtatgtgttatcaataaaattgatagtattcatagaaatacaaaaatatccaagattgatgaaatttgtattgtgaatgtaaacactctggtttgtattgaacataaacagttaaactatgaaccaagttttatggggtttaagtcatgtttttagaattgcaaattaaattatttgttcaccattcctattgctatcttttatagataacattcttgggatcttttatagcattcttgggcacaagggattaaatacaacttttatatacagaggatctttacatgtttattaaatctgaatttgaagatacattccaatcttgcataaagtgtttgttgggcttttacattacgtaattaaaaaacaaaattttttaaccaattttatgtgccatgtcacgtttaatgctatcttgtgtgaccagatcccaccagtaatgacaaaactgtcttaaacctcatttttttttttttttgagacaagagtttcactcttgttgcccaaacgagagcaatggcaccatctcgactcactgcaacctctgcctcccaggttcaagcaattctcctgcctcagcctcccaagtagctgggattacacgcatgcgccaccatgcctggctacttttgtatttttaatagagacagggtttcttcatgttggtcaagctggtcatgaactcccaacctcaagtgatccgcccacctcggcctcccaaagtgctgggattacaggcatgagccaccgtgcccagcccttaaatctcatttttaagaaaccctcacctattctgtagtcagctaagcttttaattacattaattttaagcacttgagaataaaatgactgcatttatcatccaagtgtcaaacaattaaaaacctaaaaatggtaactatatataagctgaggtaatatgggcttgataaagcccatgaggtaaatatgaacactaaacttggttttaattctaacagactatatctaaacctgtaagcagtatactcctaacagtaccctcataaattctgaatataattcttgtttgctgcagtcaatatttggcagtttaaattagcacagacgttgaggccttgctgagttattaggctatgtaaaagaggttaaaaatatgatcattctttattgttaattggtaatattttctcatacattaggtaaatgtcaagctttgggtctctggagtataactttttgtaacattagccattatttggtaacagaatttaaggatgatggaatgatggaaggtattacatatttctaaaacttaattaagctctaggtcagataacaatggagtaaagtgatacctgcatttttttccccagtgtaatcttaatttactattgtatttttcacttaaaattttgtagggaaaaaaagttttcaagggaacactaagattaaattgactaggttcaaatatgcttccttatgagattcaaaatttactgtgtgaaattaaagtttaagagacctaaaaaaatgtactcccaataaagaatcaatactgcttcacatgttttattttggtgtacattcttctagaaccaggttcatttttccagttttgtagaaaaatagatgttccagccaccttttacttaactgtctagtcttttaagaccaatcagtatgttccctggaaagatgaataagtctcatgactaattttttaaaaattctttaagacaaagaaataactttctttttttactcccaaagcacagtatctcaacagcagcagccaacatggggttttagcagcttaactttaccccctaaataaagctttgtataaaccagtgattttactacaaaaaacactgtccttgaaagaaaggagtggcagtcagacatcaatgcaaaacttggaatgattagataataaacatggcacttacaaaaggtagcttattagaatattccacttaagaagaggttacttttctgtccctccttgccccctcgaaaaacaaaaaaaaaagaaaaaacatttcctttaaaaattccccttaaatgtaggtttataaaatgtcagaaatgccttgtacccaaaacaagtgcttaaaaaaaaaaaaaaaaaaaacttgtgctaacaactcttacaattcagatatatatttttataacatctaagactgcaagagttcttatattcagtagctctctggtttaagacgacctccatctccttcgcttacaaaacgctttctgcccct

SEQ ID NO: 7346 - protein, 60 aa, Homo sapiens [sequence omitted]

SEQ ID NO: 7347 - DNA, 2828 bp, Homo sapiens
tccttcgccagtctcaccgttacccggggcaacagctgagccgtctgggaagggatgcatcttttcttctgtatgcttgagtcaagaactctaagtcatcttggtaataccgggttggatgcttaaagctgcagcaaaaagaccagaactttcaggaaaaaacactatatccaacaactcagatatggcagaagtgaagtcaatgttccgggaagttcttccaaagcaagagaagggatctcaatgtgttgcctaggctggtctcaaacccctgggctcaaacaaacaatccaacccctttggcatcccaaagtgctgggataacagggccactgtttgtggaagatataatgacaatggtgctgtgtaaacccaaacttttacccttaaaatctctgactctggaaaaactagagaaaatgcatcaagcagcacagaatacaattcgccaacaagaaatggcagaaaaggatcaacggcaaataacccactgaatgataactgagcactttagggaacaacctgccttatctactatttaacaataactagaaaatatgcttctgtgtgctgaaagtagtatgtgttatcaataaaattgatagtattcatagaaatacaaaaatatccaagattgatgaaatttgtattgtgaatgtaaacactctggtttgtattgaacataaacagttaaactatgaaccaagttttatggggtttaagtcatgtttttagaattgcaaattaaattatttgttcaccattcctattgctatcttttatagataacattcttgggatcttttatagcattcttgggcacaagggattaaatacaacttttatatacagaggatctttacatgtttattaaatctgaatttgaagatacattccaatcttgcataaagtgtttgttgggcttttacattacgtaattaaaaaacaaaattttttaaccaattttatgtgccatgtcacgtttaatgctatcttgtgtgaccagatcccaccagtaatgacaaaactgtcttaaacctcatttttttttttttttgagacaagagtttcactcttgttgcccaaacgagagcaatggcaccatctcgactcactgcaacctctgcctcccaggttcaagcaattctcctgcctcagcctcccaagtagctgggattacacgcatgcgccaccatgcctggctacttttgtatttttaatagagacagggtttcttcatgttggtcaagctggtcatgaactcccaacctcaagtgatccgcccacctcggcctcccaaagtgctgggattacaggcatgagccaccgtgcccagcccttaaatctcatttttaagaaaccctcacctattctgtagtcagctaagcttttaattacattaattttaagcacttgagaataaaatgactgcatttatcatccaagtgtcaaacaattaaaaacctaaaaatggtaactatatataagctgaggtaatatgggcttgataaagcccatgaggtaaatatgaacactaaacttggttttaattctaacagactatatctaaacctgtaagcagtatactcctaacagtaccctcataaattctgaatataattcttgtttgctgcagtcaatatttggcagtttaaattagcacagacgttgaggccttgctgagttattaggctatgtaaaagaggttaaaaatatgatcattctttattgttaattggtaatattttctcatacattaggtaaatgtcaagctttgggtctctggagtataactttttgtaacattagccattatttggtaacagaatttaaggatgatggaatgatggaaggtattacatatttctaaaacttaattaagctctaggtcagataacaatggagtaaagtgatacctgcatttttttccccagtgtaatcttaatttactattgtatttttcacttaaaattttgtagggaaaaaaagttttcaagggaacactaagattaaattgactaggttcaaatatgcttccttatgagattcaaaatttactgtgtgaaattaaagtttaagagacctaaaaaaatgtactcccaataaagaatcaatactgcttcacatgttttattttggtgtacattcttctagaaccaggttcatttttccagttttgtagaaaaatagatgttccagccaccttttacttaactgtctagtcttttaagaccaatcagtatgttccctggaaagatgaataagtctcatgactaattttttaaaaattctttaagacaaagaaataactttctttttttactcccaaagcacagtatctcaacagcagcagccaacatggggttttagcagcttaactttaccccctaaataaagctttgtataaaccagtgattttactacaaaaaacactgtccttgaaagaaaggagtggcagtcagacatcaatgcaaaacttggaatgattagataataaacatggcacttacaaaaggtagcttattagaatattccacttaagaagaggttacttttctgtccctccttgccccctcgaaaaacaaaaaaaaaagaaaaaacatttcctttaaaaattccccttaaatgtaggtttataaaatgtcagaaatgccttgtacccaaaacaagtgcttaaaaaaaaaaaaaaaaaaaacttgtgctaacaactcttacaattcagatatatatttttataacatctaagactgcaagagttcttatattcagtagctctctggtttaagacgacctccatctccttcgcttacaaaacgctttctgcccct

SEQ ID NO: 7348 - protein, 45 aa, Homo sapiens
MLKAAAKRPELSGKNTISNNSDMAEVKSMFREVLPKQEKGSQCVA

SEQ ID NO: 7349 - DNA, 2667 bp, Homo sapiens
gtagatttttttccttcgccagtctcaccgttacccggggcaacagctgagccgtctgggaagggatgcatcttttcttctgtatgcttgagtcaagaactctaagtcatcttggtaataccgggttggatgcttaaagctgcagcaaaaagaccagaactttcagggccactgtttgtggaagatataatgacaatggtgctgtgtaaacccaaacttttacccttaaaatctctgactctggaaaaactagagaaaatgcatcaagcagcacagaatacaattcgccaacaagaaatggcagaaaaggatcaacggcaaataacccactgaatgataactgagcactttagggaacaacctgccttatctactatttaacaataactagaaaatatgcttctgtgtgctgaaagtagtatgtgttatcaataaaattgatagtattcatagaaatacaaaaatatccaagattgatgaaatttgtattgtgaatgtaaacactctggtttgtattgaacataaacagttaaactatgaaccaagttttatggggtttaagtcatgtttttagaattgcaaattaaattatttgttcaccattcctattgctatcttttatagataacattcttgggatcttttatagcattcttgggcacaagggattaaatacaacttttatatacagaggatctttacatgtttattaaatctgaatttgaagatacattccaatcttgcataaagtgtttgttgggcttttacattacgtaattaaaaaacaaaattttttaaccaattttatgtgccatgtcacgtttaatgctatcttgtgtgaccagatcccaccagtaatgacaaaactgtcttaaacctcatttttttttttttttgagacaagagtttcactcttgttgcccaaacgagagcaatggcaccatctcgactcactgcaacctctgcctcccaggttcaagcaattctcctgcctcagcctcccaagtagctgggattacacgcatgcgccaccatgcctggctacttttgtatttttaatagagacagggtttcttcatgttggtcaagctggtcatgaactcccaacctcaagtgatccgcccacctcggcctcccaaagtgctgggattacaggcatgagccaccgtgcccagcccttaaatctcatttttaagaaaccctcacctattctgtagtcagctaagcttttaattacattaattttaagcacttgagaataaaatgactgcatttatcatccaagtgtcaaacaattaaaaacctaaaaatggtaactatatataagctgaggtaatatgggcttgataaagcccatgaggtaaatatgaacactaaacttggttttaattctaacagactatatctaaacctgtaagcagtatactcctaacagtaccctcataaattctgaatataattcttgtttgctgcagtcaatatttggcagtttaaattagcacagacgttgaggccttgctgagttattaggctatgtaaaagaggttaaaaatatgatcattctttattgttaattggtaatattttctcatacattaggtaaatgtcaagctttgggtctctggagtataactttttgtaacattagccattatttggtaacagaatttaaggatgatggaatgatggaaggtattacatatttctaaaacttaattaagctctaggtcagataacaatggagtaaagtgatacctgcatttttttccccagtgtaatcttaatttactattgtatttttcacttaaaattttgtagggaaaaaaagttttcaagggaacactaagattaaattgactaggttcaaatatgcttccttatgagattcaaaatttactgtgtgaaattaaagtttaagagacctaaaaaaatgtactcccaataaagaatcaatactgcttcacatgttttattttggtgtacattcttctagaaccaggttcatttttccagttttgtagaaaaatagatgttccagccaccttttacttaactgtctagtcttttaagaccaatcagtatgttccctggaaagatgaataagtctcatgactaattttttaaaaattctttaagacaaagaaataactttctttttttactcccaaagcacagtatctcaacagcagcagccaacatggggttttagcagcttaactttaccccctaaataaagctttgtataaaccagtgattttactacaaaaaacactgtccttgaaagaaaggagtggcagtcagacatcaatgcaaaacttggaatgattagataataaacatggcacttacaaaaggtagcttattagaatattccacttaagaagaggttacttttctgtccctccttgccccctcgaaaaacaaaaaaaaaagaaaaaacatttcctttaaaaattccccttaaatgtaggtttataaaatgtcagaaatgccttgtacccaaaacaagtgcttaaaaaaaaaaaaaaaaaaaacttgtgctaacaactcttacaattcagatatatatttttataacatctaagactgcaagagttcttatattcagtagctctctggtttaagacgacctccatctccttcgcttacaaaacgctttctgcccct

SEQ ID NO: 7350 - protein, 67 aa, Homo sapiens
MLKAAAKRPELSGPLFVEDIMTMVLCKPKLLPLKSLTLEKLEKMHQAAQNTIRQQEMAEKDQRQITH

SEQ ID NO: 7351 - DNA, 2657 bp, Homo sapiens
agggtgacgtagatttttttccttcgccagtctcaccgttacccggggcaacagctgagccgtctgggaagggatgcatctgaaaaaacactatatccaacaactcagatatggcagaagtgaagtcaatgttccgggaagttcttccaaagcaagggccactgtttgtggaagatataatgacaatggtgctgtgtaaacccaaacttttacccttaaaatctctgactctggaaaaactagagaaaatgcatcaagcagcacagaatacaattcgccaacaagaaatggcagaaaaggatcaacggcaaataacccactgaatgataactgagcactttagggaacaacctgccttatctactatttaacaataactagaaaatatgcttctgtgtgctgaaagtagtatgtgttatcaataaaattgatagtattcatagaaatacaaaaatatccaagattgatgaaatttgtattgtgaatgtaaacactctggtttgtattgaacataaacagttaaactatgaaccaagttttatggggtttaagtcatgtttttagaattgcaaattaaattatttgttcaccattcctattgctatcttttatagataacattcttgggatcttttatagcattcttgggcacaagggattaaatacaacttttatatacagaggatctttacatgtttattaaatctgaatttgaagatacattccaatcttgcataaagtgtttgttgggcttttacattacgtaattaaaaaacaaaattttttaaccaattttatgtgccatgtcacgtttaatgctatcttgtgtgaccagatcccaccagtaatgacaaaactgtcttaaacctcatttttttttttttttgagacaagagtttcactcttgttgcccaaacgagagcaatggcaccatctcgactcactgcaacctctgcctcccaggttcaagcaattctcctgcctcagcctcccaagtagctgggattacacgcatgcgccaccatgcctggctacttttgtatttttaatagagacagggtttcttcatgttggtcaagctggtcatgaactcccaacctcaagtgatccgcccacctcggcctcccaaagtgctgggattacaggcatgagccaccgtgcccagcccttaaatctcatttttaagaaaccctcacctattctgtagtcagctaagcttttaattacattaattttaagcacttgagaataaaatgactgcatttatcatccaagtgtcaaacaattaaaaacctaaaaatggtaactatatataagctgaggtaatatgggcttgataaagcccatgaggtaaatatgaacactaaacttggttttaattctaacagactatatctaaacctgtaagcagtatactcctaacagtaccctcataaattctgaatataattcttgtttgctgcagtcaatatttggcagtttaaattagcacagacgttgaggccttgctgagttattaggctatgtaaaagaggttaaaaatatgatcattctttattgttaattggtaatattttctcatacattaggtaaatgtcaagctttgggtctctggagtataactttttgtaacattagccattatttggtaacagaatttaaggatgatggaatgatggaaggtattacatatttctaaaacttaattaagctctaggtcagataacaatggagtaaagtgatacctgcatttttttccccagtgtaatcttaatttactattgtatttttcacttaaaattttgtagggaaaaaaagttttcaagggaacactaagattaaattgactaggttcaaatatgcttccttatgagattcaaaatttactgtgtgaaattaaagtttaagagacctaaaaaaatgtactcccaataaagaatcaatactgcttcacatgttttattttggtgtacattcttctagaaccaggttcatttttccagttttgtagaaaaatagatgttccagccaccttttacttaactgtctagtcttttaagaccaatcagtatgttccctggaaagatgaataagtctcatgactaattttttaaaaattctttaagacaaagaaataactttctttttttactcccaaagcacagtatctcaacagcagcagccaacatggggttttagcagcttaactttaccccctaaataaagctttgtataaaccagtgattttactacaaaaaacactgtccttgaaagaaaggagtggcagtcagacatcaatgcaaaacttggaatgattagataataaacatggcacttacaaaaggtagcttattagaatattccacttaagaagaggttacttttctgtccctccttgccccctcgaaaaacaaaaaaaaaagaaaaaacatttcctttaaaaattccccttaaatgtaggtttataaaatgtcagaaatgccttgtacccaaaacaagtgcttaaaaaaaaaaaaaaaaaaaacttgtgctaacaactcttacaattcagatatatatttttataacatctaagactgcaagagttcttatattcagtagctctctggtttaagacgacctccatctccttcgcttacaaaacgctttctgcccct

SEQ ID NO: 7352 - protein, 70 aa, Homo sapiens
MAEVKSMFREVLPKQGPLFVEDIMTMVLCKPKLLPLKSLTLEKLEKMHQAAQNTIRQQEMAEKDQRQITH

SEQ ID NO: 7353 - DNA, 2915 bp, Homo sapiens
ctgtttccagggtgacgtagatttttttccttcgccagtctcaccgttacccggggcaacagctgagccgtctgggaagggatgcatcttttcttctgtatgcttgagtcaagaactctaagtcatcttggtaataccgggttggatgcttaaagctgcagcaaaaagaccagaactttcagggcttctcaaatttaataactatggaatcttatcagaaagtccattaacatctcaaagaacaacgtggttattgtatcaatcaccatcctttataccaggatttgcatatccttcaagatgcctgaagacaatcggaggggtatacaagcaagcgaggaaaaaacactatatccaacaactcagatatggcagaagtgaagtcaatgttccgggaagttcttccaaagcaagggccactgtttgtggaagatataatgacaatggtgctgtgtaaacccaaacttttacccttaaaatctctgactctggaaaaactagagaaaatgcatcaagcagcacagaatacaattcgccaacaagaaatggcagaaaaggatcaacggcaaataacccactgaatgataactgagcactttagggaacaacctgccttatctactatttaacaataactagaaaatatgcttctgtgtgctgaaagtagtatgtgttatcaataaaattgatagtattcatagaaatacaaaaatatccaagattgatgaaatttgtattgtgaatgtaaacactctggtttgtattgaacataaacagttaaactatgaaccaagttttatggggtttaagtcatgtttttagaattgcaaattaaattatttgttcaccattcctattgctatcttttatagataacattcttgggatcttttatagcattcttgggcacaagggattaaatacaacttttatatacagaggatctttacatgtttattaaatctgaatttgaagatacattccaatcttgcataaagtgtttgttgggcttttacattacgtaattaaaaaacaaaattttttaaccaattttatgtgccatgtcacgtttaatgctatcttgtgtgaccagatcccaccagtaatgacaaaactgtcttaaacctcatttttttttttttttgagacaagagtttcactcttgttgcccaaacgagagcaatggcaccatctcgactcactgcaacctctgcctcccaggttcaagcaattctcctgcctcagcctcccaagtagctgggattacacgcatgcgccaccatgcctggctacttttgtatttttaatagagacagggtttcttcatgttggtcaagctggtcatgaactcccaacctcaagtgatccgcccacctcggcctcccaaagtgctgggattacaggcatgagccaccgtgcccagcccttaaatctcatttttaagaaaccctcacctattctgtagtcagctaagcttttaattacattaattttaagcacttgagaataaaatgactgcatttatcatccaagtgtcaaacaattaaaaacctaaaaatggtaactatatataagctgaggtaatatgggcttgataaagcccatgaggtaaatatgaacactaaacttggttttaattctaacagactatatctaaacctgtaagcagtatactcctaacagtaccctcataaattctgaatataattcttgtttgctgcagtcaatatttggcagtttaaattagcacagacgttgaggccttgctgagttattaggctatgtaaaagaggttaaaaatatgatcattctttattgttaattggtaatattttctcatacattaggtaaatgtcaagctttgggtctctggagtataactttttgtaacattagccattatttggtaacagaatttaaggatgatggaatgatggaaggtattacatatttctaaaacttaattaagctctaggtcagataacaatggagtaaagtgatacctgcatttttttccccagtgtaatcttaatttactattgtatttttcacttaaaattttgtagggaaaaaaagttttcaagggaacactaagattaaattgactaggttcaaatatgcttccttatgagattcaaaatttactgtgtgaaattaaagtttaagagacctaaaaaaatgtactcccaataaagaatcaatactgcttcacatgttttattttggtgtacattcttctagaaccaggttcatttttccagttttgtagaaaaatagatgttccagccaccttttacttaactgtctagtcttttaagaccaatcagtatgttccctggaaagatgaataagtctcatgactaattttttaaaaattctttaagacaaagaaataactttctttttttactcccaaagcacagtatctcaacagcagcagccaacatggggttttagcagcttaactttaccccctaaataaagctttgtataaaccagtgattttactacaaaaaacactgtccttgaaagaaaggagtggcagtcagacatcaatgcaaaacttggaatgattagataataaacatggcacttacaaaaggtagcttattagaatattccacttaagaagaggttacttttctgtccctccttgccccctcgaaaaacaaaaaaaaaagaaaaaacatttcctttaaaaattccccttaaatgtaggtttataaaatgtcagaaatgccttgtacccaaaacaagtgcttaaaaaaaaaaaaaaaaaaaacttgtgctaacaactcttacaattcagatatatatttttataacatctaagactgcaagagttcttatattcagtagctctctggtttaagacgacctccatctccttcgcttacaaaacgctttctgcccct

SEQ ID NO: 7354 - protein, 103 aa, Homo sapiens
MLKAAAKRPELSGLLKFNNYGILSESPLTSQRTTWLLYQSPSFIPGFAYPSRCLKTIGGVYKQARKKHYIQQLRYGRSEVNVPGSSSKARATVCGRYNDNGAV

SEQ ID NO: 7355 - DNA, 2915 bp, Homo sapiens
agttcctctacgccgtctcccgcccactgggcgcctctggctagccgggctacagagtaagcctccagcagggtagagtgacaactccccgatcggaagttactgttgaagctaaggcggccataactgataatggcaaaaggagattcctggcttcctgtttccagggtgacgtagatttttttccttcgccagtctcaccgttacccggggcaacagctgagccgtctgggaagggatgcatcttttcttctgtatgcttgagtcaagaactctaagtcatcttggtaataccgggttggatgcttaaagctgcagcaaaaagaccagaactttcaggaaaaaacactatatccaacaactcagatatggcagaagtgaagtcaatgttccgggaagttcttccaaagcaagggccactgtttgtggaagatataatgacaatggtgctgtgtaaacccaaacttttacccttaaaatctctgactctggaaaaactagagaaaatgcatcaagcagcacagaatacaattcgccaacaagaaatggcagaaaaggatcaacggcaaataacccactgaatgataactgagcactttagggaacaacctgccttatctactatttaacaataactagaaaatatgcttctgtgtgctgaaagtagtatgtgttatcaataaaattgatagtattcatagaaatacaaaaatatccaagattgatgaaatttgtattgtgaatgtaaacactctggtttgtattgaacataaacagttaaactatgaaccaagttttatggggtttaagtcatgtttttagaattgcaaattaaattatttgttcaccattcctattgctatcttttatagataacattcttgggatcttttatagcattcttgggcacaagggattaaatacaacttttatatacagaggatctttacatgtttattaaatctgaatttgaagatacattccaatcttgcataaagtgtttgttgggcttttacattacgtaattaaaaaacaaaattttttaaccaattttatgtgccatgtcacgtttaatgctatcttgtgtgaccagatcccaccagtaatgacaaaactgtcttaaacctcatttttttttttttttgagacaagagtttcactcttgttgcccaaacgagagcaatggcaccatctcgactcactgcaacctctgcctcccaggttcaagcaattctcctgcctcagcctcccaagtagctgggattacacgcatgcgccaccatgcctggctacttttgtatttttaatagagacagggtttcttcatgttggtcaagctggtcatgaactcccaacctcaagtgatccgcccacctcggcctcccaaagtgctgggattacaggcatgagccaccgtgcccagcccttaaatctcatttttaagaaaccctcacctattctgtagtcagctaagcttttaattacattaattttaagcacttgagaataaaatgactgcatttatcatccaagtgtcaaacaattaaaaacctaaaaatggtaactatatataagctgaggtaatatgggcttgataaagcccatgaggtaaatatgaacactaaacttggttttaattctaacagactatatctaaacctgtaagcagtatactcctaacagtaccctcataaattctgaatataattcttgtttgctgcagtcaatatttggcagtttaaattagcacagacgttgaggccttgctgagttattaggctatgtaaaagaggttaaaaatatgatcattctttattgttaattggtaatattttctcatacattaggtaaatgtcaagctttgggtctctggagtataactttttgtaacattagccattatttggtaacagaatttaaggatgatggaatgatggaaggtattacatatttctaaaacttaattaagctctaggtcagataacaatggagtaaagtgatacctgcatttttttccccagtgtaatcttaatttactattgtatttttcacttaaaattttgtagggaaaaaaagttttcaagggaacactaagattaaattgactaggttcaaatatgcttccttatgagattcaaaatttactgtgtgaaattaaagtttaagagacctaaaaaaatgtactcccaataaagaatcaatactgcttcacatgttttattttggtgtacattcttctagaaccaggttcatttttccagttttgtagaaaaatagatgttccagccaccttttacttaactgtctagtcttttaagaccaatcagtatgttccctggaaagatgaataagtctcatgactaattttttaaaaattctttaagacaaagaaataactttctttttttactcccaaagcacagtatctcaacagcagcagccaacatggggttttagcagcttaactttaccccctaaataaagctttgtataaaccagtgattttactacaaaaaacactgtccttgaaagaaaggagtggcagtcagacatcaatgcaaaacttggaatgattagataataaacatggcacttacaaaaggtagcttattagaatattccacttaagaagaggttacttttctgtccctccttgccccctcgaaaaacaaaaaaaaaagaaaaaacatttcctttaaaaattccccttaaatgtaggtttataaaatgtcagaaatgccttgtacccaaaacaagtgcttaaaaaaaaaaaaaaaaaaaacttgtgctaacaactcttacaattcagatatatatttttataacatctaagactgcaagagttcttatattcagtagctctctggtttaagacgacctccatctccttcgcttacaaaacgctttctgcccct

SEQ ID NO: 7356 - protein, 92 aa, Homo sapiens; identical to SEQ ID NO: 7344

SEQ ID NO: 7357 - DNA, 2056 bp, Homo sapiens
acttccgaattgggtcatggcggaagggtgttaatagcctggccgcccgtgccccagggaatgcttatttttgaccttagttgcaaagtgagtttcttctgtatgcttgagtcaagaactctaagtcatcttggtaataccgggttggatgcttaaagctgcagcaaaaagaccagaactttcaggaaaaaacactatatccaacaactcagatatggcagaagtgaagtcaatgttccgggaagttcttccaaagcaagggccactgtttgtggaagatataatgacaatggtgctgtgtaaacccaaacttttacccttaaaatctctgactctggaaaaactagagaaaatgcatcaagcagcacagaatacaattcgccaacaagaaatggcagaaaaggatcaacggcaaataacccactgaatgataactgagcactttagggaacaacctgccttatctactatttaacaataactagaaaatatgcttctgtgtgctgaaagtagtatgtgttatcaataaaattgatagtattcatagaaatacaaaaatatccaagattgatgaaatttgtattgtgaatgtaaacactctggtttgtattgaacataaacagttaaactatgaaccaagttttatggggtttaagtcatgtttttagaattgcaaattaaattatttgttcaccattcctattgctatcttttatagataacattcttgggatcttttatagcattcttgggcacaagggattaaatacaacttttatatacagaggatctttacatgtttattaaatctgaatttgaagatacattccaatcttgcataaagtgtttgttgggcttttacattacgtaattaaaaaacaaaattttttaaccaattttatgtgccatgtcacgtttaatgctatcttgtgtgaccagatcccaccagtaatgacaaaactgtcttaaacctcatttttttttttttttgagacaagagtttcactcttgttgcccaaacgagagcaatggcaccatctcgactcactgcaacctctgcctcccaggttcaagcaattctcctgcctcagcctcccaagtagctgggattacacgcatgcgccaccatgcctggctacttttgtatttttaatagagacagggtttcttcatgttggtcaagctggtcatgaactcccaacctcaagtgatccgcccacctcggcctcccaaagtgctgggattacaggcatgagccaccgtgcccagcccttaaatctcatttttaagaaaccctcacctattctgtagtcagctaagcttttaattacattaattttaagcacttgagaataaaatgactgcatttatcatccaagtgtcaaacaattaaaaacctaaaaatggtaactatatataagctgaggtaatatgggcttgataaagcccatgaggtaaatatgaacactaaacttggttttaattctaacagactatatctaaacctgtaagcagtatactcctaacagtaccctcataaattctgaatataattcttgtttgctgcagtcaatatttggcagtttaaattagcacagacgttgaggccttgctgagttattaggctatgtaaaagaggttaaaaatatgatcattctttattgttaattggtaatattttctcatacattaggtaaatgtcaagctttgggtctctggagtataactttttgtaacattagccattatttggtaacagaatttaaggatgatggaatgatggaaggtattacatatttctaaaacttaattaagctctaggtcagataacaatggagtaaagtgatacctgcatttttttccccagtgtaatcttaatttactattgtatttttcacttaaaattttgtagggaaaaaaagttttcaagggaacactaagattaaattgactaggttcaaatatgcttccttatgagattcaaaatttactgtgtgaaattaaagtttaagagacctaaaaaaatgtactcccaataaagaatcaatactgcttc

SEQ ID NO: 7358 - protein, 92 aa, Homo sapiens; identical to SEQ ID NO: 7344

SEQ ID NO: 7359 - DNA, 3036 bp, Homo sapiens
ccttcgccagtctcaccgttacccggggcaacagctgagccgtctgggaagggatgcatcttttcttctgtatgcttgagtcaagaactctaagtcatcttggtaataccgggttggatgcttaaagctgcagcaaaaagaccagaactttcaggaaaaaacactatatccaacaactcagatatggcagaagtgaagtcaatgttccgggaagttcttccaaagcaaggtatgtacatcacaaatattgaggtcattgattattacaggactaaagaagtcataggcagtgtcacatagcaggcttaatagctaaacatctgcagctattgtgttccgtattatctcatttactgtcttttactatatgctttttcatgacatccagtaaaaggataacaaatgaaacattgtttcttatacctaaaattgcctattaattagctaattcctaaaattcctaattacaatatgaattttttttaagagacaggttgtcactctgccacccaggcttgggtacagctggcacaaccgtagctcaccgcagccttgaactactgggctcctgccctagcctactgatttgctagtactacaggcatgtgctaccatgcctggctaatttgttcttatttttgtagagaagggatctcaatgtgttgcctaggctggtctcaaacccctgggctcaaacaaacaatccaacccctttggcatcccaaagtgctgggataacaggtaagagctaccatgccctactcaatatgaaacttcagtgaaagaaataatggaatttactatgttaaataaggtctgaaagtggagaaagagaaacctgaagcaacagtaagaaaagccgaaggtttaaaccttcagtcatttgaatatttacgttaaatatcatattttgctatatttttttgcactatgtatatatatattctgccaaatcttattttaagattaaacttctgacacaaaaagttgtgtcttatggtagcatagattcttgggtagaacgctcaaaacttgtcttcctcagaagcaccctactagtaagaaatgcgcttatagaatgacaatgatctttctggttccagagcaaaactcaatttaggtacaagagtttttcagtgacaagagattaattttttagaccttcattctagctgcaaatccaactacaaacaactgggttatctttcttgaattaattcttatttcttgttaaacttagggccactgtttgtggaagatataatgacaatggtgctgtgtaaacccaaacttttacccttaaaatctctgactctggaaaaactagagaaaatgcatcaagcagcacagaatacaattcgccaacaagaaatggcagaaaaggatcaacggcaaataacccactgaatgataactgagcactttagggaacaacctgccttatctactatttaacaataactagaaaatatgcttctgtgtgctgaaagtagtatgtgttatcaataaaattgatagtattcatagaaatacaaaaatatccaagattgatgaaatttgtattgtgaatgtaaacactctggtttgtattgaacataaacagttaaactatgaaccaagttttatggggtttaagtcatgtttttagaattgcaaattaaattatttgttcaccattcctattgctatcttttatagataacattcttgggatcttttatagcattcttgggcacaagggattaaatacaacttttatatacagaggatctttacatgtttattaaatctgaatttgaagatacattccaatcttgcataaagtgtttgttgggcttttacattacgtaattaaaaaacaaaattttttaaccaattttatgtgccatgtcacgtttaatgctatcttgtgtgaccagatcccaccagtaatgacaaaactgtcttaaacctcatttttttttttttttgagacaagagtttcactcttgttgcccaaacgagagcaatggcaccatctcgactcactgcaacctctgcctcccaggttcaagcaattctcctgcctcagcctcccaagtagctgggattacacgcatgcgccaccatgcctggctacttttgtatttttaatagagacagggtttcttcatgttggtcaagctggtcatgaactcccaacctcaagtgatccgcccacctcggcctcccaaagtgctgggattacaggcatgagccaccgtgcccagcccttaaatctcatttttaagaaaccctcacctattctgtagtcagctaagcttttaattacattaattttaagcacttgagaataaaatgactgcatttatcatccaagtgtcaaacaattaaaaacctaaaaatggtaactatatataagctgaggtaatatgggcttgataaagcccatgaggtaaatatgaacactaaacttggttttaattctaacagactatatctaaacctgtaagcagtatactcctaacagtaccctcataaattctgaatataattcttgtttgctgcagtcaatatttggcagtttaaattagcacagacgttgaggccttgctgagttattaggctatgtaaaagaggttaaaaatatgatcattctttattgttaattggtaatattttctcatacattaggtaaatgtcaagctttgggtctctggagtataactttttgtaacattagccattatttggtaacagaatttaaggatgatggaatgatggaaggtattacatatttctaaaacttaattaagctctaggtcagataacaatggagtaaagtgatacctgcatttttttccccagtgtaatcttaatttactattgtatttttcacttaaaattttgtagggaaaaaaagttttcaagggaacactaagattaaattgactaggttcaaatatgcttccttatgagattcaaaatttactgtgtgaaattaaagtttaagagacctaaaaaaatgtactcccaataaagaatcaatactgcttc

SEQ ID NO: 7360 - protein, 60 aa, Homo sapiens [sequence omitted]

SEQ ID NO: 7361 - DNA, 2123 bp, Homo sapiens
tccttcgccagtctcaccgttacccggggcaacagctgagccgtctgggaagggatgcatcttttcttctgtatgcttgagtcaagaactctaagtcatcttggtaataccgggttggatgcttaaagctgcagcaaaaagaccagaactttcaggaaaaaacactatatccaacaactcagatatggcagaagtgaagtcaatgttccgggaagttcttccaaagcaagagaagggatctcaatgtgttgcctaggctggtctcaaacccctgggctcaaacaaacaatccaacccctttggcatcccaaagtgctgggataacagggccactgtttgtggaagatataatgacaatggtgctgtgtaaacccaaacttttacccttaaaatctctgactctggaaaaactagagaaaatgcatcaagcagcacagaatacaattcgccaacaagaaatggcagaaaaggatcaacggcaaataacccactgaatgataactgagcactttagggaacaacctgccttatctactatttaacaataactagaaaatatgcttctgtgtgctgaaagtagtatgtgttatcaataaaattgatagtattcatagaaatacaaaaatatccaagattgatgaaatttgtattgtgaatgtaaacactctggtttgtattgaacataaacagttaaactatgaaccaagttttatggggtttaagtcatgtttttagaattgcaaattaaattatttgttcaccattcctattgctatcttttatagataacattcttgggatcttttatagcattcttgggcacaagggattaaatacaacttttatatacagaggatctttacatgtttattaaatctgaatttgaagatacattccaatcttgcataaagtgtttgttgggcttttacattacgtaattaaaaaacaaaattttttaaccaattttatgtgccatgtcacgtttaatgctatcttgtgtgaccagatcccaccagtaatgacaaaactgtcttaaacctcatttttttttttttttgagacaagagtttcactcttgttgcccaaacgagagcaatggcaccatctcgactcactgcaacctctgcctcccaggttcaagcaattctcctgcctcagcctcccaagtagctgggattacacgcatgcgccaccatgcctggctacttttgtatttttaatagagacagggtttcttcatgttggtcaagctggtcatgaactcccaacctcaagtgatccgcccacctcggcctcccaaagtgctgggattacaggcatgagccaccgtgcccagcccttaaatctcatttttaagaaaccctcacctattctgtagtcagctaagcttttaattacattaattttaagcacttgagaataaaatgactgcatttatcatccaagtgtcaaacaattaaaaacctaaaaatggtaactatatataagctgaggtaatatgggcttgataaagcccatgaggtaaatatgaacactaaacttggttttaattctaacagactatatctaaacctgtaagcagtatactcctaacagtaccctcataaattctgaatataattcttgtttgctgcagtcaatatttggcagtttaaattagcacagacgttgaggccttgctgagttattaggctatgtaaaagaggttaaaaatatgatcattctttattgttaattggtaatattttctcatacattaggtaaatgtcaagctttgggtctctggagtataactttttgtaacattagccattatttggtaacagaatttaaggatgatggaatgatggaaggtattacatatttctaaaacttaattaagctctaggtcagataacaatggagtaaagtgatacctgcatttttttccccagtgtaatcttaatttactattgtatttttcacttaaaattttgtagggaaaaaaagttttcaagggaacactaagattaaattgactaggttcaaatatgcttccttatgagattcaaaatttactgtgtgaaattaaagtttaagagacctaaaaaaatgtactcccaataaagaatcaatactgcttc

SEQ ID NO: 7362 - protein, 45 aa, Homo sapiens; identical to SEQ ID NO: 7348

SEQ ID NO: 7363 - DNA, 1962 bp, Homo sapiens
gtagatttttttccttcgccagtctcaccgttacccggggcaacagctgagccgtctgggaagggatgcatcttttcttctgtatgcttgagtcaagaactctaagtcatcttggtaataccgggttggatgcttaaagctgcagcaaaaagaccagaactttcagggccactgtttgtggaagatataatgacaatggtgctgtgtaaacccaaacttttacccttaaaatctctgactctggaaaaactagagaaaatgcatcaagcagcacagaatacaattcgccaacaagaaatggcagaaaaggatcaacggcaaataacccactgaatgataactgagcactttagggaacaacctgccttatctactatttaacaataactagaaaatatgcttctgtgtgctgaaagtagtatgtgttatcaataaaattgatagtattcatagaaatacaaaaatatccaagattgatgaaatttgtattgtgaatgtaaacactctggtttgtattgaacataaacagttaaactatgaaccaagttttatggggtttaagtcatgtttttagaattgcaaattaaattatttgttcaccattcctattgctatcttttatagataacattcttgggatcttttatagcattcttgggcacaagggattaaatacaacttttatatacagaggatctttacatgtttattaaatctgaatttgaagatacattccaatcttgcataaagtgtttgttgggcttttacattacgtaattaaaaaacaaaattttttaaccaattttatgtgccatgtcacgtttaatgctatcttgtgtgaccagatcccaccagtaatgacaaaactgtcttaaacctcatttttttttttttttgagacaagagtttcactcttgttgcccaaacgagagcaatggcaccatctcgactcactgcaacctctgcctcccaggttcaagcaattctcctgcctcagcctcccaagtagctgggattacacgcatgcgccaccatgcctggctacttttgtatttttaatagagacagggtttcttcatgttggtcaagctggtcatgaactcccaacctcaagtgatccgcccacctcggcctcccaaagtgctgggattacaggcatgagccaccgtgcccagcccttaaatctcatttttaagaaaccctcacctattctgtagtcagctaagcttttaattacattaattttaagcacttgagaataaaatgactgcatttatcatccaagtgtcaaacaattaaaaacctaaaaatggtaactatatataagctgaggtaatatgggcttgataaagcccatgaggtaaatatgaacactaaacttggttttaattctaacagactatatctaaacctgtaagcagtatactcctaacagtaccctcataaattctgaatataattcttgtttgctgcagtcaatatttggcagtttaaattagcacagacgttgaggccttgctgagttattaggctatgtaaaagaggttaaaaatatgatcattctttattgttaattggtaatattttctcatacattaggtaaatgtcaagctttgggtctctggagtataactttttgtaacattagccattatttggtaacagaatttaaggatgatggaatgatggaaggtattacatatttctaaaacttaattaagctctaggtcagataacaatggagtaaagtgatacctgcatttttttccccagtgtaatcttaatttactattgtatttttcacttaaaattttgtagggaaaaaaagttttcaagggaacactaagattaaattgactaggttcaaatatgcttccttatgagattcaaaatttactgtgtgaaattaaagtttaagagacctaaaaaaatgtactcccaataaagaatcaatactgcttc

SEQ ID NO: 7364 - protein, 67 aa, Homo sapiens; identical to SEQ ID NO: 7350

SEQ ID NO: 7365 - DNA, 1952 bp, Homo sapiens
agggtgacgtagatttttttccttcgccagtctcaccgttacccggggcaacagctgagccgtctgggaagggatgcatctgaaaaaacactatatccaacaactcagatatggcagaagtgaagtcaatgttccgggaagttcttccaaagcaagggccactgtttgtggaagatataatgacaatggtgctgtgtaaacccaaacttttacccttaaaatctctgactctggaaaaactagagaaaatgcatcaagcagcacagaatacaattcgccaacaagaaatggcagaaaaggatcaacggcaaataacccactgaatgataactgagcactttagggaacaacctgccttatctactatttaacaataactagaaaatatgcttctgtgtgctgaaagtagtatgtgttatcaataaaattgatagtattcatagaaatacaaaaatatccaagattgatgaaatttgtattgtgaatgtaaacactctggtttgtattgaacataaacagttaaactatgaaccaagttttatggggtttaagtcatgtttttagaattgcaaattaaattatttgttcaccattcctattgctatcttttatagataacattcttgggatcttttatagcattcttgggcacaagggattaaatacaacttttatatacagaggatctttacatgtttattaaatctgaatttgaagatacattccaatcttgcataaagtgtttgttgggcttttacattacgtaattaaaaaacaaaattttttaaccaattttatgtgccatgtcacgtttaatgctatcttgtgtgaccagatcccaccagtaatgacaaaactgtcttaaacctcatttttttttttttttgagacaagagtttcactcttgttgcccaaacgagagcaatggcaccatctcgactcactgcaacctctgcctcccaggttcaagcaattctcctgcctcagcctcccaagtagctgggattacacgcatgcgccaccatgcctggctacttttgtatttttaatagagacagggtttcttcatgttggtcaagctggtcatgaactcccaacctcaagtgatccgcccacctcggcctcccaaagtgctgggattacaggcatgagccaccgtgcccagcccttaaatctcatttttaagaaaccctcacctattctgtagtcagctaagcttttaattacattaattttaagcacttgagaataaaatgactgcatttatcatccaagtgtcaaacaattaaaaacctaaaaatggtaactatatataagctgaggtaatatgggcttgataaagcccatgaggtaaatatgaacactaaacttggttttaattctaacagactatatctaaacctgtaagcagtatactcctaacagtaccctcataaattctgaatataattcttgtttgctgcagtcaatatttggcagtttaaattagcacagacgttgaggccttgctgagttattaggctatgtaaaagaggttaaaaatatgatcattctttattgttaattggtaatattttctcatacattaggtaaatgtcaagctttgggtctctggagtataactttttgtaacattagccattatttggtaacagaatttaaggatgatggaatgatggaaggtattacatatttctaaaacttaattaagctctaggtcagataacaatggagtaaagtgatacctgcatttttttccccagtgtaatcttaatttactattgtatttttcacttaaaattttgtagggaaaaaaagttttcaagggaacactaagattaaattgactaggttcaaatatgcttccttatgagattcaaaatttactgtgtgaaattaaagtttaagagacctaaaaaaatgtactcccaataaagaatcaatactgcttc

SEQ ID NO: 7366 - protein, 70 aa, Homo sapiens; identical to SEQ ID NO: 7352

SEQ ID NO: 7367 - DNA, 2210 bp, Homo sapiens
ctgtttccagggtgacgtagatttttttccttcgccagtctcaccgttacccggggcaacagctgagccgtctgggaagggatgcatcttttcttctgtatgcttgagtcaagaactctaagtcatcttggtaataccgggttggatgcttaaagctgcagcaaaaagaccagaactttcagggcttctcaaatttaataactatggaatcttatcagaaagtccattaacatctcaaagaacaacgtggttattgtatcaatcaccatcctttataccaggatttgcatatccttcaagatgcctgaagacaatcggaggggtatacaagcaagcgaggaaaaaacactatatccaacaactcagatatggcagaagtgaagtcaatgttccgggaagttcttccaaagcaagggccactgtttgtggaagatataatgacaatggtgctgtgtaaacccaaacttttacccttaaaatctctgactctggaaaaactagagaaaatgcatcaagcagcacagaatacaattcgccaacaagaaatggcagaaaaggatcaacggcaaataacccactgaatgataactgagcactttagggaacaacctgccttatctactatttaacaataactagaaaatatgcttctgtgtgctgaaagtagtatgtgttatcaataaaattgatagtattcatagaaatacaaaaatatccaagattgatgaaatttgtattgtgaatgtaaacactctggtttgtattgaacataaacagttaaactatgaaccaagttttatggggtttaagtcatgtttttagaattgcaaattaaattatttgttcaccattcctattgctatcttttatagataacattcttgggatcttttatagcattcttgggcacaagggattaaatacaacttttatatacagaggatctttacatgtttattaaatctgaatttgaagatacattccaatcttgcataaagtgtttgttgggcttttacattacgtaattaaaaaacaaaattttttaaccaattttatgtgccatgtcacgtttaatgctatcttgtgtgaccagatcccaccagtaatgacaaaactgtcttaaacctcatttttttttttttttgagacaagagtttcactcttgttgcccaaacgagagcaatggcaccatctcgactcactgcaacctctgcctcccaggttcaagcaattctcctgcctcagcctcccaagtagctgggattacacgcatgcgccaccatgcctggctacttttgtatttttaatagagacagggtttcttcatgttggtcaagctggtcatgaactcccaacctcaagtgatccgcccacctcggcctcccaaagtgctgggattacaggcatgagccaccgtgcccagcccttaaatctcatttttaagaaaccctcacctattctgtagtcagctaagcttttaattacattaattttaagcacttgagaataaaatgactgcatttatcatccaagtgtcaaacaattaaaaacctaaaaatggtaactatatataagctgaggtaatatgggcttgataaagcccatgaggtaaatatgaacactaaacttggttttaattctaacagactatatctaaacctgtaagcagtatactcctaacagtaccctcataaattctgaatataattcttgtttgctgcagtcaatatttggcagtttaaattagcacagacgttgaggccttgctgagttattaggctatgtaaaagaggttaaaaatatgatcattctttattgttaattggtaatattttctcatacattaggtaaatgtcaagctttgggtctctggagtataactttttgtaacattagccattatttggtaacagaatttaaggatgatggaatgatggaaggtattacatatttctaaaacttaattaagctctaggtcagataacaatggagtaaagtgatacctgcatttttttccccagtgtaatcttaatttactattgtatttttcacttaaaattttgtagggaaaaaaagttttcaagggaacactaagattaaattgactaggttcaaatatgcttccttatgagattcaaaatttactgtgtgaaattaaagtttaagagacctaaaaaaatgtactcccaataaagaatcaatactgcttc

SEQ ID NO: 7368 - protein, 103 aa, Homo sapiens; identical to SEQ ID NO: 7354

SEQ ID NO: 7369 - DNA, 2210 bp, Homo sapiens
agttcctctacgccgtctcccgcccactgggcgcctctggctagccgggctacagagtaagcctccagcagggtagagtgacaactccccgatcggaagttactgttgaagctaaggcggccataactgataatggcaaaaggagattcctggcttcctgtttccagggtgacgtagatttttttccttcgccagtctcaccgttacccggggcaacagctgagccgtctgggaagggatgcatcttttcttctgtatgcttgagtcaagaactctaagtcatcttggtaataccgggttggatgcttaaagctgcagcaaaaagaccagaactttcaggaaaaaacactatatccaacaactcagatatggcagaagtgaagtcaatgttccgggaagttcttccaaagcaagggccactgtttgtggaagatataatgacaatggtgctgtgtaaacccaaacttttacccttaaaatctctgactctggaaaaactagagaaaatgcatcaagcagcacagaatacaattcgccaacaagaaatggcagaaaaggatcaacggcaaataacccactgaatgataactgagcactttagggaacaacctgccttatctactatttaacaataactagaaaatatgcttctgtgtgctgaaagtagtatgtgttatcaataaaattgatagtattcatagaaatacaaaaatatccaagattgatgaaatttgtattgtgaatgtaaacactctggtttgtattgaacataaacagttaaactatgaaccaagttttatggggtttaagtcatgtttttagaattgcaaattaaattatttgttcaccattcctattgctatcttttatagataacattcttgggatcttttatagcattcttgggcacaagggattaaatacaacttttatatacagaggatctttacatgtttattaaatctgaatttgaagatacattccaatcttgcataaagtgtttgttgggcttttacattacgtaattaaaaaacaaaattttttaaccaattttatgtgccatgtcacgtttaatgctatcttgtgtgaccagatcccaccagtaatgacaaaactgtcttaaacctcatttttttttttttttgagacaagagtttcactcttgttgcccaaacgagagcaatggcaccatctcgactcactgcaacctctgcctcccaggttcaagcaattctcctgcctcagcctcccaagtagctgggattacacgcatgcgccaccatgcctggctacttttgtatttttaatagagacagggtttcttcatgttggtcaagctggtcatgaactcccaacctcaagtgatccgcccacctcggcctcccaaagtgctgggattacaggcatgagccaccgtgcccagcccttaaatctcatttttaagaaaccctcacctattctgtagtcagctaagcttttaattacattaattttaagcacttgagaataaaatgactgcatttatcatccaagtgtcaaacaattaaaaacctaaaaatggtaactatatataagctgaggtaatatgggcttgataaagcccatgaggtaaatatgaacactaaacttggttttaattctaacagactatatctaaacctgtaagcagtatactcctaacagtaccctcataaattctgaatataattcttgtttgctgcagtcaatatttggcagtttaaattagcacagacgttgaggccttgctgagttattaggctatgtaaaagaggttaaaaatatgatcattctttattgttaattggtaatattttctcatacattaggtaaatgtcaagctttgggtctctggagtataactttttgtaacattagccattatttggtaacagaatttaaggatgatggaatgatggaaggtattacatatttctaaaacttaattaagctctaggtcagataacaatggagtaaagtgatacctgcatttttttccccagtgtaatcttaatttactattgtatttttcacttaaaattttgtagggaaaaaaagttttcaagggaacactaagattaaattgactaggttcaaatatgcttccttatgagattcaaaatttactgtgtgaaattaaagtttaagagacctaaaaaaatgtactcccaataaagaatcaatactgcttc

SEQ ID NO: 7370 - protein, 92 aa, Homo sapiens; identical to SEQ ID NO: 7344

SEQ ID NO: 7371 - DNA, 894 bp, Homo sapiens
acttccgaattgggtcatggcggaagggtgttaatagcctggccgcccgtgccccagggaatgcttatttttgaccttagttgcaaagtgagtttcttctgtatgcttgagtcaagaactctaagtcatcttggtaataccgggttggatgcttaaagctgcagcaaaaagaccagaactttcaggaaaaaacactatatccaacaactcagatatggcagaagtgaagtcaatgttccgggaagttcttccaaagcaagggccactgtttgtggaagatataatgacaatggtgctgtgtaaacccaaacttttacccttaaaatctctgactctggaaaaactagagaaaatgcatcaagcagcacagaatacaattcgccaacaagaaatggcagaaaaggatcaacggcaaataacccactgaatgataactgagcactttagggaacaacctgccttatctactatttaacaataactagaaaatatgcttctgtgtgctgaaagtagtatgtgttatcaataaaattgatagtattcatagaaatacaaaaatatccaagattgatgaaatttgtattgtgaatgtaaacactctggtttgtattgaacataaacagttaaactatgaaccaagttttatggggtttaagtcatgtttttagaattgcaaattaaattatttgttcaccattcctattgctatcttttatagataacattcttgggatcttttatagcattcttgggcacaagggattaaatacaacttttatatacagaggatctttacatgtttattaaatctgaatttgaagatacattccaatcttgcataaagtgtttgttgggcttttacattacgtaattaaaaaacaaaattttttaacc

SEQ ID NO: 7372 - protein, 92 aa, Homo sapiens; identical to SEQ ID NO: 7344

SEQ ID NO: 7373 - DNA, 1874 bp, Homo sapiens
ccttcgccagtctcaccgttacccggggcaacagctgagccgtctgggaagggatgcatcttttcttctgtatgcttgagtcaagaactctaagtcatcttggtaataccgggttggatgcttaaagctgcagcaaaaagaccagaactttcaggaaaaaacactatatccaacaactcagatatggcagaagtgaagtcaatgttccgggaagttcttccaaagcaaggtatgtacatcacaaatattgaggtcattgattattacaggactaaagaagtcataggcagtgtcacatagcaggcttaatagctaaacatctgcagctattgtgttccgtattatctcatttactgtcttttactatatgctttttcatgacatccagtaaaaggataacaaatgaaacattgtttcttatacctaaaattgcctattaattagctaattcctaaaattcctaattacaatatgaattttttttaagagacaggttgtcactctgccacccaggcttgggtacagctggcacaaccgtagctcaccgcagccttgaactactgggctcctgccctagcctactgatttgctagtactacaggcatgtgctaccatgcctggctaatttgttcttatttttgtagagaagggatctcaatgtgttgcctaggctggtctcaaacccctgggctcaaacaaacaatccaacccctttggcatcccaaagtgctgggataacaggtaagagctaccatgccctactcaatatgaaacttcagtgaaagaaataatggaatttactatgttaaataaggtctgaaagtggagaaagagaaacctgaagcaacagtaagaaaagccgaaggtttaaaccttcagtcatttgaatatttacgttaaatatcatattttgctatatttttttgcactatgtatatatatattctgccaaatcttattttaagattaaacttctgacacaaaaagttgtgtcttatggtagcatagattcttgggtagaacgctcaaaacttgtcttcctcagaagcaccctactagtaagaaatgcgcttatagaatgacaatgatctttctggttccagagcaaaactcaatttaggtacaagagtttttcagtgacaagagattaattttttagaccttcattctagctgcaaatccaactacaaacaactgggttatctttcttgaattaattcttatttcttgttaaacttagggccactgtttgtggaagatataatgacaatggtgctgtgtaaacccaaacttttacccttaaaatctctgactctggaaaaactagagaaaatgcatcaagcagcacagaatacaattcgccaacaagaaatggcagaaaaggatcaacggcaaataacccactgaatgataactgagcactttagggaacaacctgccttatctactatttaacaataactagaaaatatgcttctgtgtgctgaaagtagtatgtgttatcaataaaattgatagtattcatagaaatacaaaaatatccaagattgatgaaatttgtattgtgaatgtaaacactctggtttgtattgaacataaacagttaaactatgaaccaagttttatggggtttaagtcatgtttttagaattgcaaattaaattatttgttcaccattcctattgctatcttttatagataacattcttgggatcttttatagcattcttgggcacaagggattaaatacaacttttatatacagaggatctttacatgtttattaaatctgaatttgaagatacattccaatcttgcataaagtgtttgttgggcttttacattacgtaattaaaaaacaaaattttttaacc

SEQ ID NO: 7374 - protein, 60 aa, Homo sapiens [sequence omitted]

SEQ ID NO: 7375 - DNA, 961 bp, Homo sapiens
tccttcgccagtctcaccgttacccggggcaacagctgagccgtctgggaagggatgcatcttttcttctgtatgcttgagtcaagaactctaagtcatcttggtaataccgggttggatgcttaaagctgcagcaaaaagaccagaactttcaggaaaaaacactatatccaacaactcagatatggcagaagtgaagtcaatgttccgggaagttcttccaaagcaagagaagggatctcaatgtgttgcctaggctggtctcaaacccctgggctcaaacaaacaatccaacccctttggcatcccaaagtgctgggataacagggccactgtttgtggaagatataatgacaatggtgctgtgtaaacccaaacttttacccttaaaatctctgactctggaaaaactagagaaaatgcatcaagcagcacagaatacaattcgccaacaagaaatggcagaaaaggatcaacggcaaataacccactgaatgataactgagcactttagggaacaacctgccttatctactatttaacaataactagaaaatatgcttctgtgtgctgaaagtagtatgtgttatcaataaaattgatagtattcatagaaatacaaaaatatccaagattgatgaaatttgtattgtgaatgtaaacactctggtttgtattgaacataaacagttaaactatgaaccaagttttatggggtttaagtcatgtttttagaattgcaaattaaattatttgttcaccattcctattgctatcttttatagataacattcttgggatcttttatagcattcttgggcacaagggattaaatacaacttttatatacagaggatctttacatgtttattaaatctgaatttgaagatacattccaatcttgcataaagtgtttgttgggcttttacattacgtaattaaaaaacaaaattttttaacc

SEQ ID NO: 7376 - protein, 45 aa, Homo sapiens; identical to SEQ ID NO: 7348

SEQ ID NO: 7377 - DNA, 800 bp, Homo sapiens
gtagatttttttccttcgccagtctcaccgttacccggggcaacagctgagccgtctgggaagggatgcatcttttcttctgtatgcttgagtcaagaactctaagtcatcttggtaataccgggttggatgcttaaagctgcagcaaaaagaccagaactttcagggccactgtttgtggaagatataatgacaatggtgctgtgtaaacccaaacttttacccttaaaatctctgactctggaaaaactagagaaaatgcatcaagcagcacagaatacaattcgccaacaagaaatggcagaaaaggatcaacggcaaataacccactgaatgataactgagcactttagggaacaacctgccttatctactatttaacaataactagaaaatatgcttctgtgtgctgaaagtagtatgtgttatcaataaaattgatagtattcatagaaatacaaaaatatccaagattgatgaaatttgtattgtgaatgtaaacactctggtttgtattgaacataaacagttaaactatgaaccaagttttatggggtttaagtcatgtttttagaattgcaaattaaattatttgttcaccattcctattgctatcttttatagataacattcttgggatcttttatagcattcttgggcacaagggattaaatacaacttttatatacagaggatctttacatgtttattaaatctgaatttgaagatacattccaatcttgcataaagtgtttgttgggcttttacattacgtaattaaaaaacaaaattttttaacc

SEQ ID NO: 7378 - protein, 67 aa, Homo sapiens; identical to SEQ ID NO: 7350

SEQ ID NO: 7379 - DNA, 790 bp, Homo sapiens
agggtgacgtagatttttttccttcgccagtctcaccgttacccggggcaacagctgagccgtctgggaagggatgcatctgaaaaaacactatatccaacaactcagatatggcagaagtgaagtcaatgttccgggaagttcttccaaagcaagggccactgtttgtggaagatataatgacaatggtgctgtgtaaacccaaacttttacccttaaaatctctgactctggaaaaactagagaaaatgcatcaagcagcacagaatacaattcgccaacaagaaatggcagaaaaggatcaacggcaaataacccactgaatgataactgagcactttagggaacaacctgccttatctactatttaacaataactagaaaatatgcttctgtgtgctgaaagtagtatgtgttatcaataaaattgatagtattcatagaaatacaaaaatatccaagattgatgaaatttgtattgtgaatgtaaacactctggtttgtattgaacataaacagttaaactatgaaccaagttttatggggtttaagtcatgtttttagaattgcaaattaaattatttgttcaccattcctattgctatcttttatagataacattcttgggatcttttatagcattcttgggcacaagggattaaatacaacttttatatacagaggatctttacatgtttattaaatctgaatttgaagatacattccaatcttgcataaagtgtttgttgggcttttacattacgtaattaaaaaacaaaattttttaacc

SEQ ID NO: 7380 - protein, 70 aa, Homo sapiens; identical to SEQ ID NO: 7352

SEQ ID NO: 7381 - DNA, 1048 bp, Homo sapiens
ctgtttccagggtgacgtagatttttttccttcgccagtctcaccgttacccggggcaacagctgagccgtctgggaagggatgcatcttttcttctgtatgcttgagtcaagaactctaagtcatcttggtaataccgggttggatgcttaaagctgcagcaaaaagaccagaactttcagggcttctcaaatttaataactatggaatcttatcagaaagtccattaacatctcaaagaacaacgtggttattgtatcaatcaccatcctttataccaggatttgcatatccttcaagatgcctgaagacaatcggaggggtatacaagcaagcgaggaaaaaacactatatccaacaactcagatatggcagaagtgaagtcaatgttccgggaagttcttccaaagcaagggccactgtttgtggaagatataatgacaatggtgctgtgtaaacccaaacttttacccttaaaatctctgactctggaaaaactagagaaaatgcatcaagcagcacagaatacaattcgccaacaagaaatggcagaaaaggatcaacggcaaataacccactgaatgataactgagcactttagggaacaacctgccttatctactatttaacaataactagaaaatatgcttctgtgtgctgaaagtagtatgtgttatcaataaaattgatagtattcatagaaatacaaaaatatccaagattgatgaaatttgtattgtgaatgtaaacactctggtttgtattgaacataaacagttaaactatgaaccaagttttatggggtttaagtcatgtttttagaattgcaaattaaattatttgttcaccattcctattgctatcttttatagataacattcttgggatcttttatagcattcttgggcacaagggattaaatacaacttttatatacagaggatctttacatgtttattaaatctgaatttgaagatacattccaatcttgcataaagtgtttgttgggcttttacattacgtaattaaaaaacaaaattttttaacc

SEQ ID NO: 7382 - protein, 103 aa, Homo sapiens; identical to SEQ ID NO: 7354

SEQ ID NO: 7383 - DNA, 1048 bp, Homo sapiens
agttcctctacgccgtctcccgcccactgggcgcctctggctagccgggctacagagtaagcctccagcagggtagagtgacaactccccgatcggaagttactgttgaagctaaggcggccataactgataatggcaaaaggagattcctggcttcctgtttccagggtgacgtagatttttttccttcgccagtctcaccgttacccggggcaacagctgagccgtctgggaagggatgcatcttttcttctgtatgcttgagtcaagaactctaagtcatcttggtaataccgggttggatgcttaaagctgcagcaaaaagaccagaactttcaggaaaaaacactatatccaacaactcagatatggcagaagtgaagtcaatgttccgggaagttcttccaaagcaagggccactgtttgtggaagatataatgacaatggtgctgtgtaaacccaaacttttacccttaaaatctctgactctggaaaaactagagaaaatgcatcaagcagcacagaatacaattcgccaacaagaaatggcagaaaaggatcaacggcaaataacccactgaatgataactgagcactttagggaacaacctgccttatctactatttaacaataactagaaaatatgcttctgtgtgctgaaagtagtatgtgttatcaataaaattgatagtattcatagaaatacaaaaatatccaagattgatgaaatttgtattgtgaatgtaaacactctggtttgtattgaacataaacagttaaactatgaaccaagttttatggggtttaagtcatgtttttagaattgcaaattaaattatttgttcaccattcctattgctatcttttatagataacattcttgggatcttttatagcattcttgggcacaagggattaaatacaacttttatatacagaggatctttacatgtttattaaatctgaatttgaagatacattccaatcttgcataaagtgtttgttgggcttttacattacgtaattaaaaaacaaaattttttaacc

SEQ ID NO: 7384 - protein, 92 aa, Homo sapiens; identical to SEQ ID NO: 7344

SEQ ID NO: 7385 - DNA, 553 bp, Homo sapiens
acttccgaattgggtcatggcggaagggtgttaatagcctggccgcccgtgccccagggaatgcttatttttgaccttagttgcaaagtgagtttcttctgtatgcttgagtcaagaactctaagtcatcttggtaataccgggttggatgcttaaagctgcagcaaaaagaccagaactttcaggaaaaaacactatatccaacaactcagatatggcagaagtgaagtcaatgttccgggaagttcttccaaagcaagggccactgtttgtggaagatataatgacaatggtgctgtgtaaacccaaacttttacccttaaaatctctgactctggaaaaactagagaaaatgcatcaagcagcacagaatacaattcgccaacaagaaatggcagaaaaggatcaacggcaaataacccactgaatgataactgagcactttagggaacaacctgccttatctactatttaacaataactagaaaatatgcttctgtgtgctgaaagtagtatgtgttatcaataaaattgatagtattcatagaaatac

SEQ ID NO: 7386 - protein, 92 aa, Homo sapiens; identical to SEQ ID NO: 7344

SEQ ID NO: 7387 - DNA, 1533 bp, Homo sapiens
ccttcgccagtctcaccgttacccggggcaacagctgagccgtctgggaagggatgcatcttttcttctgtatgcttgagtcaagaactctaagtcatcttggtaataccgggttggatgcttaaagctgcagcaaaaagaccagaactttcaggaaaaaacactatatccaacaactcagatatggcagaagtgaagtcaatgttccgggaagttcttccaaagcaaggtatgtacatcacaaatattgaggtcattgattattacaggactaaagaagtcataggcagtgtcacatagcaggcttaatagctaaacatctgcagctattgtgttccgtattatctcatttactgtcttttactatatgctttttcatgacatccagtaaaaggataacaaatgaaacattgtttcttatacctaaaattgcctattaattagctaattcctaaaattcctaattacaatatgaattttttttaagagacaggttgtcactctgccacccaggcttgggtacagctggcacaaccgtagctcaccgcagccttgaactactgggctcctgccctagcctactgatttgctagtactacaggcatgtgctaccatgcctggctaatttgttcttatttttgtagagaagggatctcaatgtgttgcctaggctggtctcaaacccctgggctcaaacaaacaatccaacccctttggcatcccaaagtgctgggataacaggtaagagctaccatgccctactcaatatgaaacttcagtgaaagaaataatggaatttactatgttaaataaggtctgaaagtggagaaagagaaacctgaagcaacagtaagaaaagccgaaggtttaaaccttcagtcatttgaatatttacgttaaatatcatattttgctatatttttttgcactatgtatatatatattctgccaaatcttattttaagattaaacttctgacacaaaaagttgtgtcttatggtagcatagattcttgggtagaacgctcaaaacttgtcttcctcagaagcaccctactagtaagaaatgcgcttatagaatgacaatgatctttctggttccagagcaaaactcaatttaggtacaagagtttttcagtgacaagagattaattttttagaccttcattctagctgcaaatccaactacaaacaactgggttatctttcttgaattaattcttatttcttgttaaacttagggccactgtttgtggaagatataatgacaatggtgctgtgtaaacccaaacttttacccttaaaatctctgactctggaaaaactagagaaaatgcatcaagcagcacagaatacaattcgccaacaagaaatggcagaaaaggatcaacggcaaataacccactgaatgataactgagcactttagggaacaacctgccttatctactatttaacaataactagaaaatatgcttctgtgtgctgaaagtagtatgtgttatcaataaaattgatagtattcatagaaatac

SEQ ID NO: 7388 - protein, 60 aa, Homo sapiens [sequence omitted]

SEQ ID NO: 7389 - DNA, 429 bp, Homo sapiens
ccttcgccagtctcaccgttacccggggcaacagctgagccgtctgggaagggatgcatctgaaaaaacactatatccaacaactcagatatggcagaagtgaagtcaatgttccgggaagttcttccaaagcaagggccactgtttgtggaagatataatgacaatggtgctgtgtaaacccaaacttttacccttaaaatctctgactctggaaaaactagagaaaatgcatcaagcagcacagaatacaattcgccaacaagaaatggcagaaaaggatcaacggcaaataacccactgaatgataactgagcactttagggaacaacctgccttatctactatttaacaataactagaaaatatgcttctgtgtgctgaaagtagtatgtgttatcaataaaattgatagtattcatagaaatac

SEQ ID NO: 7390 - protein, 70 aa, Homo sapiens; identical to SEQ ID NO: 7352

SEQ ID NO: 7391 - DNA, 707 bp, Homo sapiens
agttcctctacgccgtctcccgcccactgggcgcctctggctagccgggctacagagtaagcctccagcagggtagagtgacaactccccgatcggaagttactgttgaagctaaggcggccataactgataatggcaaaaggagattcctggcttcctgtttccagggtgacgtagatttttttccttcgccagtctcaccgttacccggggcaacagctgagccgtctgggaagggatgcatcttttcttctgtatgcttgagtcaagaactctaagtcatcttggtaataccgggttggatgcttaaagctgcagcaaaaagaccagaactttcaggaaaaaacactatatccaacaactcagatatggcagaagtgaagtcaatgttccgggaagttcttccaaagcaagggccactgtttgtggaagatataatgacaatggtgctgtgtaaacccaaacttttacccttaaaatctctgactctggaaaaactagagaaaatgcatcaagcagcacagaatacaattcgccaacaagaaatggcagaaaaggatcaacggcaaataacccactgaatgataactgagcactttagggaacaacctgccttatctactatttaacaataactagaaaatatgcttctgtgtgctgaaagtagtatgtgttatcaataaaattgatagtattcatagaaatac

SEQ ID NO: 7392 - protein, 92 aa, Homo sapiens; identical to SEQ ID NO: 7344

SEQ ID NO: 7393 - DNA, 1498 bp, Homo sapiens
accgttacccggggcaacagctgagccgtctgggaagggatgcatcttttcttctgtatgcttgagtcaagaactctaagtcatcttggtaataccgggttggatgcttaaagctgcagcaaaaagaccagaactttcagggcttctcaaatttaataactatggaatcttatcagaaagtccattaacatctcaaagaacaacgtggttattgtatcaatcaccatcctttataccaggatttgcatatccttcaagatgcctgaagacaatcggaggggtatacaagcaagcgaggttaagaacaatcacttttcagatcctaaacttttatatgtagtgtctgctgataatgcattccctgagaaaatggacctgtggataaaccatcatgcttcatctcatttcctgtctcctctttcaccatttttctttcttttcttttctttttttttttttttcttgagacaagctcttactctgtcacctaagctagaatgcagtggcgtgatcatatctcactgcaacctaaaactcaggctcaagcagtaccctcacctcagcctcccgagtagctgagactaacaggcacactccatcatgcccgaataatttttgttaattttttgtagagatgaggtcttgctttgttgtctaggctggtcttgaactgggctcaagcgatcctcccactttggccttccaaagtgctgggattccagatgcgagccaccgcaccagtcccccaattatttttctaaggatgtatgaaggaaaggcatctctctagcctggtagaatcttactatgacaaaaatgctccagaaaataaacatctcttaggagctacacacagagacaaggaaacactggtaactcaagaaagactaagggcttcgctaattattaagtaagtagtgcttctgcaagtcaagagactgttctcagctttcaacaatactgaaggaatacctaattgagtagtctgctggtcatttaaaattatttcttgatgataggtcactacgtgattgttagcatataacgtaagttcaaagattgaaaaaaattttcccattttcatctcagtgtttacatctacaaaaatgaagaatagggctgggcacagtggctcacgcctgtaatcccagcactttgggaggccaacgggggcggatcacttgaggtcagaagttcgagaccagcctggccaacatggtgaaaccctgtctctactgaaaatacaaaaattagccgggcatggtggcatgcgcctgtaatcccagctactcgggagtctcaggcaggagaattgcttgaatccaggtggcggaggttgcagtgagccgagatcgtgccactgcaccccagcctgggcaacagagcaagactccatctcaaaaaaaaggaagaagaatagaattgtagcaataagtaaatttcagccatgtatatacgtgaactaattgagaaaataaagctgtcttcttattaacag

SEQ ID NO: 7394 - protein, 78 aa, Homo sapiens
MLKAAAKRPELSGLLKFNNYGILSESPLTSQRTTWLLYQSPSFIPGFAYPSRCLKTIGGVYKQARLRTITFQILNFYM

SEQ ID NO: 7395 - DNA, 2224 bp, Homo sapiens
tactctcgctccagcctccccgccccacccctctgccgtgggcccgtcactcgctagttcctctacgccgtctcccgcccactgggcgcctctggctagccgggctacagagtaagcctccagcagggtagagtgacaactccccgatcggaagttactgttgaagctaaggcggccataactgataatggcaaaaggagattcctggcttcctgtttccagggtgacgtagatttttttccttcgccagtctcaccgttacccggggcaacagctgagccgtctgggaagggatgcatctgtaagtaagcccaaagaggtaccgtgggtgaccacacatcccatgttagacaagttaattcatactccggattacacgtccagtttcctggcccttattttactgagacgtctggtcacttacggagatggacaacagtttagggctccgaaattccctctcctgcccggaagttgcatttggcacttccgaattgggtcatggcggaagggtgttaatagcctggccgcccgtgccccagggaatgcttatttttgaccttagttgcaaagtgaggtgagtccgtggaccccaaccagtgggccggacccgggccggacggtccctgtgggacagagcgctgaaatggcgagcggggctcagggccgcttccgttggaaggcggtttttttccgggctggcctggcggcggcccgcccccgtgaggctccctgtggggtgaggccgctctacaggccgccctaacccagccagaggcagcccggccgggaggaccccagcggggaatgggcggggacctcggggcggagctcctaactccggcaaaacggagctcttgaccacgcctccgcaagttcctattaagtactttcactccttggcctttggagggaggagaattcgggaacttcagaaaatcattttccaccttcacctataaaaggaaaagatgagcccctaccaccagggcaggacctcaatctttttcccctgccacctgccttcccattctgatttttcccccctttccgcgtctctcctttgagtctttgtaagctttgactgcggttctggtggtgggattcctgcaggtctacagtttcttaaacaacgtgttgaagatttttgaaaatactgtattgcttttatatggccctttacaaagttatcatacattatcttgtagtttcttctgtatgcttgagtcaagaactctaagtcatcttggtaataccgggttggatgcttaaagctgcagcaaaaagaccagaactttcaggtaaaattgaaaatggttaatatccagccagtcaacaatacagatgcaaacctaccttctcgacttaatttctgcttccttagtacttacacgccagccaaaatgaactactcttgtttctttgctgttaattactgaaatctgttgtagcagtcaccttttgtgattctgtatctgattctgttacccgtggagatgtgtttccagattcttcccagcaggaagtaatttcctctgagtttagcattttttgtacatcttttatgacaatcagtatgttatatatatataatagcgcttatgtttttagcttcactaccatgtctgcacctaaatagaatggtttgtatcagattcgtcttcccgtcattttcaccatgcacatgatattattttggtaaatacttactgaaagtttgaatatatcgggtgtctcttggatgcccaagacacttccagccaagttttagagaccttcaatttatcagaaattcagctgagcgcctgctactcaatctttgttttacgtttcccctgtgaagtctttctgacatgatttttttccccagtgttttattatgaaagtgttcatatatttaaaagctgaaagaaataatttaatgaatattcatgtacccatcatctatatgcagcagttaacattttgccattttttttcattcctccccactttttcattgtcataaaaagttgcagacacttattgttaggcaagacacccttaagatttccagcatgaatttcctaagaattttgaagttctccagcaaaacacaatatcattatttcagctgttttgtaacttttaaaatctaggccaagtgctaattttcctaatttacccaggaatatcttttataccttctccttcccaatcctgcaaaaaaaaaaaaaaaaaaaaa

SEQ ID NO: 7396 - protein, 71 aa, Homo sapiens [sequence omitted]

SEQ ID NO: 7397 - DNA, 3943 bp, Homo sapiens
gggggaggggcgggcggggggcggcggttgggcagcgtcgcttcttaggaggaggaggaagaggaggaaggagggcgagcgaggaggatggcggagtcggggctcctgacggaactctaatgaatcattgattgaccagcactattttaccagttggaatgaatgatcagaaatgggcatagtgcttttagatccaacatgtaacagatggatgttactccatgctgattacttcttcaagccagtacttttttgattgtgtaggatctttgtctcttcatctttgaattcaattactggaaaataaaaggagttcatgtagtttttgtccaggcttgagtcaccatgagtagtagtttaggaaaagaaaaagactctaaagaaaaagatcccaaagtaccatcagccaaggaaagagaaaaggaggcaaaagcctctggaggttttgggaaagagagcaaagaaaaagaacctaagaccaaagggaaagatgccaaagatggaaagaaggactccagtgctgcccaaccaggggtggcattttcagttgacaatacgatcaaacggccaaacccagcacctgggactagaaaaaaatccagcaatgcagaggtgattaaagagctcaacaaatgccgggaagagaattcaatgcgtttggacttatccaagagatctatacacatattgccatcatcaatcaaagagttgactcaattaacagaactttatttatacagtaacaaattgcagtccctcccagcagaggtgggatgtttagtaaatctcatgacactggctctaagtgaaaattcacttaccagtttgcctgactctcttgataacttgaagaagctgcggatgcttgatttacggcataataaactgagagaaattccttcagtggtgtataggctggattctctcaccactctttaccttcgctttaatcgtataactactgtggaaaaggacatcaaaaacttgtcaaaactcagcatgcttagcattcgagagaacaaaattaaacaactacctgctgaaattggtgaattatgtaacctcattacgctggatgtagctcacaatcaacttgaacaccttccaaaggagattggaaactgtacacagataaccaaccttgacttgcagcacaatgaactgctagacctcccagatactataggaaacctgtccagtttaagtcgtcttggtctgagatataacagactgtcagcaatacccagatcattagcaaaatgcagtgcacttgaagaattaaatttagagaacaataacatttctactttaccagagagtcttttatcaagtcttgtgaaactgaatagtttgaccttagctagaaattgcttccagttgtatccagtgggtggtccatctcagttttctaccatctattccctcaacatggaacacaatcgaatcaacaaaattccatttggaattttctccagagcaaaagtattaagtaagctgaatatgaaggacaatcagttaacatcacttcccttggattttggaacttggaccagtatggtagaattgaatttagccactaatcagctcacaaagatccctgaggatgtgtctggtctcgtttctcttgaggttcttatcttatcaaacaatcttctaaagaagcttccccatggtcttggaaaccttaggaagttaagagagttggatctagaagagaacaaattggaatccttgccaaatgaaattgcatatcttaaggatttacagaaattagtcttgacaaacaaccagttgaccactcttcccagaggcattggtcaccttactaatctcacacatctgggccttggagagaacctacttactcaccttcctgaagaaattggtacactggagaacctagaagaactgtatttgaatgacaaccccaacctgcatagccttccctttgagctggcactctgcagcaagctttcaatcatgagtattgagaactgtccactcagtcaccttccacctcagattgttgctggggggccttctttcatcattcagttcttaaagatgcagggtccatatcgtgccatggtctgatataaatctgctggtcccacacactgttcaaaaatagactgccattaatgtttcttatctatatctgtatctatttatgtagatattggtatatggcagatttataaaaattgcattatgtgtttctgctaatagaggaatcatagccatttagaattttttttaaattctgtacaaaaggcttatataagttttctttgctgaatttgatggatgtttttctgttgtgtaatctgatatgccagtttgcttaaaacatttgccaacacattatgaagttattaaatttaagggacagaggtagtatagttagatatactttctcttaggaaaaataatgggcaaaaatttttgttgcaacttttcatatatattttccccttaccaattgttttatccttatagtattgtaggccctgaaagtagaatttttctttaacttattttgagatttgagatttaaattttatgtattgtttacagtcagagtaaatcactggatttcttttgtttgttttgatttgctctgttttattcagtcaaatctagagtttgaatcctctgctaaagaatttgcatccactggtgtaaacagtgaaaggtatttgcttgttgaaaaaaaaaactggcaaagtgaaaagatacagtcaaaaatctagaatttctttaattttgcttctctgacgagttgtgaagcaaaatacctgaagtgagtctttgggtaggggaagggtattgagaccttttctagtatgaatattttttaagtttgggggaagagaaacttgcagtgaaaaggagttttttcattcctgaaagttgcagatccacaaaactaacaggataattgggcaaataaattacatataaacacacacaatctatatatgtatatacaatgctatatagatatgtatttattatatcataaactacagtaggtaactttaaggatttcttcctatccttgtacaatgacatgaatgtctttctttgaaaactgcaatgtatgtatgtttcaaggttatttaacagtgtactatggttttatatcttgacttgccttgtacatctttcaattctggaatatctgtgtctaagcacaatatcttcacactgtgctgtattgctgctgaactaaatgcacttttccccacatatggggcactggcttcaaacaattcagttcagtatcattacttttaatctcatctttcctttcttggtagttgttaatacagttatggaaaagaggcacattgcatagaagccattggggagttcagtggaagttctgtaagatgtgcatgtactatttgatgcgttttctttgcttcactgcttttaatacttagcagtattgttggtctaagtcaatttgattattgaggagtctcagagcaaggtgcgttctagatgtcatcctaaaaaacacttcatatataattaatcactattttgtataattacatattgctgcttgtgtgtttttttttttttccatttagttgggcgttgtgttttacacaaaaccatttttgaattaaggctatgatattaagatagaaatttggactgttgttctgcttttcctggcactcaaattcatgactagttttgaggtcaaacctatgttcgtaatgagagattttataaggatcaactaagaaatggaaggcaggtgaagatataaaaccctagaatgcttaaatgtgctgtaaaactattgtagatgtcactggattttaccaagtaatatcctttcttttttttttccccccatctgctgtggcttttcagttaaaattttgtttataaaaggaatttgtttattacagctctacctaga

SEQ ID NO: 7398 - protein, 582 aa, Homo sapiens; identical to SEQ ID NO: 813

SEQ ID NO: 7399 - DNA, 3761 bp, Homo sapiens
ggttgggcagcgtcgcttcttaggaggaggaggaagaggaggaaggagggcgagcgaggaggatggcggagtcggggctcctgacggaactctaatgaatcattgattgaccagcactattttaccagttggaatgaatgatcagaaatgggcatagtgcttttagatccaacatgtaacagatggatgttactccatgctgattacttcttcaagccagtacttttttgattgtgtaggatctttgtctcttcatctttgaattcaattactggaaaataaaaggagttcatgtagtttttgtccaggcttgagtcaccatgagtagtagtttaggaaaagaaaaagactctaaagaaaaagatcccaaagtaccatcagccaaggaaagagaaaaggaggcaaaagcctctggaggttttgggaaagagagcaaagaaaaagaacctaagaccaaagggaaagatgccaaagatggaaagaaggactccagtgctgcccaaccaggggtggcattttcagttgacaatacgatcaaacggccaaacccagcacctgggactagaaaaaaatccagcaatcagaggtgggatgtttagtaaatctcatgacactggctctaagtgaaaattcacttaccagtttgcctgactctcttgataacttgaagaagctgcggatgcttgatttacggcataataaactgagagaaattccttcagtggtgtataggctggattctctcaccactctttaccttcgctttaatcgtataactactgtggaaaaggacatcaaaaacttgtcaaaactcagcatgcttagcattcgagagaacaaaattaaacaactacctgctgaaattggtgaattatgtaacctcattacgctggatgtagctcacaatcaacttgaacaccttccaaaggagattggaaactgtacacagataaccaaccttgacttgcagcacaatgaactgctagacctcccagatactataggaaacctgtccagtttaagtcgtcttggtctgagatataacagactgtcagcaatacccagatcattagcaaaatgcagtgcacttgaagaattaaatttagagaacaataacatttctactttaccagagagtcttttatcaagtcttgtgaaactgaatagtttgaccttagctagaaattgcttccagttgtatccagtgggtggtccatctcagttttctaccatctattccctcaacatggaacacaatcgaatcaacaaaattccatttggaattttctccagagcaaaagtattaagtaagctgaatatgaaggacaatcagttaacatcacttcccttggattttggaacttggaccagtatggtagaattgaatttagccactaatcagctcacaaagatccctgaggatgtgtctggtctcgtttctcttgaggttcttatcttatcaaacaatcttctaaagaagcttccccatggtcttggaaaccttaggaagttaagagagttggatctagaagagaacaaattggaatccttgccaaatgaaattgcatatcttaaggatttacagaaattagtcttgacaaacaaccagttgaccactcttcccagaggcattggtcaccttactaatctcacacatctgggccttggagagaacctacttactcaccttcctgaagaaattggtacactggagaacctagaagaactgtatttgaatgacaaccccaacctgcatagccttccctttgagctggcactctgcagcaagctttcaatcatgagtattgagaactgtccactcagtcaccttccacctcagattgttgctggggggccttctttcatcattcagttcttaaagatgcagggtccatatcgtgccatggtctgatataaatctgctggtcccacacactgttcaaaaatagactgccattaatgtttcttatctatatctgtatctatttatgtagatattggtatatggcagatttataaaaattgcattatgtgtttctgctaatagaggaatcatagccatttagaattttttttaaattctgtacaaaaggcttatataagttttctttgctgaatttgatggatgtttttctgttgtgtaatctgatatgccagtttgcttaaaacatttgccaacacattatgaagttattaaatttaagggacagaggtagtatagttagatatactttctcttaggaaaaataatgggcaaaaatttttgttgcaacttttcatatatattttccccttaccaattgttttatccttatagtattgtaggccctgaaagtagaatttttctttaacttattttgagatttgagatttaaattttatgtattgtttacagtcagagtaaatcactggatttcttttgtttgttttgatttgctctgttttattcagtcaaatctagagtttgaatcctctgctaaagaatttgcatccactggtgtaaacagtgaaaggtatttgcttgttgaaaaaaaaaactggcaaagtgaaaagatacagtcaaaaatctagaatttctttaattttgcttctctgacgagttgtgaagcaaaatacctgaagtgagtctttgggtaggggaagggtattgagaccttttctagtatgaatattttttaagtttgggggaagagaaacttgcagtgaaaaggagttttttcattcctgaaagttgcagatccacaaaactaacaggataattgggcaaataaattacatataaacacacacaatctatatatgtatatacaatgctatatagatatgtatttattatatcataaactacagtaggtaactttaaggatttcttcctatccttgtacaatgacatgaatgtctttctttgaaaactgcaatgtatgtatgtttcaaggttatttaacagtgtactatggttttatatcttgacttgccttgtacatctttcaattctggaatatctgtgtctaagcacaatatcttcacactgtgctgtattgctgctgaactaaatgcacttttccccacatatggggcactggcttcaaacaattcagttcagtatcattacttttaatctcatctttcctttcttggtagttgttaatacagttatggaaaagaggcacattgcatagaagccattggggagttcagtggaagttctgtaagatgtgcatgtactatttgatgcgttttctttgcttcactgcttttaatacttagcagtattgttggtctaagtcaatttgattattgaggagtctcagagcaaggtgcgttctagatgtcatcctaaaaaacacttcatatataattaatcactattttgtataattacatattgctgcttgtgtgtttttttttttttccatttagttgggcgttgtgttttacacaaaaccatttttgaattaaggctatgatattaagatagaaatttggactgttgttctgcttttcctggcactcaaattcatgactagttttgaggtcaaacctatgttcgtaatgagagattttataaggatcaactaagaaatggaaggcaggtgaagatataaaaccctagaatgcttaaatgtgctgtaaaactattgtagatgtcactggattttaccaagtaatatcctttcttttttttttccccccatctgctgtggcttttcagttaaaattttgtttataaaaggaatttgtttattacagctctacctaga

SEQ ID NO: 7400 - protein, 434 aa, Homo sapiens
MTLALSENSLTSLPDSLDNLKKLRMLDLRHNKLREIPSVVYRLDSLTTLYLRFNRITTVEKDIKNLSKLSMLSIRENKIKQLPAEIGELCNLITLDVAHNQLEHLPKEIGNCTQITNLDLQHNELLDLPDTIGNLSSLSRLGLRYNRLSAIPRSLAKCSALEELNLENNNISTLPESLLSSLVKLNSLTLARNCFQLYPVGGPSQFSTIYSLNMEHNRINKIPFGIFSRAKVLSKLNMKDNQLTSLPLDFGTWTSMVELNLATNQLTKIPEDVSGLVSLEVLILSNNLLKKLPHGLGNLRKLRELDLEENKLESLPNEIAYLKDLQKLVLTNNQLTTLPRGIGHLTNLTHLGLGENLLTHLPEEIGTLENLEELYLNDNPNLHSLPFELALCSKLSIMSIENCPLSHLPPQIVAGGPSFIIQFLKMQGPYRAMV

SEQ ID NO: 7401 - DNA, 1893 bp, Homo sapiens
ggaggaggaagaggaggaaggagggcgagcgaggaggatggcggagtcggggctcctgacgcattgtttacaataaccaagatatgaaatcaacctatgtcttcattgatggaagaatacacacagaaaatgtgacgttcagccttcaaatctaggaaatcctgatattggtgacatgatctgatcttggcccactgcaacctctgcctcccaggttcaagcgatcctcccacctcagcctcccaggaactctaatgaatcattgattgaccagcactattttaccagttggaatgaatgatcagaaatgggcatagtgcttttagatccaacatgtaacagatggatgttactccatgctgattacttcttcaagccagtacttttttgattgtgtaggatctttgtctcttcatctttgaattcaattactggaaaataaaaggagttcatgtagtttttgtccaggcttgagtcaccatgagtagtagtttaggaaaagaaaaagactctaaagaaaaagatcccaaagtaccatcagccaaggaaagagaaaaggaggcaaaagcctctggaggttttgggaaagagagcaaagaaaaagaacctaagaccaaagggaaagatgccaaagatggaaagaaggactccagtgctgcccaaccaggggtggcattttcagttgacaatacgatcaaacggccaaacccagcacctgggactagaaaaaaatccagcaatgcagaggtgattaaagagctcaacaaatgccgggaagagaattcaatgcgtttggacttatccaagagatctatacacatattgccatcatcaatcaaagagttgactcaattaacagaactttatttatacagtaacaaattgcagtccctcccagcagaggtgggatgtttagtaaatctcatgacactggctctaagtgaaaattcacttaccagtttgcctgactctcttgataacttgaagaagctgcggatgcttgatttacggcataataaactgagagaaattccttcagtggtgtataggctggattctctcaccactctttaccttcgctttaatcgtataactactgtggaaaaggacatcaaaaacttgtcaaaactcagcatgcttagcattcgagagaacaaaattaaacaactacctgctgaaattggtaagaggccttggattattattatttgtagtatttgttatgctaaataattttgagtgctttctcatatcaaaaaatgcctgatacttgcctaaaaacagcttatttctaaattacaacttttttatggtttactttattccattttcagcactgttaatagtacatggcttgaaattgtttcatagacttaaaaagtgagttagaaaatagatgtaattagatctttcccacacaaacctaatctttaactttcattggagaataagtaaatttaaagaagaaaagatgtttgcctaattttcaagttgttgctgtgtttaaagtatctgttgatacaattttattagatatatgaaaactacattttctcattctctgacttttccacctttatctgaaagatgtttaaattcacatcactttctacctaatttaccacaaaaggttgacaaatcagagccttacaaaagagcagtgtcataagaaatagaaaaaaaatttttttttgcatcttgaaagtacttacatgtttattaaaaataacacaagaatttagaagggtagaagaaacgtcacctgtagtgaatgcagcactgttaccattttgctaattttcattccagtctttcacataaagctaacttgtactaaaacaaagaaaatgttttttaaaggctggtagtaggagaaaaaaatagggaatataa

SEQ ID NO: 7402 - protein, 250 aa, Homo sapiens [sequence omitted]

SEQ ID NO: 7403 - DNA, 3976 bp, Homo sapiens
agccggcgcgagggcgcgggccgggggcccccggcggacagtctctctcctctcggctccctgggcccccgggcccagtccgcagggcgccccgagtcgtgtaaatcgttggcgagggcccgggcgcagcggcggtcatacagggaactctaatgaatcattgattgaccagcactattttaccagttggaatgaatgatcagaaatgggcatagtgcttttagatccaacatgtaacagatggatgttactccatgctgattacttcttcaagccagtacttttttgattgtgtaggatctttgtctcttcatctttgaattcaattactggaaaataaaaggagttcatgtagtttttgtccaggcttgagtcaccatgagtagtagtttaggaaaagaaaaagactctaaagaaaaagatcccaaagtaccatcagccaaggaaagagaaaaggaggcaaaagcctctggaggttttgggaaagagagcaaagaaaaagaacctaagaccaaagggaaagatgccaaagatggaaagaaggactccagtgctgcccaaccaggggtggcattttcagttgacaatacgatcaaacggccaaacccagcacctgggactagaaaaaaatccagcaatgcagaggtgattaaagagctcaacaaatgccgggaagagaattcaatgcgtttggacttatccaagagatctatacacatattgccatcatcaatcaaagagttgactcaattaacagaactttatttatacagtaacaaattgcagtccctcccagcagaggtgggatgtttagtaaatctcatgacactggctctaagtgaaaattcacttaccagtttgcctgactctcttgataacttgaagaagctgcggatgcttgatttacggcataataaactgagagaaattccttcagtggtgtataggctggattctctcaccactctttaccttcgctttaatcgtataactactgtggaaaaggacatcaaaaacttgtcaaaactcagcatgcttagcattcgagagaacaaaattaaacaactacctgctgaaattggtgaattatgtaacctcattacgctggatgtagctcacaatcaacttgaacaccttccaaaggagattggaaactgtacacagataaccaaccttgacttgcagcacaatgaactgctagacctcccagatactataggaaacctgtccagtttaagtcgtcttggtctgagatataacagactgtcagcaatacccagatcattagcaaaatgcagtgcacttgaagaattaaatttagagaacaataacatttctactttaccagagagtcttttatcaagtcttgtgaaactgaatagtttgaccttagctagaaattgcttccagttgtatccagtgggtggtccatctcagttttctaccatctattccctcaacatggaacacaatcgaatcaacaaaattccatttggaattttctccagagcaaaagtattaagtaagctgaatatgaaggacaatcagttaacatcacttcccttggattttggaacttggaccagtatggtagaattgaatttagccactaatcagctcacaaagatccctgaggatgtgtctggtctcgtttctcttgaggttcttatcttatcaaacaatcttctaaagaagcttccccatggtcttggaaaccttaggaagttaagagagttggatctagaagagaacaaattggaatccttgccaaatgaaattgcatatcttaaggatttacagaaattagtcttgacaaacaaccagttgaccactcttcccagaggcattggtcaccttactaatctcacacatctgggccttggagagaacctacttactcaccttcctgaagaaattggtacactggagaacctagaagaactgtatttgaatgacaaccccaacctgcatagccttccctttgagctggcactctgcagcaagctttcaatcatgagtattgagaactgtccactcagtcaccttccacctcagattgttgctggggggccttctttcatcattcagttcttaaagatgcagggtccatatcgtgccatggtctgatataaatctgctggtcccacacactgttcaaaaatagactgccattaatgtttcttatctatatctgtatctatttatgtagatattggtatatggcagatttataaaaattgcattatgtgtttctgctaatagaggaatcatagccatttagaattttttttaaattctgtacaaaaggcttatataagttttctttgctgaatttgatggatgtttttctgttgtgtaatctgatatgccagtttgcttaaaacatttgccaacacattatgaagttattaaatttaagggacagaggtagtatagttagatatactttctcttaggaaaaataatgggcaaaaatttttgttgcaacttttcatatatattttccccttaccaattgttttatccttatagtattgtaggccctgaaagtagaatttttctttaacttattttgagatttgagatttaaattttatgtattgtttacagtcagagtaaatcactggatttcttttgtttgttttgatttgctctgttttattcagtcaaatctagagtttgaatcctctgctaaagaatttgcatccactggtgtaaacagtgaaaggtatttgcttgttgaaaaaaaaaactggcaaagtgaaaagatacagtcaaaaatctagaatttctttaattttgcttctctgacgagttgtgaagcaaaatacctgaagtgagtctttgggtaggggaagggtattgagaccttttctagtatgaatattttttaagtttgggggaagagaaacttgcagtgaaaaggagttttttcattcctgaaagttgcagatccacaaaactaacaggataattgggcaaataaattacatataaacacacacaatctatatatgtatatacaatgctatatagatatgtatttattatatcataaactacagtaggtaactttaaggatttcttcctatccttgtacaatgacatgaatgtctttctttgaaaactgcaatgtatgtatgtttcaaggttatttaacagtgtactatggttttatatcttgacttgccttgtacatctttcaattctggaatatctgtgtctaagcacaatatcttcacactgtgctgtattgctgctgaactaaatgcacttttccccacatatggggcactggcttcaaacaattcagttcagtatcattacttttaatctcatctttcctttcttggtagttgttaatacagttatggaaaagaggcacattgcatagaagccattggggagttcagtggaagttctgtaagatgtgcatgtactatttgatgcgttttctttgcttcactgcttttaatacttagcagtattgttggtctaagtcaatttgattattgaggagtctcagagcaaggtgcgttctagatgtcatcctaaaaaacacttcatatataattaatcactattttgtataattacatattgctgcttgtgtgtttttttttttttccatttagttgggcgttgtgttttacacaaaaccatttttgaattaaggctatgatattaagatagaaatttggactgttgttctgcttttcctggcactcaaattcatgactagttttgaggtcaaacctatgttcgtaatgagagattttataaggatcaactaagaaatggaaggcaggtgaagatataaaaccctagaatgcttaaatgtgctgtaaaactattgtagatgtcactggattttaccaagtaatatcctttcttttttttttccccccatctgctgtggcttttcagttaaaattttgtttataaaaggaatttgtttattacagctctacctaga

SEQ ID NO: 7404 - protein, 582 aa, Homo sapiens; identical to SEQ ID NO: 813

SEQ ID NO: 7405 - DNA, 1691 bp, Homo sapiens
gtaaatcgttggcgagggcccgggcgcagcggcggtcatacagggaactctaatgaatcattgattgaccagcactattttaccagttggaatgaatgatcagaaatgggcatagtgcttttagatccaacatgtaacagatggatgttactccatgctgattacttcttcaagccagtacttttttgattgtgtaggatctttgtctcttcatctttgaattcaattactggaaaataaaaggagttcatgtagtttttgtccaggcttgagtcaccatgagtagtagtttaggaaaagaaaaagactctaaagaaaaagatcccaaagtaccatcagccaaggaaagagaaaaggaggcaaaagcctctggaggttttgggaaagagagcaaagaaaaagaacctaagaccaaagggaaagatgccaaagatggaaagaaggactccagtgctgcccaaccaggggtggcattttcagttgacaatacgatcaaacggccaaacccagcacctgggactagaaaaaaatccagcaatgcagaggtgattaaagagctcaacaaatgccgggaagagaattcaatgcgtttggacttatccaagagatctatacacatattgccatcatcaatcaaagagttgactcaattaacagaactttatttatacagtaacaaattgcagtccctcccagcagaggtgggatgtttagtaaatctcatgacactggctctaagtgaaaattcacttaccagtttgcctgactctcttgataacttgaagaagctgcggatgcttgatttacggcataataaactgagagaaattccttcagtggtgtataggctggattctctcaccactctttaccttcgctttaatcgtataactactgtggaaaaggacatcaaaaacttgtcaaaactcagcatgcttagcattcgagagaacaaaattaaacaactacctgctgaaattggtaagaggccttggattattattatttgtagtatttgttatgctaaataattttgagtgctttctcatatcaaaaaatgcctgatacttgcctaaaaacagcttatttctaaattacaacttttttatggtttactttattccattttcagcactgttaatagtacatggcttgaaattgtttcatagacttaaaaagtgagttagaaaatagatgtaattagatctttcccacacaaacctaatctttaactttcattggagaataagtaaatttaaagaagaaaagatgtttgcctaattttcaagttgttgctgtgtttaaagtatctgttgatacaattttattagatatatgaaaactacattttctcattctctgacttttccacctttatctgaaagatgtttaaattcacatcactttctacctaatttaccacaaaaggttgacaaatcagagccttacaaaagagcagtgtcataagaaatagaaaaaaaatttttttttgcatcttgaaagtacttacatgtttattaaaaataacacaagaatttagaagggtagaagaaacgtcacctgtagtgaatgcagcactgttaccattttgctaattttcattccagtctttcacataaagctaacttgtactaaaacaaagaaaatgttttttaaaggctggtagtaggagaaaaaaatagggaatataa

SEQ ID NO: 7406 - protein, 250 aa, Homo sapiens [sequence omitted]

SEQ ID NO: 7407 - DNA, 652 bp, Homo sapiens
tttcccaaggggcagccgaagatggcagaggtgcaggtcctggtgcttgatggtcgaggccatctcctgggccgcctggcgaccatcgtggctaaacaggtactgctgggccggaaggtggtggtcgtacgctgcaaaggcatcaacatttctggcaatttctacagaaacaagttgaagtacttggctttcctccgcaagcggatgaacaccaaccctttccgacgcccctaccacttccgggcccccagccccatcttctggctgactgtgcgaagtatgctgccccacaagaccaagcgaggccaggccgctctggaccgcctcaaggtgtttgactgcatcccaccgccttacgacaagaaaaagcggatggtggttcctgctgccctcaaggttgtgcgtctgaagcctacaagaaagtttgcctatctggggcacctggctcacgaggttggctggaagtaccacgcagtgacagccaccctggaggagaagaggaaagagaaagccaaaatccactaccggaagaagaaagagctcataagcctacggaaacaggccaagaggaacatggagaagaaaactgacaaatacacagaggtcctcaagacccacggactcctggtctgagcccaataaagactgttaa

SEQ ID NO: 7408 - protein, 203 aa, Homo sapiens
MAEVQVLVLDGRGHLLGRLATIVAKQVLLGRKVVVVRCKGINISGNFYRNKLKYLAFLRKRMNTNPFRRPYHFRAPSPIFWLTVRSMLPHKTKRGQAALDRLKVFDCIPPPYDKKKRMVVPAALKVVRLKPTRKFAYLGHLAHEVGWKYHAVTATLEEKRKEKAKIHYRKKKELISLRKQAKRNMEKKTDKYTEVLKTHGLLV

SEQ ID NO: 7409 - DNA, 575 bp, Homo sapiens
caaggggcagccgaagatggcagaggtgcaggtcctggtgcttgatggtcgaggccatctcctgggccgcctggcgaccatcgtggctaaacaggtactgctgggccggaaggtggtggtcgtacgctgcaaaggcatcaacatttctggcaatttctacagaaacaagttgaagtacttggctttcctccgcaagcggatgaacaccaaccctttccgacgcccctaccacttccgggcccccagccccatcttctggctgactgtgcgaagtatgctgccccacaagaccaagcgaggccaggccgctctggaccgcctcaaggttgtgcgtctgaagcctacaagaaagtttgcctatctggggcacctggctcacgaggttggctggaagtaccacgcagtgacagccaccctggaggagaagaggaaagagaaagccaaaatccactaccggaagaagaaagagctcataagcctacggaaacaggccaagaggaacatggagaagaaaactgacaaatacacagaggtcctcaagacccacggactcctggtctgagcccaataaagac

SEQ ID NO: 7410 - protein, 181 aa, Homo sapiens; identical to SEQ ID NO: 811

SEQ ID NO: 7411 - DNA, 3695 bp, Homo sapiens
ggaactctaatgaatcattgattgaccagcactattttaccagttggaatgaatgatcagaaatgggcatagtgcttttagatccaacatgtaacagatggatgttactccatgctgattacttcttcaagccagtacttttttgattgtgtaggatctttgtctcttcatctttgaattcaattactggaaaataaaaggagttcatgtagtttttgtccaggcttgagtcaccatgagtagtagtttaggaaaagaaaaagactctaaagaaaaagatcccaaagtaccatcagccaaggaaagagaaaaggaggcaaaagcctctggaggttttgggaaagagagcaaagaaaaagaacctaagaccaaagggaaagatgccaaagatggaaagaaggactccagtgctgcccaaccaggggtggcattttcagttgacaatacgatcaaacggccaaacccagcacctgggactagaaaaaaatccagcaatgcagaggtgattaaagagctcaacaaatgccgggaagagaattcaatgcgtttggacttatccaagagatctatacacatattgccatcatcaatcaaagagttgactcaattaacagaactttatttatacagtaacaaattgcagtccctcccagcagaggtgggatgtttagtaaatctcatgacactggctctaagtgaaaattcacttaccagtttgcctgactctcttgataacttgaagaagctgcggatgcttgatttacggcataataaactgagagaaattccttcagtggtgtataggctggattctctcaccactctttaccttcgctttaatcgtataactactgtggaaaaggacatcaaaaacttgtcaaaactcagcatgcttagcattcgagagaacaaaattaaacaactacctgctgaaattggaaacctgtccagtttaagtcgtcttggtctgagatataacagactgtcagcaatacccagatcattagcaaaatgcagtgcacttgaagaattaaatttagagaacaataacatttctactttaccagagagtcttttatcaagtcttgtgaaactgaatagtttgaccttagctagaaattgcttccagttgtatccagtgggtggtccatctcagttttctaccatctattccctcaacatggaacacaatcgaatcaacaaaattccatttggaattttctccagagcaaaagtattaagtaagctgaatatgaaggacaatcagttaacatcacttcccttggattttggaacttggaccagtatggtagaattgaatttagccactaatcagctcacaaagatccctgaggatgtgtctggtctcgtttctcttgaggttcttatcttatcaaacaatcttctaaagaagcttccccatggtcttggaaaccttaggaagttaagagagttggatctagaagagaacaaattggaatccttgccaaatgaaattgcatatcttaaggatttacagaaattagtcttgacaaacaaccagttgaccactcttcccagaggcattggtcaccttactaatctcacacatctgggccttggagagaacctacttactcaccttcctgaagaaattggtacactggagaacctagaagaactgtatttgaatgacaaccccaacctgcatagccttccctttgagctggcactctgcagcaagctttcaatcatgagtattgagaactgtccactcagtcaccttccacctcagattgttgctggggggccttctttcatcattcagttcttaaagatgcagggtccatatcgtgccatggtctgatataaatctgctggtcccacacactgttcaaaaatagactgccattaatgtttcttatctatatctgtatctatttatgtagatattggtatatggcagatttataaaaattgcattatgtgtttctgctaatagaggaatcatagccatttagaattttttttaaattctgtacaaaaggcttatataagttttctttgctgaatttgatggatgtttttctgttgtgtaatctgatatgccagtttgcttaaaacatttgccaacacattatgaagttattaaatttaagggacagaggtagtatagttagatatactttctcttaggaaaaataatgggcaaaaatttttgttgcaacttttcatatatattttccccttaccaattgttttatccttatagtattgtaggccctgaaagtagaatttttctttaacttattttgagatttgagatttaaattttatgtattgtttacagtcagagtaaatcactggatttcttttgtttgttttgatttgctctgttttattcagtcaaatctagagtttgaatcctctgctaaagaatttgcatccactggtgtaaacagtgaaaggtatttgcttgttgaaaaaaaaaactggcaaagtgaaaagatacagtcaaaaatctagaatttctttaattttgcttctctgacgagttgtgaagcaaaatacctgaagtgagtctttgggtaggggaagggtattgagaccttttctagtatgaatattttttaagtttgggggaagagaaacttgcagtgaaaaggagttttttcattcctgaaagttgcagatccacaaaactaacaggataattgggcaaataaattacatataaacacacacaatctatatatgtatatacaatgctatatagatatgtatttattatatcataaactacagtaggtaactttaaggatttcttcctatccttgtacaatgacatgaatgtctttctttgaaaactgcaatgtatgtatgtttcaaggttatttaacagtgtactatggttttatatcttgacttgccttgtacatctttcaattctggaatatctgtgtctaagcacaatatcttcacactgtgctgtattgctgctgaactaaatgcacttttccccacatatggggcactggcttcaaacaattcagttcagtatcattacttttaatctcatctttcctttcttggtagttgttaatacagttatggaaaagaggcacattgcatagaagccattggggagttcagtggaagttctgtaagatgtgcatgtactatttgatgcgttttctttgcttcactgcttttaatacttagcagtattgttggtctaagtcaatttgattattgaggagtctcagagcaaggtgcgttctagatgtcatcctaaaaaacacttcatatataattaatcactattttgtataattacatattgctgcttgtgtgtttttttttttttccatttagttgggcgttgtgttttacacaaaaccatttttgaattaaggctatgatattaagatagaaatttggactgttgttctgcttttcctggcactcaaattcatgactagttttgaggtcaaacctatgttcgtaatgagagattttataaggatcaactaagaaatggaaggcaggtgaagatataaaaccctagaatgcttaaatgtgctgtaaaactattgtagatgtcactggattttaccaagtaatatcctttcttttttttttccccccatctgctgtggcttttcagttaaaattttgtttataaaaggaatttgtttattacagctctacctaga

SEQ ID NO: 7412 - protein, 536 aa, Homo sapiens
MSSSLGKEKDSKEKDPKVPSAKEREKEAKASGGFGKESKEKEPKTKGKDAKDGKKDSSAAQPGVAFSVDNTIKRPNPAPGTRKKSSNAEVIKELNKCREENSMRLDLSKRSIHILPSSIKELTQLTELYLYSNKLQSLPAEVGCLVNLMTLALSENSLTSLPDSLDNLKKLRMLDLRHNKLREIPSVVYRLDSLTTLYLRFNRITTVEKDIKNLSKLSMLSIRENKIKQLPAEIGNLSSLSRLGLRYNRLSAIPRSLAKCSALEELNLENNNISTLPESLLSSLVKLNSLTLARNCFQLYPVGGPSQFSTIYSLNMEHNRINKIPFGIFSRAKVLSKLNMKDNQLTSLPLDFGTWTSMVELNLATNQLTKIPEDVSGLVSLEVLILSNNLLKKLPHGLGNLRKLRELDLEENKLESLPNEIAYLKDLQKLVLTNNQLTTLPRGIGHLTNLTHLGLGENLLTHLPEEIGTLENLEELYLNDNPNLHSLPFELALCSKLSIMSIENCPLSHLPPQIVAGGPSFIIQFLKMQGPYRAMV

SEQ ID NO: 7413 - DNA, 3785 bp, Homo sapiens
ggagcagcagcagctccagctcggtgcagaagcccagcagccggcgtgccgccgcccggccactccagcgccttcttccccgccttgcgctcctgccccaactcgcgctgtcgtcggaccccggcccatccagcagcgctcggcgcccaccaggcggacgcccaggagaacccctgcctccgtcgcggctcctggagagctgatcgttcacctgccccggcccgcctgaggacgggggtgccttcatgcggcccccacactcctcaccccgccgccgccgccgtcccggagctccgcacagtgtgccccagccccagcagggcgcacaactttggaagtctcgcggcgctccgagaggcggcagagtccgcgccccagccccgggccgggccgggccagaaccgcagcgtctgggggaagccagagagtcggtaatcgcttcggggatgtaaggcgacagacataggacccccgagctcgcatcagcacccttcggctgcctcccggggtgggggcgggccccgcacacggtaagacctcttgctttcgctcaggctcaagattcaagatacagatattgatatgtatatatatatttaatttcctgtcatccttccaagttatcaggccaccgatgatttttgttctcccttcttgaagaataaatctctctttacccatcggctctccctactctctcccgccgcttagaaataaaacttggctgtattaggagctcggagcaagaaggcgcccaccgagagcgtctgaagcgcgagccaggcgcagttcgcgggacccgggccatgggccgctagcggtcctccagttcgggcccggcctccctgcggccccctccctatgtgagccgcagccaggcgagcggggcgccggaggaagaggaggacccacgggcgccgggccggaaggcagctggcagcaggcccaggccagcgggcgcccgcgttcatgttccgccaggagcagccgttggccgagggcagctttgcgcccatgggctccctgcagccggacgcgggcaacgcgagctggaacgggaccgaggcgccggggggcggcgcccgggccaccccttactccctgcaggtgacgctgacgctggtgtgcctggccggcctgctcatgctgctcaccgtgttcggcaacgtgctcgtcatcatcgccgtgttcacgagccgcgcgctcaaggcgccccaaaacctcttcctggtgtctctggcctcggccgacatcctggtggccacgctcgtcatccctttctcgctggccaacgaggtcatgggctactggtacttcggcaaggcttggtgcgagatctacctggcgctcgacgtgctcttctgcacgtcgtccatcgtgcacctgtgcgccatcagcctggaccgctactggtccatcacacaggccatcgagtacaacctgaagcgcacgccgcgccgcatcaaggccatcatcatcaccgtgtgggtcatctcggccgtcatctccttcccgccgctcatctccatcgagaagaagggcggcggcggcggcccgcagccggccgagccgcgctgcgagatcaacgaccagaagtggtacgtcatctcgtcgtgcatcggctccttcttcgctccctgcctcatcatgatcctggtctacgtgcgcatctaccagatcgccaagcgtcgcacccgcgtgccacccagccgccggggtccggacgccgtcgccgcgccgccggggggcaccgagcgcaggcccaacggtctgggccccgagcgcagcgcgggcccggggggcgcagaggccgaaccgctgcccacccagctcaacggcgcccctggcgagcccgcgccggccgggccgcgcgacaccgacgcgctggacctggaggagagctcgtcttccgaccacgccgagcggcctccagggccccgcagacccgagcgcggtccccggggcaaaggcaaggcccgagcgagccaggtgaagccgggcgacagcctgccgcggcgcgggccgggggcgacggggatcgggacgccggctgcagggccgggggaggagcgcgtcggggctgccaaggcgtcgcgctggcgcgggcggcagaaccgcgagaagcgcttcacgttcgtgctggccgtggtcatcggagtgttcgtggtgtgctggttccccttcttcttcacctacacgctcacggccgtcgggtgctccgtgccacgcacgctcttcaaattcttcttctggttcggctactgcaacagctcgttgaacccggtcatctacaccatcttcaaccacgatttccgccgcgccttcaagaagatcctctgtcggggggacaggaagcggatcgtgtgaggtttccgctggcgcccgcgtagactcacgctgactgcaggcagcggggggcatcgaggggtgcttagccccagggcactcagaaacccgggcgctgcctgctctgcgtttcctcgtctggggtggctctgcagcctcctgcgggcgggcgtctgctgctcctacaagggaagcttcttgctgccaggcccacacatccccagttgttggtttggccactcttgacctggagccatcttcctagtgggccacccctaatcactattgcttcctaaaggtattttcaccctcttcgcctggtacagccctcacagctcttcagagcaagcactggactacaagggcatggctcacaaaaggttaatggatgggggttacctagccctggctaattccccttccattcccaactctctctctctttttaaagaaaaatgctaagggcagccctgcctgccctccccatcccccgctgtaaatatacactatttttgatagcacacatggggcccccatatctcttggccttggttttgatgttgaaatcctggccttgggagagatgccttccaggcagacacagctgtctggttcaggccaagcccctttgcaatgcaagccctttctggtgttatgaagtccctctatgtcgtcgttttcaccagcaactggtgactgtcccttcgacacggacctgctttgagatttcctgacagggaaaagatttctgtccatttttttcctgtgcctaacagcataattgccttttcctatgtaaatattatgatggtggatcaagacataagtaaatgagcctttctgcctcacatcagccctgtgtataaagccattattctctgatgcactgtttgccccagtaactcactttaaaacctctctttccagtgttccctctctccctccagggccactgcttgaagaagaatatgtatgtttctatcttgtatgtctgtgtgcccctcctgccccgaaagtgctgactatggggaaatcttttagctgctgtttttagactccaaggagtggaaattatgtggaagaagcaaacctgatacaatttgcccaaggtaaacagtttgaaaagacaaatgggcctgccaaactgtacagtttcttccccaagagctgttaggtatcaaaatgttgtcctttcccccctccgtgcttttctggttgagatcatgtcattgatgaactgccaaagtcaggggaggagggcagagactttgtgtttacatctgcatttctacatgttttagacagagacaatttaaggcctgcactcttatttcactaaagaaaaactaatgtcagcacatgttgctaatgacagtggatttttttttaaataaaaaagtttacagatcaaatgtgaaataaatatgaatggagtggtc

SEQ ID NO: 7414 - protein, 465 aa, Homo sapiens
MFRQEQPLAEGSFAPMGSLQPDAGNASWNGTEAPGGGARATPYSLQVTLTLVCLAGLLMLLTVFGNVLVIIAVFTSRALKAPQNLFLVSLASADILVATLVIPFSLANEVMGYWYFGKAWCEIYLALDVLFCTSSIVHLCAISLDRYWSITQAIEYNLKRTPRRIKAIIITVWVISAVISFPPLISIEKKGGGGGPQPAEPRCEINDQKWYVISSCIGSFFAPCLIMILVYVRIYQIAKRRTRVPPSRRGPDAVAAPPGGTERRPNGLGPERSAGPGGAEAEPLPTQLNGAPGEPAPAGPRDTDALDLEESSSSDHAERPPGPRRPERGPRGKGKARASQVKPGDSLPRRGPGATGIGTPAAGPGEERVGAAKASRWRGRQNREKRFTFVLAVVIGVFVVCWFPFFFTYTLTAVGCSVPRTLFKFFFWFGYCNSSLNPVIYTIFNHDFRRAFKKILCRGDRKRIV

SEQ ID NO: 7415 - DNA, 3875 bp, Homo sapiens
ggagcagcagcagctccagctcggtgcagaagcccagcagccggcgtgccgccgcccggccactccagcgccttcttccccgccttgcgctcctgccccaactcgcgctgtcgtcggaccccggcccatccagcagcgctcggcgcccaccaggcggacgcccaggagaacccctgcctccgtcgcggctcctggagagctgatcgttcacctgccccggcccgcctgaggacgggggtgccttcatgcggcccccacactcctcaccccgccgccgccgccgtcccggagctccgcacagtgtgccccagccccagcagggcgcacaactttggaagtctcgcggcgctccgagaggcggcagagtccgcgccccagccccgggccgggccgggccagaaccgcagcgtctgggggaagccagagagtcggtaatcgcttcggggatgtaaggcgacagacataggacccccgagctcgcatcagcacccttcggctgcctcccggggtgggggcgggccccgcacacggtaagacctcttgctttcgctcaggctcaagattcaagatacagatattgatatgtatatatatatttaatttcctgtcatccttccaagttatcaggccaccgatgatttttgttctcccttcttgaagaataaatctctctttacccatcggctctccctactctctcccgccgcttagaaataaaacttggctgtattaggagctcggagcaagaaggcgcccaccgagagcgtctgaagcgcgagccaggcgcagttcgcgggacccgggccatgggccgctagcggtcctccagttcgggcccggcctccctgcggccccctccctatgtgagccgcagccaggcgagcggggcgccggaggaagaggaggacccacgggcgccgggccggaaggcagctggcagcaggcccaggccagcgggcgcccgcgttcatgttccgccaggagcagccgttggccgagggcagctttgcgcccatgggctccctgcagccggacgcgggcaacgcgagctggaacgggaccgaggcgccggggggcggcgcccgggccaccccttactccctgcaggtgacgctgacgctggtgtgcctggccggcctgctcatgctgctcaccgtgttcggcaacgtgctcgtcatcatcgccgtgttcacgagccgcgcgctcaaggcgccccaaaacctcttcctggtgtctctggcctcggccgacatcctggtggccacgctcgtcatccctttctcgctggccaacgaggtcatgggctactggtacttcggcaaggcttggtgcgagatctacctggcgctcgacgtgctcttctgcacgtcgtccatcgtgcacctgtgcgccatcagcctggaccgctactggtccatcacacaggccatcgagtacaacctgaagcgcacgccgcgccgcatcaaggccatcatcatcaccgtgtgggtcatctcggccgtcatctccttcccgccgctcatctccatcgagaagaagggcggcggcggcggcccgcagccggccgagccgcgctgcgagatcaacgaccagaagtggtacgtcatctcgtcgtgcatcggctccttcttcgctccctgcctcatcatgatcctggtctacgtgcgcatctaccagatcgccaagcgtcgcacccgcgtgccacccagccgccggggtccggacgccgtcgccgcgccgccggggggcaccgagcgcaggcccaacggtctgggccccgagcgcagcgcgggcccggggggcgcagaggccgaaccgctgcccacccagctcaacggcgcccctggcgagcccgcgccggccgggccgcgcgacaccgacgcgctggacctggaggagagctcgtcttccgaccacgccgagcggcctccagggccccgcagacccgagcgcggtccccggggcaaaggcaaggcccgagcgagccaggtgaagccgggcgacagcctgccgcggcgcgggccgggggcgacggggatcgggacgccggctgcagggccgggggaggagcgcgtcggggctgccaaggcgtcgcgctggcgcgggcggcagaaccgcgagaagcgcttcacgttcgtgctggccgtggtcatcggagtgttcgtggtgtgctggttccccttcttcttcacctacacgctcacggccgtcgggtgctccgtgccacgcacgctcttcaaattcttcttctggttcggctactgcaacagctcgttgaacccggtcatctacaccatcttcaaccacgatttccgccgcgccttcaagaagatcctctgtcggggggacaggaagcggatcgtgtgaggtttccgctggcgcccgcgtagactcacgctgactgcaggcagcggggggcatcgaggggtgcttagccccagggcactcagaaacccgggcgctgcctgctctgcgtttcctcgtctggggtggctctgcagcctcctgcgggcgggcgtctgctgctcctacaagggaagcttcttgctgccaggcccacacatccccagttgttggtttggccactcttgacctggagccatcttcctagtgggccacccctaatcactattgcttcctaaaggtattttcaccctcttcgcctggtacagccctcacagctcttcagagcaagcactggactacaagggcatggctcacaaaaggttaatggatgggggttacctagccctggctaattccccttccattcccaactctctctctctttttaaagaaaaatgctaagggcagccctgcctgccctccccatcccccgctgtaaatatacactatttttgatagcacacatggggcccccatatctcttggccttggttttgatgttgaaatcctggccttgggagagatgccttccaggcagacacagctgtctggttcaggccaagcccctttgcaatgcaagccctttctggtgttatgaagtccctctatgtcgtcgttttcaccagcaactggtgactgtcccttcgacacggacctgctttgagatttcctgacagggaaaagatttctgtccatttttttcctgtgcctaacagcataattgccttttcctatgtaaatattatgatggtggatcaagacataagtaaatgagcctttctgcctcacatcagccctgtgtataaagccattattctctgatgcactgtttgccccagtaactcactttaaaacctctctttccagtgttccctctctccctccagggccactgcttgaagaagaatatgtatgtttctatcttgtatgtctgtgtgcccctcctgccccgaaagtgctgactatggggaaatcttttagctgctgtttttagactccaaggagtggaaattatgtggaagaagcaaacctgatacaatttgcccaaggtaaacagtttgaaaagacaaatgggcctgccaaactgtacagtttcttccccaagagctgttaggtatcaaaatgttgtcctttcccccctccgtgcttttctggttgagatcatgtcattgatgaactgccaaagtcaggggaggagggcagagactttgtgtttacatctgcatttctacatgttttagacagagacaatttaaggcctgcactcttatttcactaaagaaaaactaatgtcagcacatgttgctaatgacagtggatttttttttaaataaaaaagtttacagatcaaatgtgaaataaatatgaatggagtggtcctcttgtctgttatctgagttttcaaaagctttaagactctgggaacatctgattttatggattttttaaaaataaaaaatgtacattat

SEQ ID NO: 7416 - protein, 465 aa, Homo sapiens; identical to SEQ ID NO: 7414

SEQ ID NO: 7417 - DNA, 2163 bp, Homo sapiens
atgagtcttaaatgtctgcctcatgggcttctcgtgcgaaccggggagctgtttttaaagccagtggagtggaatgtcctttcactaagccgttctgcaaaggtccagtgtggttctctaaggacttcgctgccgtcgagacgcgcagcggatgccgctgcttgccgcggcggaggaagctacgccgctgcgccttcggttcaccttgcccccattaaagcgttagttagacagctccaaacgccagctggccggagagacttcctgggagaaagtgctgtcgtcggggtcacagactcggagttgatccgcgagccttgggcaccggcggccagagcagaggggtgcccttccgagagcagccgtcggtgccgagaagctgttgccccagcagccccaccgagtgacgcgcgggttttggccgggtcagcgcgcatacgcacacaggcacacccactcctggtcccgggggaaggctcactcttcggttttccagggctaaaggccaaggccacgcggatttctgagtccgaagacgcagtgcgaggacttacacctggattcccttactatcggctggatggcctggcggcgggaagcgggtccctgcgccgcaggggggagaggcaggcgcggtctccgggctcgcggccgttagtgcgcttcggccaagggcgccgcctgctccgcgtccctcgctcgcctcctgcgctcgcaggagcgctccgacccgaagccaaagcgccaaaatccgagggaagcatccggcgccggattgacgcagcctcgagccggggactgctcttgctgcctcctccgcgggagccgcagccgcagccgagccgcctcgatccctcggtgccgcggcagggccgctccccgcccctccgcacccctccctcatgcgagcccgcccgtctgggtcctcactccgccctcccgccgttggatttgcgcccggggcggcccccgactttgcgccccgtagttgagttccgtttatggtctgatttccggcctctcgcctgctcgccccgccgcccgcctgtcccgctccctccctcccggggacccggaggagaggggaccatgccggaacccgggccggacgctgccggcaccgccagcgcacagccccaaccgccgccgccccccccacccgctcccaaggagtccccgttctccatcaagaacctgctcaacggagaccaccaccggccgccccctaagcctcagccgcccccacggacgctcttcgcgccagcctcggctgccgccgccgccgccgctgccgctgccgcggcggccaagggggccctggagggcgccgcgggcttcgcgctctcgcaggtgggcgacctggctttccctcgctttgagatcccggcgcagaggtttgccctgcccgcgcactacctggagcgctccccagcctggtggtacccctacaccctgacccccgccggcggccacctcccgcgacctgaagcctcggagaaggccttgctgagagactcctcccccgcctccggcacagaccgcgactctccggagccactgctcaaggccgaccccgatcacaaggagctggactccaagagcccggacgagatcattctggaggagagcgactccgaggaaagcaaaaaggaaggcgaagcggcgccaggcgcggccggggcgagcgtaggggcggcggcggccactccgggcgcagaagactggaagaagggcgctgaaagtccagagaagaagccggcgtgccgcaagaagaagacgcgcacagtcttctcgcgcagccaggtcttccagctcgagtccaccttcgacatgaagcgctatctgagcagctcggagcgagccggcctggccgcgtccctgcacctcaccgagacgcaggtcaagatctggttccagaaccgccgcaacaagtggaagcggcagctggcggcggagctggaggcggccaacctgagccatgccgcggcgcagcgcatcgtgcgggtgcccatcctctaccacgagaactcggcggccgagggcgcggcggctgcagccgcgggggccccggtgccagtcagccagccgctgctcaccttcccgcaccccgtctactactcgcacccggtggtctcttccgtgccgctgctacggccggtctga

SEQ ID NO: 7418 - protein, 720 aa, Homo sapiens
MSLKCLPHGLLVRTGELFLKPVEWNVLSLSRSAKVQCGSLRTSLPSRRAADAAACRGGGSYAAAPSVHLAPIKALVRQLQTPAGRRDFLGESAVVGVTDSELIREPWAPAARAEGCPSESSRRCREAVAPAAPPSDARVLAGSARIRTQAHPLLVPGEGSLFGFPGLKAKATRISESEDAVRGLTPGFPYYRLDGLAAGSGSLRRRGERQARSPGSRPLVRFGQGRRLLRVPRSPPALAGALRPEAKAPKSEGSIRRRIDAASSRGLLLLPPPREPQPQPSRLDPSVPRQGRSPPLRTPPSCEPARLGPHSALPPLDLRPGRPPTLRPVVEFRLWSDFRPLACSPRRPPVPLPPSRGPGGEGTMPEPGPDAAGTASAQPQPPPPPPPAPKESPFSIKNLLNGDHHRPPPKPQPPPRTLFAPASAAAAAAAAAAAAAKGALEGAAGFALSQVGDLAFPRFEIPAQRFALPAHYLERSPAWWYPYTLTPAGGHLPRPEASEKALLRDSSPASGTDRDSPEPLLKADPDHKELDSKSPDEIILEESDSEESKKEGEAAPGAAGASVGAAAATPGAEDWKKGAESPEKKPACRKKKTRTVFSRSQVFQLESTFDMKRYLSSSERAGLAASLHLTETQVKIWFQNRRNKWKRQLAAELEAANLSHAAAQRIVRVPILYHENSAAEGAAAAAAGAPVPVSQPLLTFPHPVYYSHPVVSSVPLLRPV

SEQ ID NO: 7419 - DNA, 1628 bp, Homo sapiens; identical to SEQ ID NO: 816

SEQ ID NO: 7420 - protein, 273 aa, Homo sapiens; identical to SEQ ID NO: 817

SEQ ID NO: 7421 - DNA, 1208 bp, Homo sapiens
agcggtttccctttgagccggaacaggatgactgggttgaccgatgctgggcagctgagcggaccaatcggccccctagactgagacgttggcgtttgaaatcagccaatggcaggtctacactggagcttcctctccgcctccttcgcctagcctgcgagtgttctgagggaagcaaggaggcggcggcggccgcagcgagtggcgagtagtggaaacgttgcttctgaggggagcccaagatgaccggttctaacgagttcaagctgaaccagccacccgaggatggcatctcctccgtgaagttcagccccaacacctcccagttcctgcttgtctcctcctgggacacgtccgtgcgtctctacgatgtgccggccaactccatgcggctcaagtaccagcacaccggcgccgtcctggactgcgccttctacgatccaacgcatgcctggagtggaggactagatcatcaattgaaaatgcatgatttgaacactgatcaagaaaatcttgttgggacccatgatgcccctatcagatgtgttgaatactgtccagaagtgaatgtgatggtcactggaagttgggatcagacagttaaactgtgggatcccagaactccttgtaatgctgggaccttctctcagcctgaaaaggccgcagagtgttggtgtgggacttacggaacatgggttacgtgcagcagcgcagggagtccagcctgaaataccagactcgctgcatacgagcgtttccaaacaagcaggtattgaactatacctcctcttctttctggaatttgaaaataatatgatcttatattataatgatttggccactagcccctaaagccttctttttttttttcagtagtgatttagaatttgctgttaggtgtattcttccttgatatttttgacagccatgtgttaacaggaagtgcgttaacccccattttagagacgaccttgatgttcagagagaccaagtaatctgctcaggaagtggtttgaatagaggaggttttctgaccttttgttgatcctggtccaggatgcttcataggtatacagtaatcaaagagcgctttgcagatatttcagtttacaaaatgctgaattaaaatttatatctggattttaagcttatggaatttgctgttttctttttgcctttttgtaaccctaatgcttatggagttcttt

SEQ ID NO: 7422 - protein, 161 aa, Homo sapiens
MTGSNEFKLNQPPEDGISSVKFSPNTSQFLLVSSWDTSVRLYDVPANSMRLKYQHTGAVLDCAFYDPTHAWSGGLDHQLKMHDLNTDQENLVGTHDAPIRCVEYCPEVNVMVTGSWDQTVKLWDPRTPCNAGTFSQPEKAAECWCGTYGTWVTCSSAGSPA

SEQ ID NO: 7423 - DNA, 1592 bp, Homo sapiens
agcggtttccctttgagccggaacaggatgactgggttgaccgatgctgggcagctgagcggaccaatcggccccctagactgagacgttggcgtttgaaatcagccaatggcaggtctacactggagcttcctctccgcctccttcgcctagcctgcgagtgttctgagggaagcaaggaggcggcggcggccgcagcgagtggcgagtagtggaaacgttgcttctgaggggagcccaagatgaccggttctaacgagttcaagctgaaccagccacccgaggatggcatctcctccgtgaagttcagccccaacacctcccagttcctgcttgtctcctcctgggacacgtccgtgcgtctctacgatgtgccggccaactccatgcggctcaagtaccagcacaccggcgccgtcctggactgcgccttctacgatccaacgcatgcctggagtggaggactagatcatcaattgaaaatgcatgatttgaacactgatcaagaaaatcttgttgggacccatgatgcccctatcagatgtgttgaatactgtccagaagtgaatgtgatggtcactggaagttgggatcagacagttaaactgtgggatcccagaactccttgtaatgctgggaccttctctcagcctgaaaaggtatataccctctcagtgtctggagaccggctgattgtgggaacagcaggccgcagagtgttggtgtgggacttacggaacatgggttacgtgcagcagcgcagggagtccagcctgaaataccagactcgctgcatacgagcgtttccaaacaagcagggttatgtattaagctctattgaaggccgagtggcagttgagtatttggacccaagccctgaggtacagaagaagaagtatgccttcaaatgtcacagactaaaagaaaataatattgagcagatttacccagtcaatgccatttcttttcacaatatccacaatacatttgccacaggtggttctgatggctttgtaaatatttgggatccatttaacaaaaagcgactgtgccaattccatcggtaccccacgagcatcgcatcacttgccttcagtaatgatgggactacgcttgcaatagcgtcatcatatatgtatgaaatggatgacacagaacatcctgaagatggtatcttcattcgccaagtgacagatgcagaaacaaaacccaagtcaccatgtacttgacaagatttcatttacttaagtgccatgttgatgataataaaacaattcgtactccccaatggtggatttattactattaaagaaaccagggaaaatattaattttaatattataacaacctgaaaataatggaaaagaggtttttgaatttttttttttaaataaacaccttcttaagtgcatgagatggtttgatggtttgctgcattaaaggtatttgggcaaacaaaattggagggcaagtgactgcagttttgagaatcagttttgaccttgatgattttttgtttccactgtggaaataaatgtttgtaaataagtgtaataaaaatccctttgcattctttctggaccttaaatggt

SEQ ID NO: 7424 - protein, 328 aa, Homo sapiens; identical to SEQ ID NO: 821

SEQ ID NO: 7425 - DNA, 1532 bp, Homo sapiens
agcggtttccctttgagccggaacaggatgactgggttgaccgatgctgggcagctgagcggaccaatcggccccctagactgagacgttggcgtttgaaatcagccaatggcaggtctacactggagcttcctctccgcctccttcgcctagcctgcgagtgttctgagggaagcaaggaggcggcggcggccgcagcgagtggcgagtagtggaaacgttgcttctgaggggagcccaagatgaccggttctaacgagttcaagctgaaccagccacccgaggatggcatctcctccgtgaagttcagccccaacacctcccagttcctgcttgtctcctcctgggacacgtccgtgcgtctctacgatgtgccggccaactccatgcggctcaagtaccagcacaccggcgccgtcctggactgcgccttctacgatccaacgcatgcctggagtggaggactagatcatcaattgaaaatgcatgatttgaacactgatcaagaaaatcttgttgggacccatgatgcccctatcagatgtgttgaatactgtccagaagtgaatgtgatggtcactggaagttgggatcagacagttaaactgtgggatcccagaactccttgtaatgctgggaccttctctcagcctgaaaaggtatataccctctcagtgtctggagaccggctgattgtgggaacagcaggccgcagagtgttggtgtgggacttacggaacatgggttacgtgcagcagcgcagggagtccagcctgaaataccagactcgctgcatacgagcgtttccaaacaagcagggttatgtattaagctctattgaaggccgagtggcagttgagtatttggacccaagccctgaggtacagaagaagaagtatgccttcaaatgtcacagactaaaagaaaataatattgagcagatttacccagtcaatgccatttcttttcacaatatccacaatacatttgccacaggtggttctgatggctttgtaaatatttgggatccatttaacaaaaagcgactgtgccaattccatcggtaccccacgagcatcgcatcacttgccttcagtaatgatgggactacgcttgcaatagcgtcatcatatatgtatgaaatggatgacacagaacatcctgaagatggtatcttcattcgccaagtgacagatgcagaaacaaaacccaagtccacctaatcatcctgtgaaagtggtttctctatggaaagctttgtttgcttcctacaaatacatgcttattccttaagggatgtgttagagttactgtggatttctctgttttctgtcttacaagaaacttgtctatgtaccttaatactttgtttaggatgaggagtctttgtgtccctgtacagtagtctgacgtatttccccttctgtcccctagtaagcccagttgctgtatctgaacagtttgagctctttttgtaatatactctaaacctgttatttctgtgctaataaacgagatgcagaacccttgaa

SEQ ID NO: 7426 - protein, 326 aa, Homo sapiens; identical to SEQ ID NO: 819

SEQ ID NO: 7427 - DNA, 978 bp, Homo sapiens
agcggtttccctttgagccggaacaggatgactgggttgaccgatgctgggcagctgagcggaccaatcggccccctagactgagacgttggcgtttgaaatcagccaatggcaggtctacactggagcttcctctccgcctccttcgcctagcctgcgagtgttctgagggaagcaaggaggcggcggcggccgcagcgagtggcgagtagtggaaacgttgcttctgaggggagcccaagatgaccggttctaacgagttcaagctgaaccagccacccgaggatggcatctcctccgtgaagttcagccccaacacctcccagttcctgcttgtctcctcctgggacacgtccgtgcgtctctacgatgtgccggccaactccatgcggctcaagtaccagcacaccggcgccgtcctggactgcgccttctacgatccaacgcatgcctggagtggaggactagatcatcaattgaaaatgcatgatttgaacactgatcaagaaaatcttgttgggacccatgatgcccctatcagatgtgttgaatactgtccagaagtgaatgtgatggtcactggaagttgggatcagacagttaaactgtgggatcccagaactccttgtaatgctgggaccttctctcagcctgaaaaggtccacctaatcatcctgtgaaagtggtttctctatggaaagctttgtttgcttcctacaaatacatgcttattccttaagggatgtgttagagttactgtggatttctctgttttctgtcttacaagaaacttgtctatgtaccttaatactttgtttaggatgaggagtctttgtgtccctgtacagtagtctgacgtatttccccttctgtcccctagtaagcccagttgctgtatctgaacagtttgagctctttttgtaatatactctaaacctgttatttctgtgctaataaacgagatgcagaacccttgaa

SEQ ID NO: 7428 - protein, 145 aa, Homo sapiens
MTGSNEFKLNQPPEDGISSVKFSPNTSQFLLVSSWDTSVRLYDVPANSMRLKYQHTGAVLDCAFYDPTHAWSGGLDHQLKMHDLNTDQENLVGTHDAPIRCVEYCPEVNVMVTGSWDQTVKLWDPRTPCNAGTFSQPEKVHLIIL

SEQ ID NO: 7429 - DNA, 3755 bp, Homo sapiens
agcggtttccctttgagccggaacaggatgactgggttgaccgatgctgggcagctgagcggaccaatcggccccctagactgagacgttggcgtttgaaatcagccaatggcaggtctacactggagcttcctctccgcctccttcgcctagcctgcgagtgttctgagggaagcaaggaggcggcggcggccgcagcgagtggcgagtagtggaaacgttgcttctgaggggagcccaagatgaccggttctaacgagttcaagctgaaccagccacccgaggatggcatctcctccgtgaagttcagccccaacacctcccagttcctgcttgtctcctcctgggacacgtccgtgcgtctctacgatgtgccggccaactccatgcggctcaagtaccagcacaccggcgccgtcctggactgcgccttctacgatccaacgcatgcctggagtggaggactagatcatcaattgaaaatgcatgatttgaacactgatcaagaaaatcttgttgggacccatgatgcccctatcagatgtgttgaatactgtccagaagtgaatgtgatggtcactggaagttgggatcagacagttaaactgtgggatcccagaactccttgtaatgctgggaccttctctcagcctgaaaaggtatataccctctcagtgtctggagaccggctgattgtgggaacagcaggccgcagagtgttggtgtgggacttacggaacatgggttacgtgcagcagcgcagggagtccagcctgaaataccagactcgctgcatacgagcgtttccaaacaagcagggttatgtattaagctctattgaaggccgagtggcagttgagtatttggacccaagccctgaggtacagaagaagaagtatgccttcaaatgtcacagactaaaagaaaataatattgagcagatttacccagtcaatgccatttcttttcacaatatccacaatacatttgccacaggtggttctgatggctttgtaaatatttgggatccatttaacaaaaagcgactgtgccaattccatcggtaccccacgagcatcgcatcacttgccttcagtaatgatgggactacgcttgcaatagcgtcatcatatatgtatgaaatggatgacacagaacatcctgaagatggtatcttcattcgccaagtgacagatgcagaaacaaaacccaagtgagtatgcttcacctgtatttgagccttttcttgcattcaacccaggatttattaatttttctaaattcatgaatagcattgttgatgcctgctcgatattacagctgactgtagggttggagttgatgttatcatgttctcccaagctttcaatatccgtaggttgatagacgtctgatggataaaattgtgcctagttgttttgtagagaagaatgtcaaactcttattcttcttgaataggctctattatttgaatctctggagttattaccagctcattgcttcaaaattaagttgaggaattcaagaataatttattttagtaaattctatttaagatgtttaagaatttgaactgccaaaaatctttcctctccacagaggttgtttctttaatattaacacaaagtaagtgaccttcaggtcttattggaaactcagagtaatatggccttgcctggaattgcaaatttccttagttttgaaattttcatagatgtctttggttcttggttgtaactgttgactgagaagagccatttacattttttgataccaacagggcaaagctttttacttaattacctctaccaggctttaagggaaatctgatacttcagcatgtgttaaactataaaatacctactccaagtatctgcccagttccttgtcccctctccccaggcccttaaaggaagttctcgatacatatttgtagaataactgaatgttttcaggattcctgtactttgctgagttaaaatggatatggtacccttgctgattggttgagcccctaagagggggcagaatattaaatattccatatcagatatgcttttacaggtttgactttagaaaagtcttagcatgtgaagcctgttggataaagggctgtgtttgcatttaatctgtcacttttgtatctcctgtcctggctggccattttgatctcatgctgttctttttttcttttgaacttgtaggtcaccatgtacttgacaagatttcatttacttaagtgccatgttgatgataataaaacaattcgtactccccaatggtggatttattactattaaagaaaccagggaaaatattaattttaatattataacaacctgaaaataatggaaaagaggtttttgaatttttttttttaaataaacaccttcttaagtgcatgagatggtttgatggtttgctgcattaaaggtatttgggcaaacaaaattggagggcaagtgactgcagttttgagaatcagttttgaccttgatgattttttgtttccactgtggaaataaatgtttgtaaataagtgtaataaaaatccctttgcattctttctggaccttaaatggtagaggaaaaggctcgtgagccatttgtttcttttgctggttatagttgctaattctaaagctgcttcagactgcttcatgaggaggttaatctacaattaaacaatatttcctcttggccgtccattattttctgaagcagatggttcatcatttcctgggctgttaaacaaagcgaggttaaggttagactcttgggaatcagctagttttcaatcttattagggtgcagaaggaaaactaataagaaaacctcctaatatcattttgtgactgtaaacaattatttattagcaaacaattgatcccagaagggcaaattgtttgagtcagtaatgagctgagaaaagacagagcatatctgtgtatttggaaaaataattgtaacgtaattgcagtgcatttagacaggcatctatttggacctgtttctatctctaaatgaatttttggaaacattaatgaggtttacatatttctctgacatttatatagttcttatgtccatttcagttgaccagccgctggtgattaaagttaaaaagaaaaaaattatagtgagaatgagattcatttcaatgtaatgcactaaagcagaacacgaacttagcttggcctattctaggtagttccaaatagtatttttgttgtcaaactttaaaatttatattaatttgcaaatgtatgtctctgagtaggacttggacctttcctgagatttattttatccgtgatgtattttttttaattcttttgatacagagaagggtctttttttttttaagtatttcagtgaaaacttggtgtaagtctgaacccatcttttgaaatgtattttcttcattgcaggtccacctaatcatcctgtgaaagtggtttctctatggaaagctttgtttgcttcctacaaatacatgcttattccttaagggatgtgttagagttactgtggatttctctgttttctgtcttacaagaaacttgtctatgtaccttaatactttgtttaggatgaggagtctttgtgtccctgtacagtagtctgacgtatttccccttctgtcccctagtaagcccagttgctgtatctgaacagtttgagctctttttgtaatatactctaaacctgttatttctgtgctaataaacgagatgcagaacccttgaatgttg

SEQ ID NO: 7430 - protein, 324 aa, Homo sapiens
MTGSNEFKLNQPPEDGISSVKFSPNTSQFLLVSSWDTSVRLYDVPANSMRLKYQHTGAVLDCAFYDPTHAWSGGLDHQLKMHDLNTDQENLVGTHDAPIRCVEYCPEVNVMVTGSWDQTVKLWDPRTPCNAGTFSQPEKVYTLSVSGDRLIVGTAGRRVLVWDLRNMGYVQQRRESSLKYQTRCIRAFPNKQGYVLSSIEGRVAVEYLDPSPEVQKKKYAFKCHRLKENNIEQIYPVNAISFHNIHNTFATGGSDGFVNIWDPFNKKRLCQFHRYPTSIASLAFSNDGTTLAIASSYMYEMDDTEHPEDGIFIRQVTDAETKPK

SEQ ID NO: 7431 - DNA, 2764 bp, Homo sapiens
agcggtttccctttgagccggaacaggatgactgggttgaccgatgctgggcagctgagcggaccaatcggccccctagactgagacgttggcgtttgaaatcagccaatggcaggtctacactggagcttcctctccgcctccttcgcctagcctgcgagtgttctgagggaagcaaggaggcggcggcggccgcagcgagtggcgagtagtggaaacgttgcttctgaggggagcccaagatgaccggttctaacgagttcaagctgaaccagccacccgaggatggcatctcctccgtgaagttcagccccaacacctcccagttcctgcttgtctcctcctgggacacgtccgtgcgtctctacgatgtgccggccaactccatgcggctcaagtaccagcacaccggcgccgtcctggactgcgccttctacgatccaacgcatgcctggagtggaggactagatcatcaattgaaaatgcatgatttgaacactgatcaagaaaatcttgttgggacccatgatgcccctatcagatgtgttgaatactgtccagaagtgaatgtgatggtcactggaagttgggatcagacagttaaactgtgggatcccagaactccttgtaatgctgggaccttctctcagcctgaaaaggtatataccctctcagtgtctggagaccggctgattgtgggaacagcaggccgcagagtgttggtgtgggacttacggaacatgggttacgtgcagcagcgcagggagtccagcctgaaataccagactcgctgcatacgagcgtttccaaacaagcagggttatgtattaagctctattgaaggccgagtggcagttgagtatttggacccaagccctgaggtacagaagaagaagtatgccttcaaatgtcacagactaaaagaaaataatattgagcagatttacccagtcaatgccatttcttttcacaatatccacaatacatttgccacaggtggttctgatggctttgtaaatatttgggatccatttaacaaaaagcgactgtgccaattccatcggtaccccacgagcatcgcatcacttgccttcagtaatgatgggactacgcttgcaatagcgtcatcatatatgtatgaaatggatgacacagaacatcctgaagatggtatcttcattcgccaagtgacagatgcagaaacaaaacccaagtcaccatgtacttgacaagatttcatttacttaagtgccatgttgatgataataaaacaattcgtactccccaatggtggatttattactattaaagaaaccagggaaaatattaattttaatattataacaacctgaaaataatggaaaagaggtttttgaatttttttttttaaataaacaccttcttaagtgcatgagatggtttgatggtttgctgcattaaaggtatttgggcaaacaaaattggagggcaagtgactgcagttttgagaatcagttttgaccttgatgattttttgtttccactgtggaaataaatgtttgtaaataagtgtaataaaaatccctttgcattctttctggaccttaaatggtagaggaaaaggctcgtgagccatttgtttcttttgctggttatagttgctaattctaaagctgcttcagactgcttcatgaggaggttaatctacaattaaacaatatttcctcttggccgtccattattttctgaagcagatggttcatcatttcctgggctgttaaacaaagcgaggttaaggttagactcttgggaatcagctagttttcaatcttattagggtgcagaaggaaaactaataagaaaacctcctaatatcattttgtgactgtaaacaattatttattagcaaacaattgatcccagaagggcaaattgtttgagtcagtaatgagctgagaaaagacagagcatatctgtgtatttggaaaaataattgtaacgtaattgcagtgcatttagacaggcatctatttggacctgtttctatctctaaatgaatttttggaaacattaatgaggtttacatatttctctgacatttatatagttcttatgtccatttcagttgaccagccgctggtgattaaagttaaaaagaaaaaaattatagtgagaatgagattcatttcaatgtaatgcactaaagcagaacacgaacttagcttggcctattctaggtagttccaaatagtatttttgttgtcaaactttaaaatttatattaatttgcaaatgtatgtctctgagtaggacttggacctttcctgagatttattttatccgtgatgtattttttttaattcttttgatacagagaagggtctttttttttttaagtatttcagtgaaaacttggtgtaagtctgaacccatcttttgaaatgtattttcttcattgcaggtccacctaatcatcctgtgaaagtggtttctctatggaaagctttgtttgcttcctacaaatacatgcttattccttaagggatgtgttagagttactgtggatttctctgttttctgtcttacaagaaacttgtctatgtaccttaatactttgtttaggatgaggagtctttgtgtccctgtacagtagtctgacgtatttccccttctgtcccctagtaagcccagttgctgtatctgaacagtttgagctctttttgtaatatactctaaacctgttatttctgtgctaataaacgagatgcagaacccttgaatgttg

SEQ ID NO: 7432 - protein, 328 aa, Homo sapiens; identical to SEQ ID NO: 821

SEQ ID NO: 7433 - DNA, 137 bp, Homo sapiens
gtgttcttcaatccttgaggatcccaaatggaagcccagggaatggtagctggggacaaccccagatgttcaccggacctgtggtccttctagattctccgactcttaaagtcttgtaataaatatcttacacgtat

SEQ ID NO: 7434 - DNA, 6797 bp, Homo sapiens
ctccgccgcaaactttttcctccccatcctgtcgcggctcgaaaggaatggaaaatggcggcctagacgcggagtttcctgcccgacccgcggcggctccggcggcgccatgacgcgctgggtgcccaccaagcgcgaggagaagtacggcgtggctttttataactatgatgccagaggagcggatgaactttctttacagatcggagacactgtgcacatcttagaaacatatgaagggtggtaccgaggttacacgttacgaaaaaagtctaagaagggtatatttcctgcttcatatattcatcttaaagaagcgatagttgaaggaaaagggcaacatgaaacagtcatcccgggtgacctccccctcatccaggaagtcaccacgacactccgagagtggtccaccatctggaggcagctctacgtgcaagataacagggagatgtttcgaagtgtgcggcacatgatctatgaccttattgaatggcgatcacaaattctttctggaactctgcctcaggatgaactcaaagaactgaagaagaaggtcacagccaaaattgattatggaaacagaattctagatttggacctggtggttagagatgaagatgggaatattttggatccagaattaactagcacgattagtctcttcagagctcatgaaatagcttctaaacaagtggaggaaaggttacaagaggaaaaatctcaaaagcagaacatagatattaacagacaagccaagtttgctgcaaccccttctctggccttgtttgtgaacctcaaaaatgtggtttgtaaaataggagaagatgctgaagtcctcatgtctctatatgaccctgtggagtccaaattcatcagtgagaactacctggttcgctggtccagttcaggattacctaaagacatagacagattacataatttgcgagccgtgtttactgacctcggaagcaaagacctgaaaagggagaaaatcagttttgtctgtcagattgttcgcgtgggtcgcatggagctgagggacaacaacaccaggaaactgacctcggggttgcggcgaccttttggagtggctgtgatggatgtaacagatataataaatggaaaagtagatgatgaagataagcagcatttcattccctttcagccggtggcaggggagaatgacttccttcagactgttataaacaaagtcatcgctgccaaagaagtcaaccacaaggggcagggtttgtgggtaacattgaaattacttcctggagatatccatcagatccgaaaagagtttccgcatttagtggacaggaccacagctgtggctcgaaaaacagggtttccggagataatcatgcctggtgatgttcgaaatgatatctatgtaacattagttcaaggagattttgataaaggaagcaaaacaacagcgaagaacgtggaggtcacggtgtctgtgtacgatgaggatgggaaacgattagagcatgtgattttcccgggtgctggtgatgaagcgatttcagagtacaaatctgtgatttactaccaagtaaagcagccacgctggtttgagactgttaaggtggccattcccatcgaggacgttaaccgcagtcaccttcggtttaccttccgccacaggtcatcacaggactctaaggataaatctgagaaaatatttgcactagcatttgtcaagctgatgagatacgatggtaccaccctgcgagacggagagcacgatcttatcgtctataaggccgaagcaaagaagctggaagatgctgccacgtacttgagtctgccctccacgaaggcagagttggaagaaaagggccactcggccaccggcaagagcatgcagagccttgggagctgcaccattagcaaggactccttccagatctccacgctcgtgtgctccaccaaactgactcagaacgtggaccttctggggctcttgaaatggcgctccaacaccagcctgctgcagcagaacttgaggcagctgatgaaagtcgatggtggtgaagtagtgaagtttcttcaggacacgttggatgccctcttcaacatcatgatggagaactcagagagtgagacttttgacacgttagtctttgatgctctggtatttatcattggactgattgctgatagaaaatttcagcattttaatcctgttttggaaacttacattaagaaacactttagtgcaacgttagcctacacgaagttgacaaaagtgttgaagaactacgtggacggtgctgagaagccgggagtaaatgagcagctgtacaaagccatgaaagcgctagaatccatcttcaagttcatcgtgcgctccaggatcctgttcaatcaactgtatgaaaacaagggagaggctgacttcgtggaatctttgctgcagctcttcaggtccatcaatgacatgatgagcagcatgtcagaccagaccgtccgggtgaagggggcagcactgaaatacttaccaacgatcgtcaacgatgtgaaattggtgtttgatcccaaagagctcagcaaaatgtttactgaattcatcctcaatgttcccatgggcttgctgaccatccagaaactctactgcttgatcgaaatcgtccacagtgacctcttcacacagcatgactgcagagagatcctgcttcccatgatgaccgatcagctcaagtaccatctggagagacaggaggacctggaggcctgctgtcagctgctcagccacatcctggaggtgctgtacaggaaggacgtggggccaacccagaggcacgtccagattatcatggagaaacttctccggaccgtgaaccgaaccgtcatttccatgggacgagattctgaactcattggaaacttcgtggcttgcatgacagctattttacgacaaatggaagattaccattatgcccacttgatcaagacttttgggaaaatgaggactgatgtggtagatttcctaatggaaacattcatcatgtttaagaacctcattggaaagaacgtttaccccttcgactgggtgatcatgaacatggtgcaaaataaagtcttcctgcgagcaattaatcagtatgcagatatgctgaacaaaaaatttctggatcaagccaactttgagctacagctgtggaacaactactttcacctggctgttgctttccttactcaagagtccctgcaactggagaatttttcaagtgccaagagagccaaaatccttaacaagtacggagatatgaggagacagattggctttgaaatcagagacatgtggtacaaccttggtcaacacaagataaagttcattccagaaatggtgggcccaatattagaaatgacattaattcccgagacggagctgcgcaaagccaccatccccatcttctttgatatgatgcagtgtgaattccattcgacccgaagcttccaaatgtttgaaaatgagatcatcaccaagctggatcatgaagtcgaaggaggcagaggagacgaacagtacaaagtgttatttgataaaatccttctggaacactgcaggaagcacaaatacctcgccaaaacaggagaaacttttgtaaaactcgttgtgcgcttaatggaaaggcttttggattatagaaccatcatgcacgacgagaacaaagaaaaccgcatgagctgcaccgtcaatgtgctgaatttctacaaagaaattgaaagagaagaaatgtatataaggtatttgtacaagctctgtgacctgcacaaggagtgtgataactacaccgaagcggcttacaccttgcttctccatgcaaagcttcttaagtggtcggaggatgtgtgtgtggcccacctcacccagcgggacgggtaccaggccaccacgcagggacagctgaaggagcagctctaccaggaaatcatccactacttcgacaaaggcaagatgtgggaggaggccattgccttgggcaaggagctagccgagcagtatgagaacgaaatgtttgattatgagcaactcagcgaattgctgaaaaaacaggctcagttttatgaaaacatcgtcaaagtgatcaggcccaagcctgactattttgctgttggctactacggacaagggttccccacattcctgcggggaaaagttttcatttaccgagggaaagagtatgagcgccgggaagattttgaggctcggctcttaactcagtttccaaacgccgagaaaatgaagacaacatctccaccaggcgacgatattaaaaactctcctggccagtatattcagtgcttcacagtgaagcccaaactcgatctgcctcctaagtttcacaggccagtgtcagagcagattgtaagtttttacagggtgaacgaggtccagcgatttgaatattctcggccaatccggaagggagagaaaaacccagacaatgaatttgcgaatatgtggatcgagagaaccatatatacaactgcatataaattacctggaattttaaggtggtttgaggtcaagtctgttttcatggtggaaatcagccccctggagaatgccattgagaccatgcagctgacgaacgacaagatcaacagcatggtgcagcagcacctggatgaccccagcctgcccatcaacccgctctccatgctcctgaacggcatcgtggacccagctgtcatggggggcttcgcaaactacgaaaaggccttctttacagaccggtacctgcaggagcaccctgaggcccatgaaaagatcgagaagctcaaggacctgattgcttggcagattccttttctggccgaagggatcagaatccatggagacaaagtcacggaggcactgaggccgttccacgagaggatggaggcctgtttcaaacagctgaaggaaaaggtggagaaagagtacggcgtccgaatcatgccctcaagtctggatgatagaagaggcagccgcccccggtccatggtgcggtccttcacgatgccttcctcatcccgccctctgtctgtggcctctgtctcttccctctcatcggacagcaccccttccagaccaggctccgacgggtttgccctggagcctctcctgccaaagaaaatgcactccaggtcccaggacaagctggacaaggatgacctggagaaggagaagaaggacaagaagaaggaaaaaaggaacagcaaacatcaagagatatttgagaaagaatttaaacccaccgacatttccctgcagcagtctgaggctgtgatcctttcggaaacgataagtcccctgcggccccagagaccgaagagccaggtgatgaacgtcattggaagcgaaaggcgcttctcggtgtccccctcgtcaccgtcctcccagcaaacaccccctccagttacaccaagggccaagctcagcttcagcatgcagtcgagcttggagctgaacggcatgacgggggcggacgtggccgatgtcccaccccctctgcctctcaaaggcagcgtggcagattacgggaatttgatggaaaaccaggacttgctgggctcgccaacacctccacctccccctccacaccagaggcatctgccacctccactgcccagcaaaactccgcctcctccccctccaaagacaactcgcaagcaggcatcggtggactccgggatcgtgcagtgacgtcgcaagcctctctggaaagagtgtgctgcccctccccatctccatgccctctccttctgtgtcccctgagtctgctgtttacctcattgggcctgtgatgttaacatttcgtgcgactgctttttcttcaaaggagttcagttctcaccatggagtgagtggcctttagcgtcatggagcaaggtgggtctgggaggtagatatgggtccgggatgtgctatcgtagttatcagagttgggggcctctgagtgtgtctggctctgagagagtctgagtcttgcccaaacattctttctttttgtgccaaatgacttgcatttgcaaagagctcaattgctctgagctcagccaagtaggagaggctaggccatcactcttaggaagctgtgtagtgatgatgtataagaatcctcctcactgtcatgggatgttgtatccagcccctccttgttccagccggtggtgtgacttcgttggttgaggtgtgtctccaacctacatcagaccatgaagttcaacccctccagggaagctcctgatttcccctgcataattgaaaataggatatttctcagctattgaacagttactaatttatggggtggaaacagcattaagaatactgaatcaaatggaaaaacaaatgaatacaggaagataagtgttcgttcttttctgaaaaagagtatgtgtaccacaagagctggttttaattgggtgaattgtttttgtcctcattctgtacagaaatttgtatatatgatggttcttagaacttgttttaatttttgtggtccttccgtttattataataggcgtccaccaatgattatccatatgtgttcttaatttttaactgctggaagtgttaaaacacacacacacacacacacacattttttttttgagaactccaaagtcctgaaaattttggtggacaatgatttttaaaaaactaactttgtataacctaatatttgtattctctcatctatatttttttattcactataatcatgatactcttctaatagacttaaaagttaatcattgacaacgaaaaataaaatgttattttaaaagac

SEQ ID NO: 7435 - protein, 1865 aa, Homo sapiens
MTRWVPTKREEKYGVAFYNYDARGADELSLQIGDTVHILETYEGWYRGYTLRKKSKKGIFPASYIHLKEAIVEGKGQHETVIPGDLPLIQEVTTTLREWSTIWRQLYVQDNREMFRSVRHMIYDLIEWRSQILSGTLPQDELKELKKKVTAKIDYGNRILDLDLVVRDEDGNILDPELTSTISLFRAHEIASKQVEERLQEEKSQKQNIDINRQAKFAATPSLALFVNLKNVVCKIGEDAEVLMSLYDPVESKFISENYLVRWSSSGLPKDIDRLHNLRAVFTDLGSKDLKREKISFVCQIVRVGRMELRDNNTRKLTSGLRRPFGVAVMDVTDIINGKVDDEDKQHFIPFQPVAGENDFLQTVINKVIAAKEVNHKGQGLWVTLKLLPGDIHQIRKEFPHLVDRTTAVARKTGFPEIIMPGDVRNDIYVTLVQGDFDKGSKTTAKNVEVTVSVYDEDGKRLEHVIFPGAGDEAISEYKSVIYYQVKQPRWFETVKVAIPIEDVNRSHLRFTFRHRSSQDSKDKSEKIFALAFVKLMRYDGTTLRDGEHDLIVYKAEAKKLEDAATYLSLPSTKAELEEKGHSATGKSMQSLGSCTISKDSFQISTLVCSTKLTQNVDLLGLLKWRSNTSLLQQNLRQLMKVDGGEVVKFLQDTLDALFNIMMENSESETFDTLVFDALVFIIGLIADRKFQHFNPVLETYIKKHFSATLAYTKLTKVLKNYVDGAEKPGVNEQLYKAMKALESIFKFIVRSRILFNQLYENKGEADFVESLLQLFRSINDMMSSMSDQTVRVKGAALKYLPTIVNDVKLVFDPKELSKMFTEFILNVPMGLLTIQKLYCLIEIVHSDLFTQHDCREILLPMMTDQLKYHLERQEDLEACCQLLSHILEVLYRKDVGPTQRHVQIIMEKLLRTVNRTVISMGRDSELIGNFVACMTAILRQMEDYHYAHLIKTFGKMRTDVVDFLMETFIMFKNLIGKNVYPFDWVIMNMVQNKVFLRAINQYADMLNKKFLDQANFELQLWNNYFHLAVAFLTQESLQLENFSSAKRAKILNKYGDMRRQIGFEIRDMWYNLGQHKIKFIPEMVGPILEMTLIPETELRKATIPIFFDMMQCEFHSTRSFQMFENEIITKLDHEVEGGRGDEQYKVLFDKILLEHCRKHKYLAKTGETFVKLVVRLMERLLDYRTIMHDENKENRMSCTVNVLNFYKEIEREEMYIRYLYKLCDLHKECDNYTEAAYTLLLHAKLLKWSEDVCVAHLTQRDGYQATTQGQLKEQLYQEIIHYFDKGKMWEEAIALGKELAEQYENEMFDYEQLSELLKKQAQFYENIVKVIRPKPDYFAVGYYGQGFPTFLRGKVFIYRGKEYERREDFEARLLTQFPNAEKMKTTSPPGDDIKNSPGQYIQCFTVKPKLDLPPKFHRPVSEQIVSFYRVNEVQRFEYSRPIRKGEKNPDNEFANMWIERTIYTTAYKLPGILRWFEVKSVFMVEISPLENAIETMQLTNDKINSMVQQHLDDPSLPINPLSMLLNGIVDPAVMGGFANYEKAFFTDRYLQEHPEAHEKIEKLKDLIAWQIPFLAEGIRIHGDKVTEALRPFHERMEACFKQLKEKVEKEYGVRIMPSSLDDRRGSRPRSMVRSFTMPSSSRPLSVASVSSLSSDSTPSRPGSDGFALEPLLPKKMHSRSQDKLDKDDLEKEKKDKKKEKRNSKHQEIFEKEFKPTDISLQQSEAVILSETISPLRPQRPKSQVMNVIGSERRFSVSPSSPSSQQTPPPVTPRAKLSFSMQSSLELNGMTGADVADVPPPLPLKGSVADYGNLMENQDLLGSPTPPPPPPHQRHLPPPLPSKTPPPPPPKTTRKQASVDSGIVQ

SEQ ID NO: 7436 - DNA, 4885 bp, Homo sapiens
agcttaattcgaagcagcatattgcaactgtttgggtgctatcttgaggcacaataattaccctataataataatgtgtgttttagtaaactggtcattattgtcatagagggctggaaagagtgtcttcttaaagctcataaggaccctagggtactctgcaaatagcagagttctaaacctgaaggaaaaaattaaggggaaaaaaaattgtgttagtggtcagaagccccgtgtccttatgcatcacggcacagcccaccctgtaatgacaagaaggtgttgtattccactgacacttgggggcttttctgtgatctctggggttgctgcatgtacatcctcagaggctctctcaacacagttaccaagggtcaggtgggttacttagaccatctctctagctcatactttgtacttctgggggctgaaggtgacaggacagaccccatcccaagactggggggctgattagagttgccaggcatcccgtatatgcaaagcatgtcctgaattttgcaacttttgtcctggatcctttattaatttgtcaggatgctctaaatgtcctgtattccgctttttttttctaatcaattacagaattcagcaataagagctttattcaaatttaactgggcatcctatatttgcaaaatctggcaaccctgcggctgaggaatgttgctgcccagcctgtgttcttggttaatggacaaggcagcaatgcctgcgtccctccattaatagtcacttagaaacactaattcctcctttctggttatattttaatgtccccggggaagaagtcaaataactccacctgcagttttctttagtgaccaaaattgcaaactctgtcacaggccctttgtcacagctgttttggtcccagagctagccgataggtttcttgatgaaataatgtctgcgaatccctttctcagagcggcacgcagtgtgagcgtgagagaatctgcagtgacagcgggtgatgggcgggaggtggtggtggcaggtggcgatggagacctccttaaaaccccaggtggtgaatttcttcttccctcctccctggctcactgccttttagcggctgtgacatggccagggcgtggggagcttctccaggcacgcttggctgaagagataatgctgtcagaggacagcagttactaagtcttcctgcgagcaattaatcagtatgcagatatgctgaacaaaaaatttctggatcaagccaactttgagctacagctgtggaacaactactttcacctggctgttgctttccttactcaagagtccctgcaactggagaatttttcaagtgccaagagagccaaaatccttaacaagtacggagatatgaggagacagattggctttgaaatcagagacatgtggtacaaccttggtcaacacaagataaagttcattccagaaatggtgggcccaatattagaaatgacattaattcccgagacggagctgcgcaaagccaccatccccatcttctttgatatgatgcagtgtgaattccattcgacccgaagcttccaaatgtttgaaaatgagatcatcaccaagctggatcatgaagtcgaaggaggcagaggagacgaacagtacaaagtgttatttgataaaatccttctggaacactgcaggaagcacaaatacctcgccaaaacaggagaaacttttgtaaaactcgttgtgcgcttaatggaaaggcttttggattatagaaccatcatgcacgacgagaacaaagaaaaccgcatgagctgcaccgtcaatgtgctgaatttctacaaagaaattgaaagagaagaaatgtatataaggtatttgtacaagctctgtgacctgcacaaggagtgtgataactacaccgaagcggcttacaccttgcttctccatgcaaagcttcttaagtggtcggaggatgtgtgtgtggcccacctcacccagcgggacgggtaccaggccaccacgcagggacagctgaaggagcagctctaccaggaaatcatccactacttcgacaaaggcaagatgtgggaggaggccattgccttgggcaaggagctagccgagcagtatgagaacgaaatgtttgattatgagcaactcagcgaattgctgaaaaaacaggctcagttttatgaaaacatcgtcaaagtgatcaggcccaagcctgactattttgctgttggctactacggacaagggttccccacattcctgcggggaaaagttttcatttaccgagggaaagagtatgagcgccgggaagattttgaggctcggctcttaactcagtttccaaacgccgagaaaatgaagacaacatctccaccaggcgacgatattaaaaactctcctggccagtatattcagtgcttcacagtgaagcccaaactcgatctgcctcctaagtttcacaggccagtgtcagagcagattgtaagtttttacagggtgaacgaggtccagcgatttgaatattctcggccaatccggaagggagagaaaaacccagacaatgaatttgcgaatatgtggatcgagagaaccatatatacaactgcatataaattacctggaattttaaggtggtttgaggtcaagtctgttttcatggtggaaatcagccccctggagaatgccattgagaccatgcagctgacgaacgacaagatcaacagcatggtgcagcagcacctggatgaccccagcctgcccatcaacccgctctccatgctcctgaacggcatcgtggacccagctgtcatggggggcttcgcaaactacgaaaaggccttctttacagaccggtacctgcaggagcaccctgaggcccatgaaaagatcgagaagctcaaggacctgattgcttggcagattccttttctggccgaagggatcagaatccatggagacaaagtcacggaggcactgaggccgttccacgagaggatggaggcctgtttcaaacagctgaaggaaaaggtggagaaagagtacggcgtccgaatcatgccctcaagtctggatgatagaagaggcagccgcccccggtccatggtgcggtccttcacgatgccttcctcatcccgccctctgtctgtggcctctgtctcttccctctcatcggacagcaccccttccagaccaggctccgacgggtttgccctggagcctctcctgccaaagaaaatgcactccaggtcccaggacaagctggacaaggatgacctggagaaggagaagaaggacaagaagaaggaaaaaaggaacagcaaacatcaagagatatttgagaaagaatttaaacccaccgacatttccctgcagcagtctgaggctgtgatcctttcggaaacgataagtcccctgcggccccagagaccgaagagccaggtgatgaacgtcattggaagcgaaaggcgcttctcggtgtccccctcgtcaccgtcctcccagcaaacaccccctccagttacaccaagggccaagctcagcttcagcatgcagtcgagcttggagctgaacggcatgacgggggcggacgtggccgatgtcccaccccctctgcctctcaaaggcagcgtggcagattacgggaatttgatggaaaaccaggacttgctgggctcgccaacacctccacctccccctccacaccagaggcatctgccacctccactgcccagcaaaactccgcctcctccccctccaaagacaactcgcaagcaggcatcggtggactccgggatcgtgcagtgacgtcgcaagcctctctggaaagagtgtgctgcccctccccatctccatgccctctccttctgtgtcccctgagtctgctgtttacctcattgggcctgtgatgttaacatttcgtgcgactgctttttcttcaaaggagttcagttctcaccatggagtgagtggcctttagcgtcatggagcaaggtgggtctgggaggtagatatgggtccgggatgtgctatcgtagttatcagagttgggggcctctgagtgtgtctggctctgagagagtctgagtcttgcccaaacattctttctttttgtgccaaatgacttgcatttgcaaagagctcaattgctctgagctcagccaagtaggagaggctaggccatcactcttaggaagctgtgtagtgatgatgtataagaatcctcctcactgtcatgggatgttgtatccagcccctccttgttccagccggtggtgtgacttcgttggttgaggtgtgtctccaacctacatcagaccatgaagttcaacccctccagggaagctcctgatttcccctgcataattgaaaataggatatttctcagctattgaacagttactaatttatggggtggaaacagcattaagaatactgaatcaaatggaaaaacaaatgaatacaggaagataagtgttcgttcttttctgaaaaagagtatgtgtaccacaagagctggttttaattgggtgaattgtttttgtcctcattctgtacagaaatttgtatatatgatggttcttagaacttgttttaatttttgtggtccttccgtttattataataggcgtccaccaatgattatccatatgtgttcttaatttttaactgctggaagtgttaaaacacacacacacacacacacacattttttttttgagaactccaaagtcctgaaaattttggtggacaatgatttttaaaaaactaactttgtataacctaatatttgtattctctcatctatatttttttattcactataatcatgatactcttctaatagacttaaaagttaatcattgacaacgaaaaataaaatgttattttaaaagac

SEQ ID NO: 7437 - protein, 860 aa, Homo sapiens
MLNKKFLDQANFELQLWNNYFHLAVAFLTQESLQLENFSSAKRAKILNKYGDMRRQIGFEIRDMWYNLGQHKIKFIPEMVGPILEMTLIPETELRKATIPIFFDMMQCEFHSTRSFQMFENEIITKLDHEVEGGRGDEQYKVLFDKILLEHCRKHKYLAKTGETFVKLVVRLMERLLDYRTIMHDENKENRMSCTVNVLNFYKEIEREEMYIRYLYKLCDLHKECDNYTEAAYTLLLHAKLLKWSEDVCVAHLTQRDGYQATTQGQLKEQLYQEIIHYFDKGKMWEEAIALGKELAEQYENEMFDYEQLSELLKKQAQFYENIVKVIRPKPDYFAVGYYGQGFPTFLRGKVFIYRGKEYERREDFEARLLTQFPNAEKMKTTSPPGDDIKNSPGQYIQCFTVKPKLDLPPKFHRPVSEQIVSFYRVNEVQRFEYSRPIRKGEKNPDNEFANMWIERTIYTTAYKLPGILRWFEVKSVFMVEISPLENAIETMQLTNDKINSMVQQHLDDPSLPINPLSMLLNGIVDPAVMGGFANYEKAFFTDRYLQEHPEAHEKIEKLKDLIAWQIPFLAEGIRIHGDKVTEALRPFHERMEACFKQLKEKVEKEYGVRIMPSSLDDRRGSRPRSMVRSFTMPSSSRPLSVASVSSLSSDSTPSRPGSDGFALEPLLPKKMHSRSQDKLDKDDLEKEKKDKKKEKRNSKHQEIFEKEFKPTDISLQQSEAVILSETISPLRPQRPKSQVMNVIGSERRFSVSPSSPSSQQTPPPVTPRAKLSFSMQSSLELNGMTGADVADVPPPLPLKGSVADYGNLMENQDLLGSPTPPPPPPHQRHLPPPLPSKTPPPPPPKTTRKQASVDSGIVQ

SEQ ID NO: 7438 - DNA, 795 bp, Homo sapiens
ccttagctcaagctctcttaaattccttatggcagaatgaaaacaacttcattagggcctacctgagaagaaaacaaaaacaagaaaaagtgtggacatcattatccacttgtcctggctgccttgcccccttctaaccatttcatgcccattctagtgtgggcttctgagtgctcatttggtttttcatatagtttttaaatcagttgttactgtcaagatgaaaacatatcacagatgttagtagcgcagtgctgagtgcttcttaaacagtattaacttacatgcttgatgaccatgtgttcttgattaacaaagccaacgcaagtacaaaaaaaaataaaaattacaagttgttcttaaatttaatgacattttgtaagaacccgtaaggcatattttaaggccagcatattgcatgtgaactcttcctggccctttctctgtggtgttatgaaatgaatgtcacccttttcagggaaaagttttcatttaccgagggaaagagtatgagcgccgggaagattttgaggctcggctcttaactcagtttccaaacgccgagaaaatgaagacaacatctccaccaggcgacgatattaaaaactctcctggccagtatattcagtgcttcacagtgaagcccaaactcgatctgcctcctaagtttcacaggccagtgtcagagcagattgtaaggtaataatcccatttttcttacccaacgtgagggttgtaagaggctgtgtacagatctcttgctaataattccaccttttaaaggacggactttgg

SEQ ID NO: 7439 - protein, 44 aa, Homo sapiens
MKTTSPPGDDIKNSPGQYIQCFTVKPKLDLPPKFHRPVSEQIVR

SEQ ID NO: 7440 - DNA, 1570 bp, Homo sapiens
atacgaggatgctataggtctccagcatcacatctctttacagggtcccctgagcattgtgcagatgctgccattcctcctaggtaaagtccatggccatatcttcaaaggacaccaacccctataatggcttatttctcaagtcattgggcctgggtcacacagttttctgggaatttgcccttctgtgtgtgtgtatcttacatgtaggtatgctcactgacagcccccaccaagcctccagccacccactgccagctaccactgagccatcatgcatgccaacccagctgtgctttcagatgacccatcatagctgctgccttactgcaccggtgggtgagacaagccagcctgctgagactccctaagccacagaaacagaagtactagtaaactgtttgaaactgctatgtttcaggggtggttttttaaagcagattagataacaggaacagaatttggcagctggaatggggtgctgtggtaataagaagctatgacatgcagcactggacctaagactgagcagaagctgggcctcaaggagaccgttcatggaagctggaagggtgtcaagactcttggcgctgctgggaggctcagctggccccggggcctgcctgctgtcctgcctgcatggaccaccaggctgagctgcccgctgtcctgcctgcagggcccgcctgccggggctgcccgctgtgcagcctgcaaggcccaccttccggggttgccctctaagctgcctacagtgcccgcctgccggggctgccttccgggattgcccgctctcctgcctgcaggccctgctgggaggctcagctggctcagcctgcagggccggcctgccggggctgcccgctgtacgtcctcgagttccgactggaaggctcagctggccccagggccccatgcggggcctctccgctgtcccgccttcagggctcgccagcctccgctgcccgctgtcctgtctgcaggggctgccttccgggattgcccgctctcctgcgtgcaggccctgctgggaggctcagctggccccggggaccgcctgccgggtctgcccgctgtgctgcctgcatggaccaccagcctgagctgcccgctctcctgcctgcaggcccggctgggaggctcagctggccccggggaccgcctgccgtgtcggcccgctaacctgcctgcagggcccgccagcctgagctgctcgctgtcctgcctgcagggcccgcctgccggggctgcccgctgtgcagcctgcaaggcccacctgccggggttgccctctaagctgcctacagtgcccgcctgccggtgctgcccactgtacatctttcaggcccagctgggaggctcagctggcactggggcttgcatgccgggcctgtctgctgtcctgccttcagagctcgccagcctgggctgcccgcggtcctgtctgcaggggccgcctgccgggattgcccgctctcctgctggcaggcccggctgggaggctcagcttgtcccggggaccgcctgccgggtctgcccgctgtcctgcctgcatggaccaccagcctga

SEQ ID NO: 7441 - protein, 356 aa, Homo sapiens
MTCSTGPKTEQKLGLKETVHGSWKGVKTLGAAGRLSWPRGLPAVLPAWTTRLSCPLSCLQGPPAGAARCAACKAHLPGLPSKLPTVPACRGCLPGLPALLPAGPAGRLSWLSLQGRPAGAARCTSSSSDWKAQLAPGPHAGPLRCPAFRARQPPLPAVLSAGAAFRDCPLSCVQALLGGSAGPGDRLPGLPAVLPAWTTSLSCPLSCLQARLGGSAGPGDRLPCRPANLPAGPASLSCSLSCLQGPPAGAARCAACKAHLPGLPSKLPTVPACRCCPLYIFQAQLGGSAGTGACMPGLSAVLPSELASLGCPRSCLQGPPAGIARSPAGRPGWEAQLVPGTACRVCPLSCLHGPPA

SEQ ID NO: 7442 - DNA, 1642 bp, Homo sapiens
atacgaggatgctataggtctccagcatcacatctctttacagggtcccctgagcattgtgcagatgctgccattcctcctaggtaaagtccatggccatatcttcaaaggacaccaacccctataatggcttatttctcaagtcattgggcctgggtcacacagttttctgggaatttgcccttctgtgtgtgtgtatcttacatgtaggtatgctcactgacagcccccaccaagcctccagccacccactgccagctaccactgagccatcatgcatgccaacccagctgtgctttcagatgacccatcatagctgctgccttactgcaccggtgggtgagacaagccagcctgctgagactccctaagccacagaaacagaagtactagtaaactgtttgaaactgctatgtttcaggggtggttttttaaagcagattagataacaggaacagaatttggcagctggaatggggtgctgtggtaataagaagctatgacatgcagcactggacctaagactgagcagaagctgggcctcaaggagaccgttcatggaagctggaagggtgtcaagactcttggcgctgctgggaggctcagctggccccggggcctgcctgctgtcctgcctgcatggaccaccaggctgagctgcccgctgtcctgcctgcagggcccgcctgccggggctgcccgctgtgcagcctgcaaggcccaccttccggggttgccctctaagctgcctacagtgcccgcctgccggggctgccttccgggattgcccgctctcctgcctgcaggccctgctgggaggctcagctggctcagcctgcagggccggcctgccggggctgcccgctgtacgtcctcgagttccgactggaaggctcagctggccccagggccccatgcggggcctctccgctgtcccgccttcagggctcgccagcctccgctgcccgctgtcctgtctgcaggggctgccttccgggattgcccgctctcctgcgtgcaggccctgctgggaggctcagctggccccggggaccgcctgccgggtctgcccgctgtgctgcctgcatggaccaccagcctgagctgcccgctctcctgcctgcaggcccggctgggaggctcagctggccccggggaccgcctgccgtgtcggcccgctaacctgcctgcagggcccgccagcctgagctgctcgctgtcctgcctgcagggcccgcctgccggggctgcccgctgtgcagcctgcaaggcccacctgccggggttgccctctaagctgcctacagtgcccgcctgccgagctcgccagcctgggctgcccgcggtcctgtctgcaggggccgcctgccgggattgcccgctctcctgctggcaggcccggctgggaggctcagcttgtcccggggaccgcctgccgggtctgcccgctgtcctgcctgcatggaccaccagcctgagctgcccgctgtcctgcctgcagggcctgcaggcccggctgggaggctcagctggccccggggaccgcctgccgggtctgcccgctctcctgcctgcagggcccgccagcctgagctgctcgctgtcctgcctgcagggcccgcctgccggggttgccctctaa

SEQ ID NO: 7443 - protein, 380 aa, Homo sapiens
MTCSTGPKTEQKLGLKETVHGSWKGVKTLGAAGRLSWPRGLPAVLPAWTTRLSCPLSCLQGPPAGAARCAACKAHLPGLPSKLPTVPACRGCLPGLPALLPAGPAGRLSWLSLQGRPAGAARCTSSSSDWKAQLAPGPHAGPLRCPAFRARQPPLPAVLSAGAAFRDCPLSCVQALLGGSAGPGDRLPGLPAVLPAWTTSLSCPLSCLQARLGGSAGPGDRLPCRPANLPAGPASLSCSLSCLQGPPAGAARCAACKAHLPGLPSKLPTVPACRARQPGLPAVLSAGAACRDCPLSCWQARLGGSACPGDRLPGLPAVLPAWTTSLSCPLSCLQGLQARLGGSAGPGDRLPGLPALLPAGPASLSCSLSCLQGPPAGVAL

SEQ ID NO: 7444 - DNA, 759 bp, Homo sapiens
ttcctatacttggtaaggggcctgcacgggcatagccccccccagcaagactccgcacacaccccggccacccagtcactggccaatgggctcctaggaagatcaaatgtcactataacacgagggtgtgagccgggcgccagtgcctgcagccggtgctgtccacagggagctccagcccttctcacactcgacccgcagaaaccacccaccttcaccatgtctgacgaggaagttgaacaggtggaggagcagtacgaagaagaagaggaagcccaggaggaagctgcagaagtccatgaggaagttcatgaaccagaggaagttcaagaagaggagaaaccgagacccaaactcactgctcctaagatcccagaaggggagaaagtggacttcgatgacatccagaagaagcgtcagaacaaagacctaatggagctccaggccctcatcgacagccactttgaagcccggaagaaggaggaggaggagctggtcgctctcaaagagagaatcgagaagcgccgtgcagagagagcggagcagcagaggattcgtgcagagaaggagagggagcgccagaacagactggcggaggaaaaggccagaagggaggaggaggatgccaagaggagggcagaggacgacctgaagaagaagaaagctctgtcttccatgggagccaactacagcagctacctggccaaggctgaccagaagagaggcaagaagcagacagcccgggaaatgaagaagaag

SEQ ID NO: 7445 - protein, 179 aa, Homo sapiens
MSDEEVEQVEEQYEEEEEAQEEAAEVHEEVHEPEEVQEEEKPRPKLTAPKIPEGEKVDFDDIQKKRQNKDLMELQALIDSHFEARKKEEEELVALKERIEKRRAERAEQQRIRAEKERERQNRLAEEKARREEEDAKRRAEDDLKKKKALSSMGANYSSYLAKADQKRGKKQTAREMKK

SEQ ID NO: 7446 - DNA, 744 bp, Homo sapiens
ttcctatacttggtaaggggcctgcacgggcatagccccccccagcaagactccgcacacaccccggccacccagtcactggccaatgggctcctaggaagatcaaatgtcactataacacgagggtgtgagccgggcgccagtgcctgcagccggtgctgtccacagggagctccagcccttctcacactcgacccgcagaaaccacccaccttcaccatgtctgacgaggaagttgaacaggtggaggagcagtacgaagaagaagaggaagcccaggaggaagctgcagaagtccatgaggaagttcatgaaccagaggagaaaccgagacccaaactcactgctcctaagatcccagaaggggagaaagtggacttcgatgacatccagaagaagcgtcagaacaaagacctaatggagctccaggccctcatcgacagccactttgaagcccggaagaaggaggaggaggagctggtcgctctcaaagagagaatcgagaagcgccgtgcagagagagcggagcagcagaggattcgtgcagagaaggagagggagcgccagaacagactggcggaggaaaaggccagaagggaggaggaggatgccaagaggagggcagaggacgacctgaagaagaagaaagctctgtcttccatgggagccaactacagcagctacctggccaaggctgaccagaagagaggcaagaagcagacagcccgggaaatgaagaagaag

SEQ ID NO: 7447 - protein, 174 aa, Homo sapiens
MSDEEVEQVEEQYEEEEEAQEEAAEVHEEVHEPEEKPRPKLTAPKIPEGEKVDFDDIQKKRQNKDLMELQALIDSHFEARKKEEEELVALKERIEKRRAERAEQQRIRAEKERERQNRLAEEKARREEEDAKRRAEDDLKKKKALSSMGANYSSYLAKADQKRGKKQTAREMKK

SEQ ID NO: 7448 - DNA, 1207 bp, Homo sapiens
ttcctatacttggtaaggggcctgcacgggcatagccccccccagcaagactccgcacacaccccggccacccagtcactggccaatgggctcctaggaagatcaaatgtcactataacacgagggtgtgagccgggcgccagtgcctgcagccggtgctgtccacagggagctccagcccttctcacactcgacccgcagaaaccacccaccttcaccatgtctgacgaggaagttgaacaggtggaggagcagtacgaagaagaagaggaagcccaggaggaagctgcagaagtccatgaggaagttcatgaaccagaggagaaaccgagacccaaactcactgctcctaagatcccagaaggggagaaagtggacttcgatgacatccagaagaagcgtcagaacaaagacctaatggagctccaggccctcatcgacagccactttgaagcccggaagaaggaggaggaggagctggtcgctctcaaagagagaatcgagaagcgccgtgcagagagagcggagcagcagaggattcgtgcagagaaggagagggagcgccagaacagactggcggaggaaaaggccagaagggaggaggaggatgccaagaggagggcagaggacgacctgaagaagaagaaagctctgtcttccatgggagccaactacagcagctacctggccaaggctgaccagaagagaggcaagaagcagacagcccgggaaatgaagaagaagattctggctgagagacgcaagccgctcaacatcgatcaccttggtgaagacaaactgagggacaaggccaaggagctctgggagaccctgcaccagctggagattgacaagttcgagtttggggagaagctgaaacgccagaaatatgacatcaccacgctcaggagccgcattgaccaggcccagaagcacagcaagaaggctgggaccccagccaagggcaaagtcggcgggcgctggaagtagagaggccagaaaggcccctcgaggcagagaccctccgccctcttgcacaccagggccgctcgtgggactccacatcctccagcccccacaatcctgtcaggggctccctgacagtcctgggggtggagaggccatcccggggcgtcccccgcgtctgtgtccttgctgccttcatcccctggggcctgtgaataaagctgcagaacccccttcacag

SEQ ID NO: 7449 - protein, 256 aa, Homo sapiens
MSDEEVEQVEEQYEEEEEAQEEAAEVHEEVHEPEEKPRPKLTAPKIPEGEKVDFDDIQKKRQNKDLMELQALIDSHFEARKKEEEELVALKERIEKRRAERAEQQRIRAEKERERQNRLAEEKARREEEDAKRRAEDDLKKKKALSSMGANYSSYLAKADQKRGKKQTAREMKKKILAERRKPLNIDHLGEDKLRDKAKELWETLHQLEIDKFEFGEKLKRQKYDITTLRSRIDQAQKHSKKAGTPAKGKVGGRWK

SEQ ID NO: 7450 - DNA, 674 bp, Homo sapiens
agtcactggccaatgggctcctaggaagatcaaatgtcactataacacgagggtgtgagccgggcgccagtgcctgcagccggtgctgtccacagggagctccagcccttctcacactcgacccgcagaaaccacccaccttcaccatgtctgacgaggaagttgaacaggtggaggagcagtacgaagaagaagaggaagcccaggaggaagctgcagaagtccatgaggaagaggaagttcaagaagaggagaaaccgagacccaaactcactgctcctaagatcccagaaggggagaaagtggacttcgatgacatccagaagaagcgtcagaacaaagacctaatggagctccaggccctcatcgacagccactttgaagcccggaagaaggaggaggaggagctggtcgctctcaaagagagaatcgagaagcgccgtgcagagagagcggagcagcagaggattcgtgcagagaaggagagggagcgccagaacagactggcggaggaaaaggccagaagggaggaggaggatgccaagaggagggcagaggacgacctgaagaagaagaaagctctgtcttccatgggagccaactacagcagctacctggccaaggctgaccagaagagaggcaagaagcagacagcccgggaaatgaagaagaag

SEQ ID NO: 7451 - protein, 175 aa, Homo sapiens
MSDEEVEQVEEQYEEEEEAQEEAAEVHEEEEVQEEEKPRPKLTAPKIPEGEKVDFDDIQKKRQNKDLMELQALIDSHFEARKKEEEELVALKERIEKRRAERAEQQRIRAEKERERQNRLAEEKARREEEDAKRRAEDDLKKKKALSSMGANYSSYLAKADQKRGKKQTAREMKK

SEQ ID NO: 7452 - DNA, 649 bp, Homo sapiens
actggccaatgggctcctaggaagatcaaatgtcactataacacgagggtgtgagccgggcgccagtgcctgcagccggtgctgtccacagggagctccagcccttctcacactcgacccgcagaaaccacccaccttcaccatgtctgacgaggaagttgaacaggtggaggagcagtacgaagaagaagaggaagcccaggaggaagaggaagttcaagaagaggagaaaccgagacccaaactcactgctcctaagatcccagaaggggagaaagtggacttcgatgacatccagaagaagcgtcagaacaaagacctaatggagctccaggccctcatcgacagccactttgaagcccggaagaaggaggaggaggagctggtcgctctcaaagagagaatcgagaagcgccgtgcagagagagcggagcagcagaggattcgtgcagagaaggagagggagcgccagaacagactggcggaggaaaaggccagaagggaggaggaggatgccaagaggagggcagaggacgacctgaagaagaagaaagctctgtcttccatgggagccaactacagcagctacctggccaaggctgaccagaagagaggcaagaagcagacagcccgggaaatgaagaagaag

SEQ ID NO: 7453 - protein, 168 aa, Homo sapiens
MSDEEVEQVEEQYEEEEEAQEEEEVQEEEKPRPKLTAPKIPEGEKVDFDDIQKKRQNKDLMELQALIDSHFEARKKEEEELVALKERIEKRRAERAEQQRIRAEKERERQNRLAEEKARREEEDAKRRAEDDLKKKKALSSMGANYSSYLAKADQKRGKKQTAREMKK

SEQ ID NO: 7454 - DNA, 628 bp, Homo sapiens
actggccaatgggctcctaggaagatcaaatgtcactataacacgagggtgtgagccgggcgccagtgcctgcagccggtgctgtccacagggagctccagcccttctcacactcgacccgcagaaaccacccaccttcaccatgtctgacgaggaagttgaacaggtggaggagcagtacgaagaagaagttcatgaaccagaggagaaaccgagacccaaactcactgctcctaagatcccagaaggggagaaagtggacttcgatgacatccagaagaagcgtcagaacaaagacctaatggagctccaggccctcatcgacagccactttgaagcccggaagaaggaggaggaggagctggtcgctctcaaagagagaatcgagaagcgccgtgcagagagagcggagcagcagaggattcgtgcagagaaggagagggagcgccagaacagactggcggaggaaaaggccagaagggaggaggaggatgccaagaggagggcagaggacgacctgaagaagaagaaagctctgtcttccatgggagccaactacagcagctacctggccaaggctgaccagaagagaggcaagaagcagacagcccgggaaatgaagaagaag

SEQ ID NO: 7455 - protein, 161 aa, Homo sapiens
MSDEEVEQVEEQYEEEVHEPEEKPRPKLTAPKIPEGEKVDFDDIQKKRQNKDLMELQALIDSHFEARKKEEEELVALKERIEKRRAERAEQQRIRAEKERERQNRLAEEKARREEEDAKRRAEDDLKKKKALSSMGANYSSYLAKADQKRGKKQTAREMKK

SEQ ID NO: 7456 - DNA, 1111 bp, Homo sapiens
actggccaatgggctcctaggaagatcaaatgtcactataacacgagggtgtgagccgggcgccagtgcctgcagccggtgctgtccacagggagctccagcccttctcacactcgacccgcagaaaccacccaccttcaccatgtctgacgaggaagttgaacaggtggaggagcagtacgaagaagaagaggaagcccaggaggaagaggaagttcaagaagaggagaaaccgagacccaaactcactgctcctaagatcccagaaggggagaaagtggacttcgatgacatccagaagaagcgtcagaacaaagacctaatggagctccaggccctcatcgacagccactttgaagcccggaagaaggaggaggaggagctggtcgctctcaaagagagaatcgagaagcgccgtgcagagagagcggagcagcagaggattcgtgcagagaaggagagggagcgccagaacagactggcggaggaaaaggccagaagggaggaggaggatgccaagaggagggcagaggacgacctgaagaagaagaaagctctgtcttccatgggagccaactacagcagctacctggccaaggctgaccagaagagaggcaagaagcagacagcccgggaaatgaagaagaagattctggctgagagacgcaagccgctcaacatcgatcaccttggtgaagacaaactgagggacaaggccaaggagctctgggagaccctgcaccagctggagattgacaagttcgagtttggggagaagctgaaacgccagaaatatgacatcatgaatgtccgggccagagtgcagatgctggccaagttcagcaagaaggctgggaccccagccaagggcaaagtcggcgggcgctggaagtagagaggccagaaaggcccctcgaggcagagaccctccgccctcttgcacaccagggccgctcgtgggactccacatcctccagcccccacaatcctgtcaggggctccctgacagtcctgggggtggagaggccatcccggggcgtcccccgcgtctgtgtccttgctgccttcatcccctggggcctgtgaataaagctgcagaacccccttcaca

SEQ ID NO: 7457 - protein, 250 aa, Homo sapiens
MSDEEVEQVEEQYEEEEEAQEEEEVQEEEKPRPKLTAPKIPEGEKVDFDDIQKKRQNKDLMELQALIDSHFEARKKEEEELVALKERIEKRRAERAEQQRIRAEKERERQNRLAEEKARREEEDAKRRAEDDLKKKKALSSMGANYSSYLAKADQKRGKKQTAREMKKKILAERRKPLNIDHLGEDKLRDKAKELWETLHQLEIDKFEFGEKLKRQKYDIMNVRARVQMLAKFSKKAGTPAKGKVGGRWK

SEQ ID NO: 7458 - DNA, 582 bp, Homo sapiens
agtgcctgcagccggtgctgtccacagggagctccagcccttctcacactcgacccgcagaaaccacccaccttcaccatgtctgacgaggaagttcccaatgcagagcagtacgaagaagaagaggaagcccaggaggaagaggaagttcaagaagaggagaaaccgagacccaaactcactgctcctaagatcccagaaggggagaaagtggacttcgatgacatccagaagaagcgtcagaacaaagacctaatggagctccaggccctcatcgacagccactttgaagcccggaagaaggaggaggaggagctggtcgctctcaaagagagaatcgagaagcgccgtgcagagagagcggagcagcagaggattcgtgcagagaaggagagggagcgccagaacagactggcggaggaaaaggccagaagggaggaggaggatgccaagaggagggcagaggacgacctgaagaagaagaaagctctgtcttccatgggagccaactacagcagctacctggccaaggctgaccagaagagaggcaagaagcagacagcccgggaaatgaagaagaag

SEQ ID NO: 7459 - protein, 167 aa, Homo sapiens
MSDEEVPNAEQYEEEEEAQEEEEVQEEEKPRPKLTAPKIPEGEKVDFDDIQKKRQNKDLMELQALIDSHFEARKKEEEELVALKERIEKRRAERAEQQRIRAEKERERQNRLAEEKARREEEDAKRRAEDDLKKKKALSSMGANYSSYLAKADQKRGKKQTAREMKK

SEQ ID NO: 7460 - DNA, 603 bp, Homo sapiens
agtgcctgcagccggtgctgtccacagggagctccagcccttctcacactcgacccgcagaaaccacccaccttcaccatgtctgacgaggaagttcccaatgcagagcagtacgaagaagaagaggaagcccaggaggaagctgcagaagtccatgaggaagaggaagttcaagaagaggagaaaccgagacccaaactcactgctcctaagatcccagaaggggagaaagtggacttcgatgacatccagaagaagcgtcagaacaaagacctaatggagctccaggccctcatcgacagccactttgaagcccggaagaaggaggaggaggagctggtcgctctcaaagagagaatcgagaagcgccgtgcagagagagcggagcagcagaggattcgtgcagagaaggagagggagcgccagaacagactggcggaggaaaaggccagaagggaggaggaggatgccaagaggagggcagaggacgacctgaagaagaagaaagctctgtcttccatgggagccaactacagcagctacctggccaaggctgaccagaagagaggcaagaagcagacagcccgggaaatgaagaagaag

SEQ ID NO: 7461 - protein, 174 aa, Homo sapiens
MSDEEVPNAEQYEEEEEAQEEAAEVHEEEEVQEEEKPRPKLTAPKIPEGEKVDFDDIQKKRQNKDLMELQALIDSHFEARKKEEEELVALKERIEKRRAERAEQQRIRAEKERERQNRLAEEKARREEEDAKRRAEDDLKKKKALSSMGANYSSYLAKADQKRGKKQTAREMKK

SEQ ID NO: 7462 - DNA, 582 bp, Homo sapiens
agtgcctgcagccggtgctgtccacagggagctccagcccttctcacactcgacccgcagaaaccacccaccttcaccatgtctgacgaggaagttgaacaggtggaggagcagtacgaagaagaagaggaagcccaggaggaagttcatgaaccagaggagaaaccgagacccaaactcactgctcctaagatcccagaaggggagaaagtggacttcgatgacatccagaagaagcgtcagaacaaagacctaatggagctccaggccctcatcgacagccactttgaagcccggaagaaggaggaggaggagctggtcgctctcaaagagagaatcgagaagcgccgtgcagagagagcggagcagcagaggattcgtgcagagaaggagagggagcgccagaacagactggcggaggaaaaggccagaagggaggaggaggatgccaagaggagggcagaggacgacctgaagaagaagaaagctctgtcttccatgggagccaactacagcagctacctggccaaggctgaccagaagagaggcaagaagcagacagcccgggaaatgaagaagaag

SEQ ID NO: 7463 - protein, 167 aa, Homo sapiens
MSDEEVEQVEEQYEEEEEAQEEVHEPEEKPRPKLTAPKIPEGEKVDFDDIQKKRQNKDLMELQALIDSHFEARKKEEEELVALKERIEKRRAERAEQQRIRAEKERERQNRLAEEKARREEEDAKRRAEDDLKKKKALSSMGANYSSYLAKADQKRGKKQTAREMKK

SEQ ID NO: 7464 - DNA, 609 bp, Homo sapiens
agtgcctgcagccggtgctgtccacagggagctccagcccttctcacactcgacccgcagaaaccacccaccttcaccatgtctgacgaggaagttgaacaggtggaggagcagtacgaagaagaagaggaagcccaggaggaagaggaagttcaagaagacaccgcagaggaggacgcggaagaggagaaaccgagacccaaactcactgctcctaagatcccagaaggggagaaagtggacttcgatgacatccagaagaagcgtcagaacaaagacctaatggagctccaggccctcatcgacagccactttgaagcccggaagaaggaggaggaggagctggtcgctctcaaagagagaatcgagaagcgccgtgcagagagagcggagcagcagaggattcgtgcagagaaggagagggagcgccagaacagactggcggaggaaaaggccagaagggaggaggaggatgccaagaggagggcagaggacgacctgaagaagaagaaagctctgtcttccatgggagccaactacagcagctacctggccaaggctgaccagaagagaggcaagaagcagacagcccgggaaatgaagaagaag

SEQ ID NO: 7465 - protein, 176 aa, Homo sapiens
MSDEEVEQVEEQYEEEEEAQEEEEVQEDTAEEDAEEEKPRPKLTAPKIPEGEKVDFDDIQKKRQNKDLMELQALIDSHFEARKKEEEELVALKERIEKRRAERAEQQRIRAEKERERQNRLAEEKARREEEDAKRRAEDDLKKKKALSSMGANYSSYLAKADQKRGKKQTAREMKK

SEQ ID NO: 7466 - DNA, 577 bp, Homo sapiens
agtgcctgcagccggtgctgtccacagggagctccagcccttctcacactcgacccgcagaaaccacccaccttcaccatgtctgacgaggaagttgaacaggtggaggagcagtacgaagaagaagaggaagcccaggaggaagaggagaaaccgagacccaaactcactgctcctaagatcccagaaggggagaaagtggacttcgatgacatccagaagaagcgtcagaacaaagacctaatggagctccaggccctcatcgacagccactttgaagcccggaagaaggaggaggaggagctggtcgctctcaaagagagaatcgagaagcgccgtgcagagagagcggagcagcagaggattcgtgcagagaaggagagggagcgccagaacagactggcggaggaaaaggccagaagggaggaggaggatgccaagaggagggcagaggacgacctgaagaagaagaaagctctgtcttccatgggagccaactacagcagctacctggccaaggctgaccagaagagaggcaagaagcagacagcccgggaaatgaagaagaagattctgg

SEQ ID NO: 7467 - protein, 165 aa, Homo sapiens
MSDEEVEQVEEQYEEEEEAQEEEEKPRPKLTAPKIPEGEKVDFDDIQKKRQNKDLMELQALIDSHFEARKKEEEELVALKERIEKRRAERAEQQRIRAEKERERQNRLAEEKARREEEDAKRRAEDDLKKKKALSSMGANYSSYLAKADQKRGKKQTAREMKKKI

SEQ ID NO: 7468 - DNA, 565 bp, Homo sapiens
agtgcctgcagccggtgctgtccacagggagctccagcccttctcacactcgacccgcagaaaccacccaccttcaccatgtctgacgaggaagttcccaatgcagagcagtacgaagaagaagaggaagcccaggaggaagctgcagaagtccatgaggaagttcatgaaccagaggaagttcaagaagaggagaaaccgagacccaaactcactgctcctaagatcccagaaggggagaaagtggacttcgatgacatccagaagaagcgtcagaacaaagacctaatggagctccaggccctcatcgacagccactttgaagccagaagggaggaggaggatgccaagaggagggcagaggacgacctgaagaagaagaaagctctgtcttccatgggagccaactacagcagctacctggccaaggctgaccagaagagaggcaagaagcagacagcccgggaaatgaagaagaagattctggctgagagacgcaagccgctcaacatcgatcaccttggtgaagacaaactgagggacaaggccaaggagctctgggaga

SEQ ID NO: 7469 - protein, 161 aa, Homo sapiens
MSDEEVPNAEQYEEEEEAQEEAAEVHEEVHEPEEVQEEEKPRPKLTAPKIPEGEKVDFDDIQKKRQNKDLMELQALIDSHFEARREEEDAKRRAEDDLKKKKALSSMGANYSSYLAKADQKRGKKQTAREMKKKILAERRKPLNIDHLGEDKLRDKAKELW

SEQ ID NO: 7470 - DNA, 749 bp, Homo sapiens
agtgcctgcagccggtgctgtccacagggagctccagcccttctcacactcgacccgcagaaaccacccaccttcaccatgtctgacgaggaagtgtgagtacccagctggtggaggaagcccaggaggaagaggaagttcaagaagaggagaaaccgagacccaaactcactgctcctaagatcccagaaggggagaaagtggacttcgatgacatccagaagaagcgtcagaacaaagacctaatggagctccaggccctcatcgacagccactttgaagcccggaagaaggaggaggaggagctggtcgctctcaaagagagaatcgagaagcgccgtgcagagagagcggagcagcagaggattcgtgcagagaaggagagggagcgccagaacagactggcggaggaaaaggccagaagggaggaggaggatgccaagaggagggcagaggacgacctgaagaagaagaaagctctgtcttccatgggagccaactacagcagctacctggccaaggctgaccagaagagaggcaagaagcagacagcccgggaaatgaagaagaagattctggctgagagacgcaaggccgctcgtgggactccacatcctccagcccccacaatcctgtcaggggctccctgacagtcctgggggtggagaggccatcccggggcgtcccccgcgtctgtgtccttgctgccttcatcccctggggcctgtgaataaagctgcagaaccccc

SEQ ID NO: 7471 - protein, 134 aa, Homo sapiens
MELQALIDSHFEARKKEEEELVALKERIEKRRAERAEQQRIRAEKERERQNRLAEEKARREEEDAKRRAEDDLKKKKALSSMGANYSSYLAKADQKRGKKQTAREMKKKILAERRKAARGTPHPPAPTILSGAP

SEQ ID NO: 7472 - DNA, 508 bp, Homo sapiens
agtgcctgcagccggtgctgtccacagggagctccagcccttctcacactcgacccgcagaaaccacccaccttcaccatgtctgacgaggaagttcccaatgcagagcagtacgaagaagaagaggaagcccaggaggaagctgcagaagtccatgaggaagttcatgaaccagaggacgacctgaagaagaagaaagctctgtcttccatgggagccaactacagcagctacctggccaaggctgaccagaagagaggcaagaagcagacagcccgggaaatgaagaagaagattctggctgagagacgcaagccgctcaacatcgatcaccttggtgaagacaaactgagggacaaggccaaggagctctgggagaccccccacaatcctgtcaggggctccctgacagtcctgggggtggagaggccatcccggggcgtcccccgcgtctgtgtccttgctgccttcatcccctggggcctgtgaataaagctgcagaaccccc

SEQ ID NO: 7473 - protein, 136 aa, Homo sapiens
MSDEEVPNAEQYEEEEEAQEEAAEVHEEVHEPEDDLKKKKALSSMGANYSSYLAKADQKRGKKQTAREMKKKILAERRKPLNIDHLGEDKLRDKAKELWETPHNPVRGSLTVLGVERPSRGVPRVCVLAAFIPWGL

SEQ ID NO: 7474 - DNA, 613 bp, Homo sapiens
tgcctgcagccggtgctgtccacagggagctccagcccttctcacactcgacccgcagaaaccacccaccttcaccatgtctgacgaggaagttcccaatgcagagcagtacgaagaagaagaggaagcccaggaggaagctgcagaagtccatgaggaagttcatgaaccagaggaagttcaagaagaggagaaaccgagacccaaactcactgctcctaagatcccagaaggggagaaagtggacttcgatgacatccagaagaagcgtcagaacaaagacctaatggagctccaggccctcatcgacagccactttgaagcccggaagaaggaggaggaggagctggtcgctctcaaagagagaatcgagaagcgccgtgcagagagagcggagcagcagaggattcgtgcagagaaggagagggagcgccagaacagactggcggaggaaaaggccagaagggaggaggaggatgccaagaggagggcagaggacgacctgaagaagaagaaagctctgtcttccatgggagccaactacagcagctacctggccaaggctgaccagaagagaggcaagaagcagacagcccgggaaatgaagaagaag

SEQ ID NO: 7475 - protein, 178 aa, Homo sapiens
MSDEEVPNAEQYEEEEEAQEEAAEVHEEVHEPEEVQEEEKPRPKLTAPKIPEGEKVDFDDIQKKRQNKDLMELQALIDSHFEARKKEEEELVALKERIEKRRAERAEQQRIRAEKERERQNRLAEEKARREEEDAKRRAEDDLKKKKALSSMGANYSSYLAKADQKRGKKQTAREMKK

SEQ ID NO: 7476 - DNA, 1246 bp, Homo sapiens
cagaggatggccctagaggagtctgtggcgtttggggcctgaaccagctgggaggacagcacgaggggctggtgggcagcctgggactgggtcacaccgggggcctggacaacactggctcgtggggctgaggactgaggagagcctggcccagccgtggcagttacaagaggcttaacctgaggggcagcagagtctcaggaagagattctgggataggaaaaagctacccccgttgcctggaagacagctatctgctggaaaccacccaccttcaccatgtctgacgaggaagttgaacaggtggaggagcagtacgaagaagaagaggaagcccaggaggaagaggaagttcaagaagaggagaaaccgagacccaaactcactgctcctaagatcccagaaggggagaaagtggacttcgatgacatccagaagaagcgtcagaacaaagacctaatggagctccaggccctcatcgacagccactttgaagcccggaagaaggaggaggaggagctggtcgctctcaaagagagaatcgagaagcgccgtgcagagagagcggagcagcagaggattcgtgcagagaaggagagggagcgccagaacagactggcggaggaaaaggccagaagggaggaggaggatgccaagaggagggcagaggacgacctgaagaagaagaaagctctgtcttccatgggagccaactacagcagctacctggccaaggctgaccagaagagaggcaagaagcagacagcccgggaaatgaagaagaagattctggctgagagacgcaagccgctcaacatcgatcaccttggtgaagacaaactgagggacaaggccaaggagctctgggagaccctgcaccagctggagattgacaagttcgagtttggggagaagctgaaacgccagaaatatgacatcaccacgctcaggagccgcattgaccaggcccagaagcacagcaagaaggctgggaccccagccaagggcaaagtcggcgggcgctggaagtagagaggccagaaaggcccctcgaggcagagaccctccgccctcttgcacaccagggccgctcgtgggactccacatcctccagcccccacaatcctgtcaggggctccctgacagtcctgggggtggagaggccatcccggggcgtcccccgcgtctgtgtccttgctgccttcatcccctggggcctgtgaataaagctgcagaacccccttca

SEQ ID NO: 7477 - protein, 250 aa, Homo sapiens
MSDEEVEQVEEQYEEEEEAQEEEEVQEEEKPRPKLTAPKIPEGEKVDFDDIQKKRQNKDLMELQALIDSHFEARKKEEEELVALKERIEKRRAERAEQQRIRAEKERERQNRLAEEKARREEEDAKRRAEDDLKKKKALSSMGANYSSYLAKADQKRGKKQTAREMKKKILAERRKPLNIDHLGEDKLRDKAKELWETLHQLEIDKFEFGEKLKRQKYDITTLRSRIDQAQKHSKKAGTPAKGKVGGRWK

SEQ ID NO: 7478 - DNA, 1003 bp, Homo sapiens
cccaccttcaccatgtctgacgaggaagttgaacaggtggaggagcagtacgaagaagaagaggaagcccaggaggaagaggaagttcaagaagacaccgcagaggaggacgcggaagaggagaaaccgagacccaaactcactgctcctaagatcccagaaggggagaaagtggacttcgatgacatccagaagaagcgtcagaacaaagacctaatggagctccaggccctcatcgacagccactttgaagcccggaagaaggaggaggaggagctggtcgctctcaaagagagaatcgagaagcgccgtgcagagagagcggagcagcagaggattcgtgcagagaaggagagggagcgccagaacagactggcggaggaaaaggccagaagggaggaggaggatgccaagaggagggcagaggacgacctgaagaagaagaaagctctgtcttccatgggagccaactacagcagctacctggccaaggctgaccagaagagaggcaagaagcagacagcccgggaaatgaagaagaagattctggctgagagacgcaagccgctcaacatcgatcaccttggtgaagacaaactgagggacaaggccaaggagctctgggagaccctgcaccagctggagattgacaagttcgagtttggggagaagctgaaacgccagaaatatgacatcaccacgctcaggagccgcattgaccaggcccagaagcacagcaagaaggctgggaccccagccaagggcaaagtcggcgggcgctggaagtagagaggccagaaaggcccctcgaggcagagaccctccgccctcttgcacaccagggccgctcgtgggactccacatcctccagcccccacaatcctgtcaggggctccctgacagtcctgggggtggagaggccatcccggggcgtcccccgcgtctgtgtccttgctgccttcatcccctggggcctgtgaataaagctgcagaacccccttca

SEQ ID NO: 7479 - protein, 258 aa, Homo sapiens; identical to SEQ ID NO: 825

SEQ ID NO: 7480 - DNA, 1227 bp, Homo sapiens
tggactccctcggaggagccggggacagggctgagcagacccccttctctggctgcaggagaagcgccgtgcagagagagcggagcagcagaggattcgtgcagagaaggagagggagcgccagaacagactggcggaggaaaaggccagaagggaggaggaggatgccaagaggagggcagaggacgacctgaagaagaagaaagctctgtcttccatgggagccaactacagcagctacctggccaaggctgaccagaagagaggcaagaagcagacagcccgggaaatgaagaagaagattctggctgagagacgcaagccgctcaacatcgatcaccttggtgaagacaaactgagggacaaggccaaggagctctgggagaccctgcaccagctggagattgacaagttcgagtttggggagaagctgaaacgccagaaatatgacgtgagtcccggcacctccggccctggggccctagcggctttcacccaccagcagagcagccatctccctgcgtccctaccaaactctggacctgcccaccccagggacctggaccctgagaggcccaaacaggctgttgccacggacccctggctgaggctgctttcctgctggggactgtggccagagcccgtcctcctggctggccatgcagcgccctgagcgatgaacctggcccctttgggcggccttggttacccctgccaaaaggactgtcgtggcagagcagccatggccaagtggactcagggttcattttcggaacccctttaagcttatagaaagtccccatcatcacccagctcggccccggggcaccgagtccgtctggtgtggggcgtcctttcgacagagcctcctccacaaacccagactctggcttccaccagggccccggacacctgcttcctcagggcagacagagaggggtgacacactgcaccctgtggctgggaaaaggggcctgggactgtgcccgtctgggacggagcagagccaccatcccatgcaggcactatcaccgcaggcaaagctgggactggggaaggcagcctgcccgggcggcctcagggactggggtacaatgtgggagctagggtggaagccaagctgcttcccaccctcccaaacacccgtttgggctccaggggcgaggggtgaggggcgcagccatgggtgatccacgtgctcggggcaaatgcagacactccagcatc

SEQ ID NO: 7481 - protein, 151 aa, Homo sapiens
MGANYSSYLAKADQKRGKKQTAREMKKKILAERRKPLNIDHLGEDKLRDKAKELWETLHQLEIDKFEFGEKLKRQKYDVSPGTSGPGALAAFTHQQSSHLPASLPNSGPAHPRDLDPERPKQAVATDPWLRLLSCWGLWPEPVLLAGHAAP

SEQ ID NO: 7482 - DNA, 611 bp, Homo sapiens
aagggaggaggaggatgccaagaggagggcagaggacgacctgaagaagaagaaagctctgtcttccatgggagccaactacagcagctacctggccaaggctgaccagaagagaggcaagaagcagacagcccgggaaatgaagaagaagattctggctgagagacgcaagccgctcaacatcgatcaccttggtgaagacaaactgagggacaaggccaaggagctctgggagaccctgcaccagctggagattgacaagttcgagtttggggagaagctgaaacgccagaaatatgacatcaccacgctcaggagccgcattgaccaggcccagaagcacagcaagaaggctgggaccccagccaagggcaaagtcggcgggcgctggaagtagagaggccagaaaggcccctcgaggcagagaccctccgccctcttgcacaccagggccgctcgtgggactccacatcctccagcccccacaatcctgtcaggggctccctgacagtcctgggggtggagaggccatcccggggcgtcccccgcgtctgtgtccttgctgccttcatcccctggggcctgtgaataaagctgcagaacccccttca

SEQ ID NO: 7483 - protein, 109 aa, Homo sapiens
MGANYSSYLAKADQKRGKKQTAREMKKKILAERRKPLNIDHLGEDKLRDKAKELWETLHQLEIDKFEFGEKLKRQKYDITTLRSRIDQAQKHSKKAGTPAKGKVGGRWK

SEQ ID NO: 7484 - DNA, 449 bp, Homo sapiens
agggcagaggacgacctgaagaagaagaaagctctgtcttccatgggagccaactacagcagctacctggccaaggctgaccagaagagaggcaagaagcagacagcccgggaaatgaagaagaagattctggctgagagacgcaagccgctcaacatcgatcaccttggtgaagacaaactgagggacaaggccaaggagctctgggagaccctgcaccagctggagattgacaagttcgagtttggggagaagctgaaacgccagaaatatgacatcaccacgctcaggaggccgctcgtgggactccacatcctccagcccccacaatcctgtcaggggctccctgacagtcctgggggtggagaggccatcccggggcgtcccccgcgtctgtgtccttgctgccttcatcccctggggcctgtgaataaagctgcagaaccccc

SEQ ID NO: 7485 - protein, 134 aa, Homo sapiens
MGANYSSYLAKADQKRGKKQTAREMKKKILAERRKPLNIDHLGEDKLRDKAKELWETLHQLEIDKFEFGEKLKRQKYDITTLRRPLVGLHILQPPQSCQGLPDSPGGGEAIPGRPPRLCPCCLHPLGPVNKAAE

SEQ ID NO: 7486 - DNA, 338 bp, Homo sapiens
agggagggtgccccgggctcacgtgccagccccctaaccacactaacgacctaggcccgccaggcacagcagcaagaaggctgggaccccagccaagggcaaagtcggcgggcgctggaagtagagaggccagaaaggcccctcgaggcagagaccctccgccctcttgcacaccagggccgctcgtgggactccacatcctccagcccccacaatcctgtcaggggctccctgacagtcctgggggtggagaggccatcccggggcgtcccccgcgtctgtgtccttgctgccttcatcccctggggcctgtgaataaagctgcagaacccccttca

SEQ ID NO: 7487 - protein, 111 aa, Homo sapiens [sequence omitted]

SEQ ID NO: 7488 - DNA, 907 bp, Homo sapiens
gggcgcgcggcacgggcgctggcgcgtgcggggggggcggcgcggcctccggaagcgagggggcgctgtgccaggcggcggccgtgcggggcgggcgcgctgctccttccgcctcgcggaccccggaagcgcgcgtggccgccatggcgcggaatgtggtgtaccccctgtaccggctgggtggcccacaacttcgggtgttccgaaccaacttcttcattcagctggtgcggcccggtgtggcccagcccgaggacaccgtgcagttccggatccccatggaaatgacaagggtggacctcaggaattacctcgagggcatctataacgtgcccgtggctgctgtgcggacacgggtgcagcatggctctaacaagagaagagatcacagaaacgtgaggatcaagaagccggactacaaggtcgcctacgtgcagctggtgcgtgtgagctggccagccccagcggggcctccgaggggctcctcgcaactgtgtccttggggatgtttgtgccggagacgctgcgctggggcccagggagcccccgtgaggccggatctcagggcctcagcgcagaggcaggctccacataaggtcatgctccgtcacggccttgggggtgttagtggtggcgctgggagcacgtgagcactggggcacatggggcacgtctcagcgtccggccgttttgtgattttgaagtttgaattctctgtgggcaaaggcagccatcacaggcctagtgggtttcaactccaacgcacaccagggtgtcagagcatgggaggccccggcctctggagagcctgtccttggctgggtttcagcctcggaggcagagtgtgaggcccctgagggcaaaggtctttggtgccaaggcaggtctggctggccgggctgttggc

SEQ ID NO: 7489 - protein, 168 aa, Homo sapiens
MARNVVYPLYRLGGPQLRVFRTNFFIQLVRPGVAQPEDTVQFRIPMEMTRVDLRNYLEGIYNVPVAAVRTRVQHGSNKRRDHRNVRIKKPDYKVAYVQLVRVSWPAPAGPPRGSSQLCPWGCLCRRRCAGAQGAPVRPDLRASAQRQAPHKVMLRHGLGGVSGGAGST

SEQ ID NO: 7490 - DNA, 792 bp, Homo sapiens
gggcgcgcggcacgggcgctggcgcgtgcggggggggcggcgcggcctccggaagcgagggggcgctgtgccaggcggcggccgtgcggggcgggcgcgctgctccttccgcctcgcggaccccggaagcgcgcgtggccgccatggcgcggaatgtggtgtaccccctgtaccggctgggtggcccacaacttcgggtgttccgaaccaacttcttcattcagctggtgcggcccggtgtggcccagcccgaggacaccgtgcagttccggatccccatggaaatgacaagggtggacctcaggaattacctcgagggcatctataacgtgcccgtggctgctgtgcggacacgggtgcagcatggctctaacaagagaagagatcacagaaacgtgaggatcaagaagccggactacaaggtcgcctacgtgcagctggcccatggacagaccttcacgttcccagatctgtttcccgagaaagacgagagccctgaaggcagcgctgccgacgacctctacagcatgctcgaggaggagaggcagcagaggcagagcagcgacccgcggcggggcggcgtccccagctggttcgggctgtgacggggtggccagcagggacgcgccccaggtgggcagctgtggcagagcagcgacccgcggcggggcggcatccccagctggttcgggccgtgacggggcggccagcagggacgcgccccaggtgggcagctgtggcagagcagtcccgacacctaaataaaagtcttgctgcaggagaaagagccgg

SEQ ID NO: 7491 - protein, 153 aa, Homo sapiens
MARNVVYPLYRLGGPQLRVFRTNFFIQLVRPGVAQPEDTVQFRIPMEMTRVDLRNYLEGIYNVPVAAVRTRVQHGSNKRRDHRNVRIKKPDYKVAYVQLAHGQTFTFPDLFPEKDESPEGSAADDLYSMLEEERQQRQSSDPRRGGVPSWFGL

SEQ ID NO: 7492 - DNA, 701 bp, Homo sapiens
gggcgcgcggcacgggcgctggcgcgtgcggggggggcggcgcggcctccggaagcgagggggcgctgtgccaggcggcggccgtgcggggcgggcgcgctgctccttccgcctcgcggaccccggaagcgcgcgtggccgccatggcgcggaatgtggtgtaccccctgtaccggctgggtggcccacaacttcgggtgttccgaaccaacttcttcattcagctggtgcggcccggtgtggcccagcccgaggacaccgtgcagttccggatccccatggaaatgacaagggtggacctcaggaattacctcgagggcatctataacgtgcccgtggctgctgtgcggacacgggtgcagcatggctctaacaagagaagagatcacagaaacgtgaggatcaagaagccggactacaaggtcgcctacgtgcagctggcccatggacagaccttcacgttcccagatctgtttcccgagaaagacgagagccctgaaggcagcgctgccgacgacctctacagcatgctcgaggaggagaggcagcagaggcagagcagcgacccgcggcggggcggcgtccccagctggttcgggctgtgacggggtggccagcagggacgcgccccaggtgggcagctgtggcagagcagtcccgacacctaaataaaagtcttgctgcaggagaaagagccggaa

SEQ ID NO: 7493 - protein, 153 aa, Homo sapiens; identical to SEQ ID NO: 7491

SEQ ID NO: 7494 - DNA, 1036 bp, Homo sapiens
gggcgcgcggcacgggcgctggcgcgtgcggggggggcggcgcggcctccggaagcgagggggcgctgtgccaggcggcggccgtgcggggcgggcgcgctgctccttccgcctcgcggaccccggaagcgcgcgtggccgccatggcgcggaatgtggtgtaccccctgtaccggctgggtggcccacaacttcgggtgttccgaaccaacttcttcattcagctggtgcggcccggtgtggcccagcccgaggacaccgtgcagttccggatccccatggaaatgacaagggtggacctcaggaattacctcgagggcatctataacgtgcccgtggctgctgtgcggacacgggtgcagcatggctctaacaagagaagagatcacagaaacgtgaggatcaagaagccggactacaaggtcgcctacgtgcagctggtgccgcaccctcggtccctgcctctctgtctccagcaccgctcacagctccgcacccccagaattccctgcattgtcgcctttgcgtcttggggccctgggagcaagcacgatgcctgcagtgccctgtgcgtggtggccagggcctgggctgcggtgtacgtgagtgcccgtctcatctccgtagccggctaagagtcctttcaaggccaagaattcttctctttgaccacatttccacccctccgcctgccctaggatgctctccatagtggacgctgcactttgccatggcatgccgggtggacaggactgctggggcccccgtgttccagcctctcctgcgcctccagatacggctgcttcctgggtctgggtgtctgaggggacgtccctcaaggttcccacccagctcagcctgtcaggagccgcaccctgcgaggcctgagaccacaccatgccgggtggggacacacgggccctgagtgacctgttgggcatctgcgttcaccaccccaccctgtctgagatcatccccagcaccagtccccccaaatcgcttcattatttctttgtaaatagggctttttctagtc

SEQ ID NO: 7495 - protein, 163 aa, Homo sapiens
MARNVVYPLYRLGGPQLRVFRTNFFIQLVRPGVAQPEDTVQFRIPMEMTRVDLRNYLEGIYNVPVAAVRTRVQHGSNKRRDHRNVRIKKPDYKVAYVQLVPHPRSLPLCLQHRSQLRTPRIPCIVAFASWGPGSKHDACSALCVVARAWAAVYVSARLISVAG

SEQ ID NO: 7496 - DNA, 675 bp, Homo sapiens
gggcgcgcggcacgggcgctggcgcgtgcggggggggcggcgcggcctccggaagcgagggggcgctgtgccaggcggcggccgtgcggggcgggcgcgctgctccttccgcctcgcggaccccggaagcgcgcgtggccgccatggcgcggaatgtggtgtaccccctgtaccggctgggtggcccacaacttcgggtgttccgaaccaacttcttcattcagctggtgcggcccggtgtggcccagcccgaggacaccgtgcagttccggatccccatggaaatgacaagggtggacctcaggaattacctcgagggcatctataacgtgcccgtggctgctgtgcggacacgggtgcagcatggctctaacaagagaagagatcacagaaacgtgaggatcaagaagccggactacaaggtcgcctacgtgcagctgccctcccagacacccagcaaggagcaaaatggccagggcagcaccctctgtttccggagcagctgcagcaaggggtggtcaacctgggggaccagggaccccagacccgcttggagtcctgtgggtggccgcattcccaggaaggctggatccggaggaccggccaacaggatcgctcaggatggacgtcttctactcaagtaagaccttggcagccttggtcggctccatagtc

SEQ ID NO: 7497 - protein, 166 aa, Homo sapiens
MARNVVYPLYRLGGPQLRVFRTNFFIQLVRPGVAQPEDTVQFRIPMEMTRVDLRNYLEGIYNVPVAAVRTRVQHGSNKRRDHRNVRIKKPDYKVAYVQLPSQTPSKEQNGQGSTLCFRSSCSKGWSTWGTRDPRPAWSPVGGRIPRKAGSGGPANRIAQDGRLLLK

SEQ ID NO: 7498 - DNA, 725 bp, Homo sapiens
gggcgcgcggcacgggcgctggcgcgtgcggggggggcggcgcggcctccggaagcgagggggcgctgtgccaggcggcggccgtgcggggcgggcgcgctgctccttccgcctcgcggaccccggaagcgcgcgtggccgccatggcgcggaatgtggtgtaccccctgtaccggctgggtggcccacaacttcgggtgttccgaaccaacttcttcattcagctggtgcggcccggtgtggcccagcccgaggacaccgtgcagttccggatccccatggaaatgacaagggtggacctcaggaattacctcgagggcatctataacgtgcccgtggctgctgtgcggacacgggtgcagcatggctctaacaagagaagagatcacagaaacgtgaggatcaagaagccggactacaaggtcgcctacgtgcagctgccctcccagacacccagcaaggagcaaaatggccagggcagcaccctctgtttccggagcagctgcagcaaggggtggtcaacctgggggaccagggaccccagacccgcttggagtcctgtgggtggccgcattcccaggaaggctggatccggaggaccggccaacaggatcgctcaggatggacgtcttctactcaagaacctcaggcccagagtccccaggagggagcagccggcaacacggtttccgctgtggagacggggcgtcctggcttgagttcac

SEQ ID NO: 7499 - protein, 191 aa, Homo sapiens
MARNVVYPLYRLGGPQLRVFRTNFFIQLVRPGVAQPEDTVQFRIPMEMTRVDLRNYLEGIYNVPVAAVRTRVQHGSNKRRDHRNVRIKKPDYKVAYVQLPSQTPSKEQNGQGSTLCFRSSCSKGWSTWGTRDPRPAWSPVGGRIPRKAGSGGPANRIAQDGRLLLKNLRPRVPRREQPATRFPLWRRGVLA

SEQ ID NO: 7500 - DNA, 657 bp, Homo sapiens
gggtggcggaggagccccccgccaggtaccccctgtaccggctgggtggcccacaacttcgggtgttccgaaccaacttcttcattcagctggtgcggcccggtgtggcccagcccgaggacaccgtgcagttccggatccccatggaaatgacaagggtggacctcaggaattacctcgagggcatctataacgtgcccgtggctgctgtgcggacacgggtgcagcatggctctaacaagagaagagatcacagaaacgtgaggatcaagaagccggactacaaggtcgcctacgtgcagctggcccatggacagaccttcacgttcccagatctgtttcccgagaaagacgagagccctgaaggcagcgctgccgacgacctctacagcatgctcgaggaggagaggcagcagaggcagagcagcgacccgcggcggggcggcgtccccagctggttcgggctgtgacggggtggccagcagggacgcgccccaggtgggcagctgtggcagagcagcgacccgcggcggggcggcatccccagctggttcgggccgtgacggggcggccagcagggacgcgccccaggtgggcagctgtggcagagcagtcccgacacctaaataaaagtcttgctgcaggagaaagagccgg

SEQ ID NO: 7501 - protein, 108 aa, Homo sapiens
MEMTRVDLRNYLEGIYNVPVAAVRTRVQHGSNKRRDHRNVRIKKPDYKVAYVQLAHGQTFTFPDLFPEKDESPEGSAADDLYSMLEEERQQRQSSDPRRGGVPSWFGL

SEQ ID NO: 7502 - DNA, 4753 bp, Homo sapiens
gtaccccctgtaccggctgggtggcccacaacttcgggtgttccgaaccaacttcttcattcagctgggctgtgagcaggcaggactgccctcccgaagcaggtgcagaacgagcatttggggaaggagaagacacgtgtccgcacctgcagctggtggggtgggagggtgagctgcctgcagggtggtggggggcagcccgggggggctcctgaggatgcacagctccctcccaaggccagggctctgggcactggggtccaggagagagttttgctctgcccatggccaacaggtaggtgcccagatgctgttctgtggtggagtgaggggaccttattccctggggcccagaggatgcccagctctgccaagggccttgaatgactccatcagaggaggtccggagccccagggccattccctgattcctgtcactttcccaggatgccctccctcaccgggtcggctcccagctccccttggagtgaggagggctggaccccactgagtccatcgcagaccccagctggccgggcgcatggcttcccgtctcctctctgggcttggtcctcttgtgtgaggggtcacggcccaggcacccatctcctctgggttgaggctggagggtgtctccgggaagcccctacgagtgcaaaaccttgctgttgatctcaagaccccgggcggagacgggaggaggagggtggaggaacgaagaccagattcctggaggacgattctgttgagcctccaattccctggactgattatttgcttaagtcagaactcccggccggatggggctggggccaggagatcagggagagggttctttcctggacaggtctgcttatcccaagggccaattagcagtagcagagcctcagcaggagcttgcttgtcctgggagcaggggtgagcttatctgctccgaggggtgccctgccgggcctcggggccttggagaggggccggctccgttctccgtctcctggaaagccaaggtgggaggtagcatctggaattagatgcggttgaggatgcttcctgactgggagggggttttgctcctccctgggaccacagcaggacatttgaagcaccaggatcccagcgggggcctgtggggaggcatggccatttctaaatgaggctctgggtacctggtggcccatggagcggggctctgggaattgcctcctgcgagcggccattggagggggaggtattacccccaccggtgtcctcagccagtccctcctggagtcctcagagccctcaacaggctctcacctggccctccgctgccagggctggaccagaggctcttcaggagcttgtgctcttccgcccccagagctccagcctggacgccttggaactggccgtcctgagctggacagccaagatgcgatggtggctgtgctgggctccagcccatggtggcctccaaggtggtgctggggccttaggggaaagggttgcttttcatggctggctgaggggatggcagagctgtcctccgttccgcctcctttacccatggatgcggccgcatgcgggtctccatcattgtcctatccttgaccatctggctaagactcagggacccacagcagccgctcccccactggctgtctgggaaaaggcccacattgccgggcacacaccagggtggccagggattggtcactgcctgaatgtccccggaccgatgcccgtgtgcccttgggcagccttcccctcggacaggctgtccaggctgggaaaccctgagccagagggattaagaagaaaggacagagtcgactgtccccttggctaatttgtgcttcatttagtgtaattttgctcagtggtcaaaacatagaggtgatgacaccgagggtccagacatgtcccatctccagggccaacctcctgcagatccccagccccgcccagccctgcctgctgcgccctgggcctgcctctgccctcacagccatcctgtacattcctgtgtctcagtggcgggggatagggggtgggggaagggtctccgatacaccagggggtgcagggaccctcagcatgggtgcccaggcagctctctatggaaatgcaggattgggtcaggaccccagagctgtgcagggccctctgtccccagcccaagtcctgagtccctcttgccagcctctgctgctccgcgtgtggtaggagctaccagtctggggtccgggctgggcgcattcatgatgcctgcctggggtctgagcaaatcctccccacggggtctgagcaagtcctccccacggggtctgagcaaatcctccccacggggtctgagcatgtcctccccacggggtctgagcaaatcctccccacggggtctgagcaagtcctccccatggggcctgagcaaatcctccccacggggtctgagcatgtcctccccacggggtctgagcaaatcctccccacggggtctgagcaaatcctccccatggggtctgagcaaatccttcctatgccgtctgagcaagtcctccccatgggttctgagcatgtcctccccacagggtctgagcaagtcctccccacggggtctgagcaagtcctccccacggggtctgagcatgtcctccccacggggtctgagcaagtcctccccacggggtctgatcatgtcctccccacggggtctgagcatgtcctctccacggggtctgagcaagtcctccccatggggtctgagcatgtcctccccacggggtctgagcaagtcctccccacggggtctatgtcctccccacggggtctgagcatgtcctccccatgggttctgagcaagtcctccccatggggtctgagcaagtcctccccacggggtctgagcaaatcctccccatggggtctgagcaaatccttcctatgccgtctgagcacatcctccccaagctgtgaccgagtgtccctcctgcaggtggaggatgttgctaggatgcaccttgaaggcaccccagcctcgccggagcgccccctcctcgtagcctggggtgtggctgggtggtctggggtcctgggtgccttgtgatgctggccccagggtccactcagcaccgtcctggtgtcgtcatcagctggaggcttcccggggcctgtgctgggggtggagagcagggagaggcagcagggttctcctcagggtggggttgctgggaagcaccatcccacctgtcagactggccttgactgtagacaccccaggtgacctggaaggacagacggaccccaggtgatgagaaaggaccagagtctgacctctcacccctcctaagctctgaactcccgttggcttgcctgacctccaagtcctcctggggctgaaccctctacagatgcccctcctgggccctggggtgggcccggtttagctctccattgtggctgaaacccccagggcttcagtgctggcttgaagagggggtggggctccccaggcgtggggattggcagttttttcctcccctcttcccaaactttcagactggaccacttaagaataatgaggtccaggtggttccgcttgagcctggatcctcactggctgtgggactgagcttcccctgccggtcccacctcccaccgggagcagctaatgacagccagaggctggaaggtgaagctcccctcggctgtcaggcgggccgcagggcaggggctgggcaggccaagggcgccactctcctgcccaggccagggcacccgatcactgcaccacaccccttgtggccgtctgtccagccagggccctgctgcaggtgcttcccgtgggactgtagggagaacaatcaagacttctgcctccttggtcgagcagggctgcctccccatctcatctactggcaaggaggctgggcaccttcagggagcttcagtttgggaagagggaggaggtctgaggtggatggtggcgatggctgcgcagcagtgagaatggactgagtgccactgatgtgtgtgctccatggctccgtggctccgtggctccgtggctcagtggctcaatggctataatggctagttttgttacatattttcaccataataaaacaaaacatgtccaaggtgctacaaggagggaggagcccctggagcacccgcctgccatctcccatctgccaggcagcatccctccactggctctctgggaggggttccaggcctccagcctccctgtggcccccatctgcctccaggagatttgttccctctctcctgccccgaaaccctcgaggcagccctgctcttggtcactgcagaggaagtggcccaggcttggcccaggccagctgtggcctctggaggcaagatgtggggactcacagtgttcgaaggccacacccccccgagcacatgggctccagtgcctctgaggcaaagagcaggcagcaccgtgcgcacagcagtgggagacacagcacagccaccagggcagcccccaggcagacggcgggcctagagagggcgggatgacacaagaaaggttctcctttggagacggcgaggtcaggcaggtgggagagggttcacggtgcttgaggtgcagagagaggatggtggaatggaaaacgtagggtgacttgtcggggacaggcccagggccacaactcgggcaggcctattgcccgagttttgggtcccatcctggcaggcaggggagagaattctgaattttttaatgaaacggatagttgagggctgg

SEQ ID NO: 7503 - protein, 303 aa, Homo sapiens
MSHLQGQPPADPQPRPALPAAPWACLCPHSHPVHSCVSVAGDRGWGKGLRYTRGCRDPQHGCPGSSLWKCRIGSGPQSCAGPSVPSPSPESLLPASAAPRVVGATSLGSGLGAFMMPAWGLSKSSPRGLSKSSPRGLSKSSPRGLSMSSPRGLSKSSPRGLSKSSPWGLSKSSPRGLSMSSPRGLSKSSPRGLSKSSPWGLSKSFLCRLSKSSPWVLSMSSPQGLSKSSPRGLSKSSPRGLSMSSPRGLSKSSPRGLIMSSPRGLSMSSPRGLSKSSPWGLSMSSPRGLSKSSPRGLCPPHGV

SEQ ID NO: 7504 - DNA, 493 bp, Homo sapiens
tagcaagttaagatggcttcttgtatttgcttaggtccccaaggagcagtatcccctccttctcgtgaacccgagccacatgctgtggcctgggctggggcttggctgacacggacatattctgaactctcagcagaagatgcccatggacagaccttcacgttcccagatctgtttcccgagaaagacgagagccctgaaggcagcgctgccgacgacctctacagcatgctcgaggaggagaggcagcagaggcagagcagcgacccgcggcggggcggcgtccccagctggttcgggctgtgacggggtggccagcagggacgcgccccaggtgggcagctgtggcagagcagcgacccgcggcggggcggcatccccagctggttcgggccgtgacggggcggccagcagggacgcgccccaggtgggcagctgtggcagagcagtcccgacacctaaataaaagtcttgctgcaggagaaagagccgg

SEQ ID NO: 7505 - protein, 108 aa, Homo sapiens
MPMDRPSRSQICFPRKTRALKAALPTTSTACSRRRGSRGRAATRGGAASPAGSGCDGVASRDAPQVGSCGRAATRGGAASPAGSGRDGAASRDAPQVGSCGRAVPTPK

SEQ ID NO: 7506 - DNA, 1904 bp, Homo sapiens
ggtggcagcatggcctgggggtcctggcaccgctgctcctctgcccaccctaacttcccggcatggcggctgccccctctgagcgtccccaaccaaactgcaggggatatgaagcaagctggacttggggagacatctctgctcgagtgcacgttggcctgatgacgactgctcttgggttcacgggttccaggctctgcccgggagcctcatgcaaactggtcccgttctacagacgaggaaactgaggcacagagtgattacggctgtccctgagctcctgcagccagtaagtgtctctgaggatgaactgccatgtgcccggcggggatgccgtccctggcccttgctgagtgcctctgggacgaggtcagctgagcctgccatcctaactcagacaccatctcactctccaagtcccttctcggcccagcaaattctcacctccagaggccaggtctgccccgcaggtcttaggaaatacagccctacttccatccagcacaccaacccaaggaagtgcctcggagccctggggcccgaggggggcctggccttggtctcacggcggcagctccacctggagaggagtgaactcaagccaggacgccccgtctccacagcggaaaccgtgttgccggctgctccctcctggggactctgggcctgaggttcctgtgggagttggggggatagctgagtcctatggaggtgcccctctcctccccgcccagtggagcttggggtggggacaggcgaagacagggtgagaagcacggggcattccccctccacacagcgctgagaaagtaagggagcatccagaaaacggtgcccacttccgcgtcaggcggatatcacgggcaccagctccaggtgaccctagcccagccagagaacaaggaccaggttgtgccgcaaagcccgtgtccgctccctcccgcctgggaccactgtggcgaggggaagggagcgtggtggccctctcctgactcctgaggcctgaagtccaagctcccggccctcaggcaggccagggtctagacaccgctgccccaaacacaccccccagtccccgcccgcaggcttcctgcaggatcccccagtgcacctgggggctgaggagagtgagcagggcgcaaagaagcttcgtcgggagggcggtccccacccgccttggacccccggggatagtgtcctggggcctgggctcagatgcaccctgggaggaatggtgcggaggctgttttttgctccaagaggacattgcctcagcagagggctgccgagctgggaggacccacagtgcaaggccgcagaaccccctaggaagcctcagagccttcaggttccgggctgaggctgtgggcgtggacccttgtgcaaaccccactggaagaaaaaccttacagctcaggaggaggaggggccccacccgctcccagagcccgtaaacgaggggtggtgcccacatgaggcctggggaagggctggggctgggacaccccctcaccacccccagataccccaggcagcccctccctccacagagagacccactgggcctgaccctgccctgggcacagggtcgagccagggacggcccgtgggagaaagacggcttcatgggccgctggccgggccaggtgcgtccttccccagttctaggtggcaaatggggtggggccagagccttctggctagggaagacactggcctggttggtgtggcaggggcagcgaaggagggtcaaaggccactctggcctggaagagtccccagccacctggacgggggtagccaggcctggtccctgcccccactctccaaggggtcggggcagccgggcagagccagtaagtgtttgttttcagatgacatttgtaaagaaaaacagcctccca

SEQ ID NO: 7507 - protein, 152 aa, Homo sapiens
MQTGPVLQTRKLRHRVITAVPELLQPVSVSEDELPCARRGCRPWPLLSASGTRSAEPAILTQTPSHSPSPFSAQQILTSRGQVCPAGLRKYSPTSIQHTNPRKCLGALGPEGGLALVSRRQLHLERSELKPGRPVSTAETVLPAAPSWGLWA

SEQ ID NO: 7508 - DNA, 2910 bp, Homo sapiens
atgggaggcagggcgggggcggccaagcctctccagccgctcccttcccgcttgccccacagacgggcctccctggatggtcctgggtcagcacacacgctcccaggcgcttccttccccaggagacagtccccagcccctggcggcccagatcctcctgctcaggccgacgcatcccacctgggccccagaaacctctttggaaagggacagtcacctcagagtggcaagcacttaaaagagacccccaacaggccggtgtgtcgtggtggcaggcagggtgtgtctggagagaagggggacgtgtccccagctgggcctgggggcggctccgtgggaaagtcccacctggtcccagccccgggtctccagccttcagactccttgggggtctctgtggcctggcagaggtcggtggcccctcagtggaggtgaggcctctcctgggtcaccaccgcacaccggcctgctgggaagctggggttctgggccacagccggccctggacgtggaggggggcatcaggccagaccccccaggggctcacagggctctgggaggccctggcaaccccagggtgcccccaagccctcagaagggttgtccctacttggaggggaccacacagccaggtgggcaggaacaggcaccacggcggcccttccctgtccaccctctcaccagtggcccgcagtgcagtccaggaagcaccggacagagcacggggcagggaggggaggcccgtactggcttcacagaggtctgggaggggctagcccctgtgcagacagacccctgaagcctagagccgccggcccagctgaggtccttcccaggggccattctgggacccctgaccccatgcacctgtgtcacagggctatgagcgcccccagccccaggacctccacgtttctctctagagggaagaggaggaggacggcaggcctgctggccccacacttactggttggggacgctcagagggggcagccgccatgccgggaagttagggtgggcagaggagcagcggtgccaggacccccaggccatgctgccaccccggaccctgaacaccctgccctgggtccatatgctcagagctggctacatatcctgtggctgcccatgacacatagctcccccaggcagggccggaccccgggcacctctttgcctccagggccggccccactctgttggaggtcagccggttccgaggcctccaagccgcctttctacttctcgattccagggcctggtctccactccctctgggctttggggtgcatgctgcagtgcagcctccccgcgccccggcctccatgcaccctgctcgtgctgcctcagaggcttggcatctcccccatcttccagccaggcagccagttttctgcaacgtggggcccacggtcagcgtcccccacagccctgccagcccttctccccgggggtccgccctgcacccccttcccaggagcttgctctgcacccactgctgggcctcctggcctaggggcttggcacgtgcctgtgagcagaggcgctgggcaggaggaggaggaggagcctgcagtgcctggcgcccgtgtgtgtttactggtccggccccagccccgcgccgctccccgcggacccggcctcccgcctgtgtccagccaggtgttgggtgatggagcggggctccctaaggacaaggagcacagtgtctgctttctttgcaagcacagtgctgacaaggaacagaatacccacagcgactgcttccaggaaacggctgcagggcgggcgggagcctctgcgagagcagccccttcccagcaagccggcctgcaggtgggcttccaggaaggggcccccgctggcttccctcagccctggaagggggccaacggtgtcaccaggagcaggccagggagcgggggaacaccaccccgctacagggccacgatcacacacacaccccgcggagcatctccgggccggacaggacccacgccctccacagcccggaaaggcgggttaactggtcagcatgcagagacccaccaagtggagaccccgctcccaggcacagacgcacagctgtggatgcacgtcctcggaaatcgggttgggccaaagataaacacacattccaacctggcaggtcgctcagagctaggggctcgggcgggctcccagcccccgccccggggtgcggcaggaggctccgaggctgagcacctgctgcggggcccccgggcctgtggctccccgcctgcccgcctcaccctgaggttcagccccctgaacgctgcccccaccacctccctgtttcagggcctgtggcccagaccccctccagcactcaggggctgccctagggacaccaccccaggaactgccctaggaagcccgttccgctgcagggagcagagaaacctgggctgcccagaggtaggcgctgcccctgagtacacgtcctgctctcagggggcagccagcgtgggcacagccatgggcagtgctgggagatggtgggggccaccaagaggcctgtgtcccttccccagcgggtgtgaggaggaacagccctgtccccatacagctcccaggtggaaactccagagcaagcgtgtcattcatacaccccgggcccagagatgtggacgtgtccagcacgcctgttctctccaagacctctgccccaaggccacctgcccactgagaagcccaccggctcccccacaaccccctggctccttgtgcggggccgtccctccggcgtggccccggctcccacccacagcaaaaggggagcaggaacgggactggcgcggggttcgtgcccctgtcggggtggggtcgcccagagcaccttgtgggcctcccagagcggccatggccagctctaccccagtcacctag

SEQ ID NO: 7509 - protein, 682 aa, Homo sapiens [sequence omitted]

SEQ ID NO: 7510 - DNA, 1023 bp, Homo sapiens
agtgcctggcgcccgtgtgtgtttactggtccggccccagccccgcgccgctccccgcggacccggcctcccgcctgtgtccagccaggtgttgggtgatggagcggggctccctaaggacaaggagcacagtgtctgctttctttgcaagcacagtgctgacaaggaacagaatacccacagcgactgcttccaggaaacggctgcagggcgggcgggagcctctgcgagagcagccccttcccagcaagccggcctgcagagttgggattttctgtctccattcggtggtataccaagtgcctgcctcccacacccagctgcccctaatccctgcctgaaaacgtgctcctgggtcacggaattcatgctgagacacagccacacacagccaggctcaggggtccaccctccagggaacaccaccccgctacagggccacgatcacacacacaccccgcggagcatctccgggccggacaggacccacgccctccacagcccggaaaggcgggttaactggtcagcatgcagagacccaccaagtggagaccccgctcccaggcacagacgcacagctgtggatgcacgtcctcggtgacaagctcccaggtggaaactccagagcaagcgtgtcattcatacaccccgggcccagagatgtggacgtgtccagcacgcctgttctctccaagtgaccaggaggagacaatccctaggagctgacacaggtgacgaaggcccgaggtggcccgccttttcccccggccccattcccatgtgtccttccccaggcagggatttgaagtgggcagagtcttccatgttctccaggagaggttttctgggtgcccctctccccctccctacggttcccctgccccgccaccctgggcacccctggggctgcctgccgcaccctgcagccgccacctggggaagccggcttttatctcctgagccctgctttgtaaacctcctgcagagttggatgtttataataaaggccgtttatagacctaa

SEQ ID NO: 7511 - protein, 80 aa, Homo sapiens
MERGSLRTRSTVSAFFASTVLTRNRIPTATASRKRLQGGREPLREQPLPSKPACRVGIFCLHSVVYQVPASHTQLPLIPA

SEQ ID NO: 7512 - DNA, 634 bp, Homo sapiens
agcgggtctgtttctttacttcctccacggagtcggcacactatggctgccctctgggctcccagaacccaccccgcaccggcgactccatcttcatggccaccccctgcggcggacggttgaccaccagccaccacatcatcccagagctgagctcctccagcgggatgacgccgtccccaccacctccctcttcttctttttcatccttctgtctctttgtttctgagctttcctgtctttccttttttctgagagattcaaagcctccacgactctgtttcccccgtcccttctgaatttaatttgcactaagtcatttgcactggttggagttgtggagacggccttgagtctcagtacgagtgtgcgtgagtgtgagccaccttggcaagtgcctgtgcagggcccggccgccctccatctgggccgggtgactgggcgccggctgtgtgcccgaggcctcaccctgccctcgcctagtctggaagctccgaccgacatcacggagcagccttcaagcattccattacgccccatctcgctctgtgcccctccccaccagggcttcagcaggagccctggactcatcatcaataaacactgttacagcaatttgtctcgaggactctgg

SEQ ID NO: 7513 - protein, 67 aa, Homo sapiens
MATPCGGRLTTSHHIIPELSSSSGMTPSPPPPSSSFSSFCLFVSELSCLSFFLRDSKPPRLCFPRPF

SEQ ID NO: 7514 - DNA, 750 bp, Homo sapiens
acaccttaggctggtggggctgcggcaagaagcgggtctgtttctttacttcctccacggagtcggcacactatggctgccctctgggctcccagaacccacaacatgaaaggtgaagctagaggaaccagacctcatcagcccaacatcaaagacaccatcggaacagcagcgcccgcagcacccaccccgcaccggcgactccatcttcatggccaccccctgcggcggacggttgaccaccagccaccacatcatcccagagctgagctcctccagcgggatgacgccgtccccaccacctccctcttcttctttttcatccttctgtctctttgtttctgagctttcctgtctttccttttttctgagagattcaaagcctccacgactctgtttcccccgtcccttctgaatttaatttgcactaagtcatttgcactggttggagttgtggagacggccttgagtctcagtacgagtgtgcgtgagtgtgagccaccttggcaagtgcctgtgcagggcccggccgccctccatctgggccgggtgactgggcgccggctgtgtgcccgaggcctcaccctgccctcgcctagtctggaagctccgaccgacatcacggagcagccttcaagcattccattacgccccatctcgctctgtgcccctccccaccagggcttcagcaggagccctggactcatcatcaataaacactgttacagcaatttgtctcgaggactctgg

SEQ ID NO: 7515 - protein, 90 aa, Homo sapiens
MAALWAPRTHNMKGEARGTRPHQPNIKDTIGTAAPAAPTPHRRLHLHGHPLRRTVDHQPPHHPRAELLQRDDAVPTTSLFFFFILLSLCF

SEQ ID NO: 7516 - DNA, 873 bp, Homo sapiens
acaccttaggctggtggggctgcggcaagaagcgggtctgtttctttacttcctccacggagtcggcacactatggctgccctctgggctcccagaacccacaacatgaaagaaatggtgctacccagctcaagcctgggcctttgaatccggacacaaaaccctctagcttggaaatgaatatgctgcactttacaaccactgcactacctgactcaggaatcggctctggaaggtgaagctagaggaaccagacctcatcagcccaacatcaaagacaccatcggaacagcagcgcccgcagcacccaccccgcaccggcgactccatcttcatggccaccccctgcggcggacggttgaccaccagccaccacatcatcccagagctgagctcctccagcgggatgacgccgtccccaccacctccctcttcttctttttcatccttctgtctctttgtttctgagctttcctgtctttccttttttctgagagattcaaagcctccacgactctgtttcccccgtcccttctgaatttaatttgcactaagtcatttgcactggttggagttgtggagacggccttgagtctcagtacgagtgtgcgtgagtgtgagccaccttggcaagtgcctgtgcagggcccggccgccctccatctgggccgggtgactgggcgccggctgtgtgcccgaggcctcaccctgccctcgcctagtctggaagctccgaccgacatcacggagcagccttcaagcattccattacgccccatctcgctctgtgcccctccccaccagggcttcagcaggagccctggactcatcatcaataaacactgttacagcaatttgtctcgaggactctgg

SEQ ID NO: 7517 - protein, 67 aa, Homo sapiens; identical to SEQ ID NO: 7513

SEQ ID NO: 7518 - DNA, 953 bp, Homo sapiens
acaccttaggctggtggggctgcggcaagaagcgggtctgtttctttacttcctccacggagtcggcacactatggctgccctctgggctcccagaacccacaacatgaaaggtgaggggcttcctgccacacttggggtggggggcacgcgagaggagctgagtgggacctcactccttccccatccacagaaatggtgctacccagctcaagcctgggcctttgaatccggacacaaaaccctctagcttggaaatgaatatgctgcactttacaaccactgcactacctgactcaggaatcggctctggaaggtgaagctagaggaaccagacctcatcagcccaacatcaaagacaccatcggaacagcagcgcccgcagcacccaccccgcaccggcgactccatcttcatggccaccccctgcggcggacggttgaccaccagccaccacatcatcccagagctgagctcctccagcgggatgacgccgtccccaccacctccctcttcttctttttcatccttctgtctctttgtttctgagctttcctgtctttccttttttctgagagattcaaagcctccacgactctgtttcccccgtcccttctgaatttaatttgcactaagtcatttgcactggttggagttgtggagacggccttgagtctcagtacgagtgtgcgtgagtgtgagccaccttggcaagtgcctgtgcagggcccggccgccctccatctgggccgggtgactgggcgccggctgtgtgcccgaggcctcaccctgccctcgcctagtctggaagctccgaccgacatcacggagcagccttcaagcattccattacgccccatctcgctctgtgcccctccccaccagggcttcagcaggagccctggactcatcatcaataaacactgttacagcaatttgtctcgaggactctgg

SEQ ID NO: 7519 - protein, 67 aa, Homo sapiens; identical to SEQ ID NO: 7513

SEQ ID NO: 7520 - DNA, 885 bp, Homo sapiens
caggtctccagctggggtggacgtgcccaccagctgccgaaggccaagacgccaggtccggtggacgtgacaagcaggacatgacatggtccggtgtgacggcgaggacagaggaggcgcgtccggccttcctgaacaccttaggctggtggggctgcggcaagaagcgggtctgtttctttacttcctccacggagtcggcacactatggctgccctctgggctcccagaacccacaacatgaaaggtgaagctagaggaaccagacctcatcagcccaacatcaaagacaccatcggaacagcagcgcccgcagcacccaccccgcaccggcgactccatcttcatggccaccccctgcggcggacggttgaccaccagccaccacatcatcccagagctgagctcctccagcgggatgacgccgtccccaccacctccctcttcttctttttcatccttctgtctctttgtttctgagctttcctgtctttccttttttctgagagattcaaagcctccacgactctgtttcccccgtcccttctgaatttaatttgcactaagtcatttgcactggttggagttgtggagacggccttgagtctcagtacgagtgtgcgtgagtgtgagccaccttggcaagtgcctgtgcagggcccggccgccctccatctgggccgggtgactgggcgccggctgtgtgcccgaggcctcaccctgccctcgcctagtctggaagctccgaccgacatcacggagcagccttcaagcattccattacgccccatctcgctctgtgcccctccccaccagggcttcagcaggagccctggactcatcatcaataaacactgttacagcaatttgtctcgaggactctgg

SEQ ID NO: 7521 - protein, 90 aa, Homo sapiens; identical to SEQ ID NO: 7515

SEQ ID NO: 7522 - DNA, 1169 bp, Homo sapiens
caggtctccagctggggtggacgtgcccaccagctgccgaaggccaagacgccaggtccggtggacgtgacaagcaggacatgacatggtccggtgtgacggcgaggacagaggaggcgcgtccggccttcctgaacaccttaggctggtggggctgcggcaagaagcgggtctgtttctttacttcctccacggagtcggcacactatggctgccctctgggctcccagaacccacaacatgaaaggtgaggggcttcctgccacacttggggtggggggcacgcgagaggagctgagtgggacctcactccttccccatccacagaaatggtgctacccagctcaagcctgggcctttgaatccggacacaaaaccctctagcttggaaatgaatatgctgcactttacaaccactgcactacctgactcaggaatcggctctggaaggtgagcaccagcgctccttccggaagcctccaggcccccgagcaccctgcccccatcccacccacgtgtcgctatctctaggtgaagctagaggaaccagacctcatcagcccaacatcaaagacaccatcggaacagcagcgcccgcagcacccaccccgcaccggcgactccatcttcatggccaccccctgcggcggacggttgaccaccagccaccacatcatcccagagctgagctcctccagcgggatgacgccgtccccaccacctccctcttcttctttttcatccttctgtctctttgtttctgagctttcctgtctttccttttttctgagagattcaaagcctccacgactctgtttcccccgtcccttctgaatttaatttgcactaagtcatttgcactggttggagttgtggagacggccttgagtctcagtacgagtgtgcgtgagtgtgagccaccttggcaagtgcctgtgcagggcccggccgccctccatctgggccgggtgactgggcgccggctgtgtgcccgaggcctcaccctgccctcgcctagtctggaagctccgaccgacatcacggagcagccttcaagcattccattacgccccatctcgctctgtgcccctccccaccagggcttcagcaggagccctggactcatcatcaataaacactgttacagcaatttgtctcgaggactctgg

SEQ ID NO: 7523 - protein, 56 aa, Homo sapiens
MTWSGVTARTEEARPAFLNTLGWWGCGKKRVCFFTSSTESAHYGCPLGSQNPQHER

SEQ ID NO: 7524 - DNA, 1055 bp, Homo sapiens
acaaccaacacgttctccccacacgactctctcgttctccccacagccaggtctccagctggggtggacgtgcccaccagctgccgaaggccaagacgccaggtccggtggacgtgacaagcaggacatgacatggtccggtgtgacggcgaggacagaggaggcgcgtccggccttcctgaacaccttaggctggtggggctgcggcaagaagcgggtctgtttctttacttcctccacggagtcggcacactatggctgccctctgggctcccagaacccacaacatgaaagaaatggtgctacccagctcaagcctgggcctttgaatccggacacaaaaccctctagcttggaaatgaatatgctgcactttacaaccactgcactacctgactcaggaatcggctctggaaggtgaagctagaggaaccagacctcatcagcccaacatcaaagacaccatcggaacagcagcgcccgcagcacccaccccgcaccggcgactccatcttcatggccaccccctgcggcggacggttgaccaccagccaccacatcatcccagagctgagctcctccagcgggatgacgccgtccccaccacctccctcttcttctttttcatccttctgtctctttgtttctgagctttcctgtctttccttttttctgagagattcaaagcctccacgactctgtttcccccgtcccttctgaatttaatttgcactaagtcatttgcactggttggagttgtggagacggccttgagtctcagtacgagtgtgcgtgagtgtgagccaccttggcaagtgcctgtgcagggcccggccgccctccatctgggccgggtgactgggcgccggctgtgtgcccgaggcctcaccctgccctcgcctagtctggaagctccgaccgacatcacggagcagccttcaagcattccattacgccccatctcgctctgtgcccctccccaccagggcttcagcaggagccctggactcatcatcaataaacactgttacagcaatttgtctcgaggactctgg

SEQ ID NO: 7525 - protein, 97 aa, Homo sapiens
MTWSGVTARTEEARPAFLNTLGWWGCGKKRVCFFTSSTESAHYGCPLGSQNPQHERNGATQLKPGPLNPDTKPSSLEMNMLHFTTTALPDSGIGSGR

SEQ ID NO: 7526 - DNA, 1697 bp, Homo sapiens
gagtaggcgcccaggcatcgtgcagacagggcgacatcagctggggacgatgggcctgagctagggctggaaagaagggggagccaggcattcatcccggtcacttttggttacaggacgtggcagctggttggacgaggggagctggtgggcagggtttgatcccagggcctgggcaacggaggtgtagctggcagcagcgggcaggtgaggaccccatctgccgggcaggtgagtcccttccctccccaggcctcgcttccccagccttctgaaagaaggaggtttaggggatcgagggctggcggggagaagcagacaccctcccagcagaggggcaggatgggggcaggagagttagcaaaggtgacatcttctcggggggagccgagactgcgcaaggctggggggttatgggcccgttccaggcagaaagagcaagagggcagggagggagcacaggggtggccagcgtagggtccagcacgtggggtggtaccccaggcctgggtcagacagggacatggcaggggacacaggacagaggggtccccagctgccacctcacccaccgcaattcatttagtagcaggcacaggggcagctccggcacggctttctcaggcctatgccggagcctcgagggctggagagcgggaagacaggcagtgctcggggagttgcagcaggacgtcaccaggagggcgaagcggccacgggaggggggccccgggacattgcgcagcaaggaggctgcaggggctcggcctgcgggcgccggtcccacgaggcactgcggcccagggtctggtgcggagagggcccacagtggacttggtgacgctgtatgccctcaccgctcagcccctggggctggcttggcagacagtacagcatccaggggagtcaagggcatggggcgagaccagactaggcgaggcgggcggggcggagtgaatgagctctcaggagggaggatggtgcaggcaggggtgaggagcgcagcgggcggcgagcgggaggcactggcctccagagcccgtggccaaggcgggcctcgcgggcggcgacggagccgggatcggtgccccaacatcaaagacaccatcggaacagcagcgcccgcagcacccaccccgcaccggcgactccatcttcatggccaccccctgcggcggacggttgaccaccagccaccacatcatcccagagctgagctcctccagcgggatgacgccgtccccaccacctccctcttcttctttttcatccttctgtctctttgtttctgagctttcctgtctttccttttttctgagagattcaaagcctccacgactctgtttcccccgtcccttctgaatttaatttgcactaagtcatttgcactggttggagttgtggagacggccttgagtctcagtacgagtgtgcgtgagtgtgagccaccttggcaagtgcctgtgcagggcccggccgccctccatctgggccgggtgactgggcgccggctgtgtgcccgaggcctcaccctgccctcgcctagtctggaagctccgaccgacatcacggagcagccttcaagcattccattacgccccatctcgctctgtgcccctccccaccagggcttcagcaggagccctggactcatcatcaataaacactgttacagcaatttgtctcgaggactctgg

SEQ ID NO: 7527 - protein, 292 aa, Homo sapiens
MGPFQAERARGQGGSTGVASVGSSTWGGTPGLGQTGTWQGTQDRGVPSCHLTHRNSFSSRHRGSSGTAFSGLCRSLEGWRAGRQAVLGELQQDVTRRAKRPREGGPGTLRSKEAAGARPAGAGPTRHCGPGSGAERAHSGLGDAVCPHRSAPGAGLADSTASRGVKGMGRDQTRRGGRGGVNELSGGRMVQAGVRSAAGGEREALASRARGQGGPRGRRRSRDRCPNIKDTIGTAAPAAPTPHRRLHLHGHPLRRTVDHQPPHHPRAELLQRDDAVPTTSLFFFFILLSLCF

SEQ ID NO: 7528 - DNA, 2136 bp, Homo sapiens
gggaagatggggtgctggaggagagcttgtgggagccaaggagcaccttggacatctggagtctggcaggagtgatgacgggtggaggggctagctcgaggcagggctggtggggcctgaggccagtgaggagtgtggagtaggcgcccaggcatcgtgcagacagggcgacatcagctggggacgatgggcctgagctagggctggaaagaagggggagccaggcattcatcccggtcacttttggttacaggacgtggcagctggttggacgaggggagctggtgggcagggtttgatcccagggcctgggcaacggaggtgtagctggcagcagcgggcaggtgaggaccccatctgccgggcaggtgagtcccttccctccccaggcctcgcttccccagccttctgaaagaaggaggtttaggggatcgagggctggcggggagaagcagacaccctcccagcagaggggcaggatgggggcaggagagttagcaaaggtgacatcttctcggggggagccgagactgcgcaaggctggggggttatgggcccgttccaggcagaaagagcaagagggcagggagggagcacaggggtggccagcgtagggtccagcacgtggggtggtaccccaggcctgggtcagacagggacatggcaggggacacaggacagaggggtccccagctgccacctcacccaccgcaattcatttagtagcaggcacaggggcagctccggcacggctttctcaggcctatgccggagcctcgagggctggagagcgggaagacaggcagtgctcggggagttgcagcaggacgtcaccaggagggcgaagcggccacgggaggggggccccgggacattgcgcagcaaggaggctgcaggggctcggcctgcgggcgccggtcccacgaggcactgcggcccagggtctggtgcggagagggcccacagtggacttggtgacgctgtatgccctcaccgctcagcccctggggctggcttggcagacagtacagcatccaggggagtcaagggcatggggcgagaccagactaggcgaggcgggcggggcggagtgaatgagctctcaggagggaggatggtgcaggcaggggtgaggagcgcagcgggcggcgagcgggaggcactggcctccagagcccgtggccaaggcgggcctcgcgggcggcgacggagccgggatcggtgcctcagcgttcgggctggagacgaggccaggtctccagctggggtggacgtgcccaccagctgccgaaggccaagacgccaggtccggtggacgtgacaagcaggacatgacatggtccggtgtgacggcgaggacagaggaggcgcgtccggccttcctgaacaccttaggctggtggggctgcggcaagaagcgggtctgtttctttacttcctccacggagtcggcacactatggctgccctctgggctcccagaacccacaacatgaaaggtgaagctagaggaaccagacctcatcagcccaacatcaaagacaccatcggaacagcagcgcccgcagcacccaccccgcaccggcgactccatcttcatggccaccccctgcggcggacggttgaccaccagccaccacatcatcccagagctgagctcctccagcgggatgacgccgtccccaccacctccctcttcttctttttcatccttctgtctctttgtttctgagctttcctgtctttccttttttctgagagattcaaagcctccacgactctgtttcccccgtcccttctgaatttaatttgcactaagtcatttgcactggttggagttgtggagacggccttgagtctcagtacgagtgtgcgtgagtgtgagccaccttggcaagtgcctgtgcagggcccggccgccctccatctgggccgggtgactgggcgccggctgtgtgcccgaggcctcaccctgccctcgcctagtctggaagctccgaccgacatcacggagcagccttcaagcattccattacgccccatctcgctctgtgcccctccccaccagggcttcagcaggagccctggactcatcatcaataaacactgttacagcaatttgtctcgaggactctgg

SEQ ID NO: 7529 - protein, 256 aa, Homo sapiens
MGPFQAERARGQGGSTGVASVGSSTWGGTPGLGQTGTWQGTQDRGVPSCHLTHRNSFSSRHRGSSGTAFSGLCRSLEGWRAGRQAVLGELQQDVTRRAKRPREGGPGTLRSKEAAGARPAGAGPTRHCGPGSGAERAHSGLGDAVCPHRSAPGAGLADSTASRGVKGMGRDQTRRGGRGGVNELSGGRMVQAGVRSAAGGEREALASRARGQGGPRGRRRSRDRCLSVRAGDEARSPAGVDVPTSCRRPRRQVRWT

SEQ ID NO: 7530 - DNA, 2340 bp, Homo sapiens
gggaagatggggtgctggaggagagcttgtgggagccaaggagcaccttggacatctggagtctggcaggagtgatgacgggtggaggggctagctcgaggcagggctggtggggcctgaggccagtgaggagtgtggagtaggcgcccaggcatcgtgcagacagggcgacatcagctggggacgatgggcctgagctagggctggaaagaagggggagccaggcattcatcccggtcacttttggttacaggacgtggcagctggttggacgaggggagctggtgggcagggtttgatcccagggcctgggcaacggaggtgtagctggcagcagcgggcaggtgaggaccccatctgccgggcaggtgagtcccttccctccccaggcctcgcttccccagccttctgaaagaaggaggtttaggggatcgagggctggcggggagaagcagacaccctcccagcagaggggcaggatgggggcaggagagttagcaaaggtgacatcttctcggggggagccgagactgcgcaaggctggggggttatgggcccgttccaggcagaaagagcaagagggcagggagggagcacaggggtggccagcgtagggtccagcacgtggggtggtaccccaggcctgggtcagacagggacatggcaggggacacaggacagaggggtccccagctgccacctcacccaccgcaattcatttagtagcaggcacaggggcagctccggcacggctttctcaggcctatgccggagcctcgagggctggagagcgggaagacaggcagtgctcggggagttgcagcaggacgtcaccaggagggcgaagcggccacgggaggggggccccgggacattgcgcagcaaggaggctgcaggggctcggcctgcgggcgccggtcccacgaggcactgcggcccagggtctggtgcggagagggcccacagtggacttggtgacgctgtatgccctcaccgctcagcccctggggctggcttggcagacagtacagcatccaggggagtcaagggcatggggcgagaccagactaggcgaggcgggcggggcggagtgaatgagctctcaggagggaggatggtgcaggcaggggtgaggagcgcagcgggcggcgagcgggaggcactggcctccagagcccgtggccaaggcgggcctcgcgggcggcgacggagccgggatcggtgcctcagcgttcgggctggagacgaggccaggtctccagctggggtggacgtgcccaccagctgccgaaggccaagacgccaggtccggtggacgtgacaagcaggacatgacatggtccggtgtgacggcgaggacagaggaggcgcgtccggccttcctgaacaccttaggctggtggggctgcggcaagaagcgggtctgtttctttacttcctccacggagtcggcacactatggctgccctctgggctcccagaacccacaacatgaaagaaatggtgctacccagctcaagcctgggcctttgaatccggacacaaaaccctctagcttggaaatgaatatgctgcactttacaaccactgcactacctgactcaggaatcggctctggaaggtgagcaccagcgctccttccggaagcctccaggcccccgagcaccctgcccccatcccacccacgtgtcgctatctctaggtgaagctagaggaaccagacctcatcagcccaacatcaaagacaccatcggaacagcagcgcccgcagcacccaccccgcaccggcgactccatcttcatggccaccccctgcggcggacggttgaccaccagccaccacatcatcccagagctgagctcctccagcgggatgacgccgtccccaccacctccctcttcttctttttcatccttctgtctctttgtttctgagctttcctgtctttccttttttctgagagattcaaagcctccacgactctgtttcccccgtcccttctgaatttaatttgcactaagtcatttgcactggttggagttgtggagacggccttgagtctcagtacgagtgtgcgtgagtgtgagccaccttggcaagtgcctgtgcagggcccggccgccctccatctgggccgggtgactgggcgccggctgtgtgcccgaggcctcaccctgccctcgcctagtctggaagctccgaccgacatcacggagcagccttcaagcattccattacgccccatctcgctctgtgcccctccccaccagggcttcagcaggagccctggactcatcatcaataaacactgttacagcaatttgtctcgaggactctgg

SEQ ID NO: 7531 - protein, 256 aa, Homo sapiens; identical to SEQ ID NO: 7529

SEQ ID NO: 7532 - DNA, 654 bp, Homo sapiens
gaaactggggaagtggggaaccgaggggcaaccagacctcatcagcccaacatcaaagacaccatcggaacagcagcgcccgcagcacccaccccgcaccggcgactccatcttcatggccaccccctgcggcggacggttgaccaccagccaccacatcatcccagagctgagctcctccagcgggatgacgccgtccccaccacctccctcttcttctttttcatccttctgtctctttgtttctgagctttcctgtctttccttttttctgagagattcaaagcctccacgactctgtttcccccgtcccttctgaatttaatttgcactaagtcatttgcactggttggagttgtggagacggccttgagtctcagtacgagtgtgcgtgagtgtgagccaccttggcaagtgcctgtgcagggcccggccgccctccatctgggccgggtgactgggcgccggctgtgtgcccgaggcctcaccctgccctcgcctagtctggaagctccgaccgacatcacggagcagccttcaagcattccattacgccccatctcgctctgtgcccctccccaccagggcttcagcaggagccctggactcatcatcaataaacactgttacagcaatttgtctcgaggactctgg

SEQ ID NO: 7533 - protein, 67 aa, Homo sapiens; identical to SEQ ID NO: 7513

SEQ ID NO: 7534 - DNA, 580 bp, Homo sapiens
ggggtgggatgggtggggggtaacgggggaaactggggaagtggggaaccgaggggcaaccaggggaagatggggtgctggaggagagcttgtgggagccaaggagcaccttggacatctggagtctggcaggaagttagcaaaggtgacatcttctcggggggagccgagactgcctttcctgtctttccttttttctgagagattcaaagcctccacgactctgtttcccccgtcccttctgaatttaatttgcactaagtcatttgcactggttggagttgtggagacggccttgagtctcagtacgagtgtgcgtgagtgtgagccaccttggcaagtgcctgtgcagggcccggccgccctccatctgggccgggtgactgggcgccggctgtgtgcccgaggcctcaccctgccctcgcctagtctggaagctccgaccgacatcacggagcagccttcaagcattccattacgccccatctcgctctgtgcccctccccaccagggcttcagcaggagccctggactcatcatcaataaacactgttacagcaatttgtctcgaggactctgg

SEQ ID NO: 7535 - protein, 43 aa, Homo sapiens
MGCWRRACGSQGAPWTSGVWQEVSKGDIFSGGAETAFPVFPFF

SEQ ID NO: 7536 - DNA, 1901 bp, Homo sapiens
ggggtgggatgggtggggggtaacgggggaaactggggaagtggggaaccgaggggcaaccaggggaagatggggtgctggaggagagcttgtgggagccaaggagcaccttggacatctggagtctggcaggaagttagcaaaggtgacatcttctcggggggagccgagactgcgcaaggctggggggttatgggcccgttccaggcagaaagagcaagagggcagggagggagcacaggggtggccagcgtagggtccagcacgtggggtggtaccccaggcctgggtcagacagggacatggcaggggacacaggacagaggggtccccagctgccacctcacccaccgcaattcatttagtagcaggcacaggggcagctccggcacggctttctcaggcctatgccggagcctcgagggctggagagcgggaagacaggcagtgctcggggagttgcagcaggacgtcaccaggagggcgaagcggccacgggaggggggccccgggacattgcgcagcaaggaggctgcaggggctcggcctgcgggcgccggtcccacgaggcactgcggcccagggtctggtgcggagagggcccacagtggacttggtgacgctgtatgccctcaccgctcagcccctggggctggcttggcagacagtacagcatccaggggagtcaagggcatggggcgagaccagactaggcgaggcgggcggggcggagtgaatgagctctcaggagggaggatggtgcaggcaggggtgaggagcgcagcgggcggcgagcgggaggcactggcctccagagcccgtggccaaggcgggcctcgcgggcggcgacggagccgggatcggtgcctcagcgttcgggctggagacgaggccaggtctccagctggggtggacgtgcccaccagctgccgaaggccaagacgccaggtccggtggacgtgacaagcaggacatgacatggtccggtgtgacggcgaggacagaggaggcgcgtccggccttcctgaacaccttaggctggtggggctgcggcaagaagcgggtctgtttctttacttcctccacggagtcggcacactatggctgccctctgggctcccagaacccacaacatgaaagaaatggtgctacccagctcaagcctgggcctttgaatccggacacaaaaccctctagcttggaaatgaatatgctgcactttacaaccactgcactacctgactcaggaatcggctctggaaggtgaagctagaggaaccagacctcatcagcccaacatcaaagacaccatcggaacagcagcgcccgcagcacccaccccgcaccggcgactccatcttcatggccaccccctgcggcggacggttgaccaccagccaccacatcatcccagagctgagctcctccagcgggatgacgccgtccccaccacctccctcttcttctttttcatccttctgtctctttgtttctgagctttcctgtctttccttttttctgagagattcaaagcctccacgactctgtttcccccgtcccttctgaatttaatttgcactaagtcatttgcactggttggagttgtggagacggccttgagtctcagtacgagtgtgcgtgagtgtgagccaccttggcaagtgcctgtgcagggcccggccgccctccatctgggccgggtgactgggcgccggctgtgtgcccgaggcctcaccctgccctcgcctagtctggaagctccgaccgacatcacggagcagccttcaagcattccattacgccccatctcgctctgtgcccctccccaccagggcttcagcaggagccctggactcatcatcaataaacactgttacagcaatttgtctcgaggactctgg

SEQ ID NO: 7537 - protein, 297 aa, Homo sapiens
MGCWRRACGSQGAPWTSGVWQEVSKGDIFSGGAETAQGWGVMGPFQAERARGQGGSTGVASVGSSTWGGTPGLGQTGTWQGTQDRGVPSCHLTHRNSFSSRHRGSSGTAFSGLCRSLEGWRAGRQAVLGELQQDVTRRAKRPREGGPGTLRSKEAAGARPAGAGPTRHCGPGSGAERAHSGLGDAVCPHRSAPGAGLADSTASRGVKGMGRDQTRRGGRGGVNELSGGRMVQAGVRSAAGGEREALASRARGQGGPRGRRRSRDRCLSVRAGDEARSPAGVDVPTSCRRPRRQVRWT

SEQ ID NO: 7538 - DNA, 1576 bp, Homo sapiens
ggggtgggatgggtggggggtaacgggggaaactggggaagtggggaaccgaggggcaaccaggggaagatggggtgctggaggagagcttgtgggagccaaggagcaccttggacatctggagtctggcaggattgcagcaggacgtcaccaggagggcgaagcggccacgggaggggggccccgggacattgcgcagcaaggaggctgcaggggctcggcctgcgggcgccggtcccacgaggcactgcggcccagggtctggtgcggagagggcccacagtggacttggtgacgctgtatgccctcaccgctcagcccctggggctggcttggcagacagtacagcatccaggggagtcaagggcatggggcgagaccagactaggcgaggcgggcggggcggagtgaatgagctctcaggagggaggatggtgcaggcaggggtgaggagcgcagcgggcggcgagcgggaggcactggcctccagagcccgtggccaaggcgggcctcgcgggcggcgacggagccgggatcggtgcctcagcgttcgggctggagacgaggccaggtctccagctggggtggacgtgcccaccagctgccgaaggccaagacgccaggtccggtggacgtgacaagcaggacatgacatggtccggtgtgacggcgaggacagaggaggcgcgtccggccttcctgaacaccttaggctggtggggctgcggcaagaagcgggtctgtttctttacttcctccacggagtcggcacactatggctgccctctgggctcccagaacccacaacatgaaagaaatggtgctacccagctcaagcctgggcctttgaatccggacacaaaaccctctagcttggaaatgaatatgctgcactttacaaccactgcactacctgactcaggaatcggctctggaaggtgaagctagaggaaccagacctcatcagcccaacatcaaagacaccatcggaacagcagcgcccgcagcacccaccccgcaccggcgactccatcttcatggccaccccctgcggcggacggttgaccaccagccaccacatcatcccagagctgagctcctccagcgggatgacgccgtccccaccacctccctcttcttctttttcatccttctgtctctttgtttctgagctttcctgtctttccttttttctgagagattcaaagcctccacgactctgtttcccccgtcccttctgaatttaatttgcactaagtcatttgcactggttggagttgtggagacggccttgagtctcagtacgagtgtgcgtgagtgtgagccaccttggcaagtgcctgtgcagggcccggccgccctccatctgggccgggtgactgggcgccggctgtgtgcccgaggcctcaccctgccctcgcctagtctggaagctccgaccgacatcacggagcagccttcaagcattccattacgccccatctcgctctgtgcccctccccaccagggcttcagcaggagccctggactcatcatcaataaacactgttacagcaatttgtctcgaggactctgg

SEQ ID NO: 7539 - protein, 113 aa, Homo sapiens
MGCWRRACGSQGAPWTSGVWQDCSRTSPGGRSGHGRGAPGHCAARRLQGLGLRAPVPRGTAAQGLVRRGPTVDLVTLYALTAQPLGLAWQTVQHPGESRAWGETRLGEAGGAE

SEQ ID NO: 7540 - DNA, 673 bp, Homo sapiens
agggggtgggatgggtggggggtaacgggggaaactggggaagtggggaaccgaggggcaaccaggggaagatggggtgctggaggagagcttgtgggagccaaggagcaccttggacatctggagtctggcaggagtgatgacgggtggaggggctagctcgaggcagccaccacatcatcccagagctgagctcctccagcgggatgacgccgtccccaccacctccctcttcttctttttcatccttctgtctctttgtttctgagctttcctgtctttccttttttctgagagattcaaagcctccacgactctgtttcccccgtcccttctgaatttaatttgcactaagtcatttgcactggttggagttgtggagacggccttgagtctcagtacgagtgtgcgtgagtgtgagccaccttggcaagtgcctgtgcagggcccggccgccctccatctgggccgggtgactgggcgccggctgtgtgcccgaggcctcaccctgccctcgcctagtctggaagctccgaccgacatcacggagcagccttcaagcattccattacgccccatctcgctctgtgcccctccccaccagggcttcagcaggagccctggactcatcatcaataaacactgttacagcaatttgtctcgaggactctgg

SEQ ID NO: 7541 - protein, 42 aa, Homo sapiens
MTGGGASSRQPPHHPRAELLQRDDAVPTTSLFFFFILLSLCF

SEQ ID NO: 7542 - DNA, 2108 bp, Homo sapiens
gagggagggggtgggatgggtggggggtaacgggggaaactggggaagtggggaaccgaggggcaaccaggggaagatggggtgctggaggagagcttgtgggagccaaggagcaccttggacatctggagtctggcaggagtgatgacgggtggaggggctagctcgaggcagggctggtggggcctgaggccagtgaggagtgtggagtaggcgcccaggcatcgtgcagacagggcgacatcagctggggacgatgggcctgagctagggctggaaagaagggggagccaggcattcatcccggtcacttttggttacaggacgtggcagctggttggacgaggggagctggtgggcagggtttgatcccagggcctgggcaacggaggtgtagctggcagcagcgggcaggtgaggaccccatctgccgggcaggtgagtcccttccctccccaggcctcgcttccccagccttctgaaagaaggaggtttaggggatcgagggctggcggggagaagcagacaccctcccagcagaggggcaggatgggggcaggagagttagcaaaggtgacatcttctcggggggagccgagactgcgcaaggctggggggttatgggcccgttccaggcagaaagagcaagagggcagggagggagcacaggggtggccagcgtagggtccagcacgtggggtggtaccccaggcctgggtcagacagggacatggcaggggacacaggacagaggggtccccagctgccacctcacccaccgcaattcatttagtagcaggcacaggggcagctccggcacggctttctcaggcctatgccggagcctcgagggctggagagcgggaagacaggcatacagcatccaggggagtcaagggcatggggcgagaccagactaggcgaggcgggcggggcggagtgaatgagctctcaggagggaggatggtgcaggcaggggtgaggagcgcagcgggcggcgagcgggaggcactggcctccagagcccgtggccaaggcgggcctcgcgggcggcgacggagccgggatcggtgcctcagcgttcgggctggagacgaggccaggtctccagctggggtggacgtgcccaccagctgccgaaggccaagacgccaggtccggtggacgtgacaagcaggacatgacatggtccggtgtgacggcgaggacagaggaggcgcgtccggccttcctgaacaccttaggctggtggggctgcggcaagaagcgggtctgtttctttacttcctccacggagtcggcacactatggctgccctctgggctcccagaacccacaacatgaaagaaatggtgctacccagctcaagcctgggcctttgaatccggacacaaaaccctctagcttggaaatgaatatgctgcactttacaaccactgcactacctgactcaggaatcggctctggaaggtgaagctagaggaaccagacctcatcagcccaacatcaaagacaccatcggaacagcagcgcccgcagcacccaccccgcaccggcgactccatcttcatggccaccccctgcggcggacggttgaccaccagccaccacatcatcccagagctgagctcctccagcgggatgacgccgtccccaccacctccctcttcttctttttcatccttctgtctctttgtttctgagctttcctgtctttccttttttctgagagattcaaagcctccacgactctgtttcccccgtcccttctgaatttaatttgcactaagtcatttgcactggttggagttgtggagacggccttgagtctcagtacgagtgtgcgtgagtgtgagccaccttggcaagtgcctgtgcagggcccggccgccctccatctgggccgggtgactgggcgccggctgtgtgcccgaggcctcaccctgccctcgcctagtctggaagctccgaccgacatcacggagcagccttcaagcattccattacgccccatctcgctctgtgcccctccccaccagggcttcagcaggagccctggactcatcatcaataaacactgttacagcaatttgtctcgaggactctgg

SEQ ID NO: 7543 - protein, 99 aa, Homo sapiens
MGPFQAERARGQGGSTGVASVGSSTWGGTPGLGQTGTWQGTQDRGVPSCHLTHRNSFSSRHRGSSGTAFSGLCRSLEGWRAGRQAYSIQGSQGHGARPD

SEQ ID NO: 7544 - DNA, 1998 bp, Homo sapiens
gtgagggagggggtgggatgggtggggggtaacgggggaaactggggaagtggggaaccgaggggcaaccaggggaagatggggtgctggaggagagcttgtgggagccaaggagcaccttggacatctggagtctggcaggagtgatgacgggtggaggggctagctcgaggcagggctggtggggcctgaggccagtgaggagtgtggagtaggcgcccaggcatcgtgcagacagggcgacatcagctggggacgatgggcctgagctagggctggaaagaagggggagccaggcattcatcccggtcacttttggttacaggacgtggcagctggttggacgaggggagctggtgggcagggtttgatcccagggcctgggcaacggaggtgtagctggcagcagcgggcaggtgaggaccccatctgccgggcaggtgagtcccttccctccccaggcctcgcttccccagccttctgaaagaaggaggtttaggggatcgagggctggcggggagaagcagacaccctcccagcagaggggcaggatgggggcaggagagttagcaaaggtgacatcttctcggggggagccgagactgcgcaaggctggggggttatgggcccgttccaggcagaaagagcaagagggcagggagggagcacaggggtggccagcgtagggtccagcacgtggggtggtaccccaggcctgggtcagacagggacatggcaggggacacaggacagaggggtccccagctgccacctcacccaccgcaattcatttagtagcaggcacaggggcagctccggcacggctttctcaggcctatgccggagcctcgagggctggagagcgggaagacaggcagtgctcggggagttgcagcaggacgtcaccaggagggcgaagcggccacgggaggggggccccgggacattgcgcagcaaggaggctgcaggggctcggcctgcgggcgccggtcccacgaggcactgcggcccagggtctggtgcggagagggcccacagtggacttggtgacgctgtatgccctcaccgctcagcccctggggctggcttggcagacagtacagtccggtggacgtgacaagcagaacaccttaggctggtggggctgcggcaagaagcgggtctgtttctttacttcctccacggagtcggcacactatggctgccctctgggctcccagaacccacaacatgaaagaaatggtgctacccagctcaagcctgggcctttgaatccggacacaaaaccctctagcttggaaatgaatatgctgcactttacaaccactgcactacctgactcaggaatcggctctggaaggtgaagctagaggaaccagacctcatcagcccaacatcaaagacaccatcggaacagcagcgcccgcagcacccaccccgcaccggcgactccatcttcatggccaccccctgcggcggacggttgaccaccagccaccacatcatcccagagctgagctcctccagcgggatgacgccgtccccaccacctccctcttcttctttttcatccttctgtctctttgtttctgagctttcctgtctttccttttttctgagagattcaaagcctccacgactctgtttcccccgtcccttctgaatttaatttgcactaagtcatttgcactggttggagttgtggagacggccttgagtctcagtacgagtgtgcgtgagtgtgagccaccttggcaagtgcctgtgcagggcccggccgccctccatctgggccgggtgactgggcgccggctgtgtgcccgaggcctcaccctgccctcgcctagtctggaagctccgaccgacatcacggagcagccttcaagcattccattacgccccatctcgctctgtgcccctccccaccagggcttcagcaggagccctggactcatcatcaataaacactgttacagcaatttgtctcgaggactctgg

SEQ ID NO: 7545 - protein, 164 aa, Homo sapiens
MGPFQAERARGQGGSTGVASVGSSTWGGTPGLGQTGTWQGTQDRGVPSCHLTHRNSFSSRHRGSSGTAFSGLCRSLEGWRAGRQAVLGELQQDVTRRAKRPREGGPGTLRSKEAAGARPAGAGPTRHCGPGSGAERAHSGLGDAVCPHRSAPGAGLADSTVRWT

SEQ ID NO: 7546 - DNA, 1624 bp, Homo sapiens
gtgagggagggggtgggatgggtggggggtaacgggggaaactggggaagtggggaaccgaggggcaaccaggggaagatggggtgctggaggagagcttgtgggagccaaggagcaccttggacatctggagtctggcaggagtgatgacgggtggaggggctagctcgaggcagggctggtggggcctgaggccagtgaggagtgtggagtaggcgcccaggcatcgtgcagacagggcgacatcagctggggacgatgggcctgagctagggctggaaagaagggggagccaggcattcatcccggtcacttttggttacaggacgtggcagctggttggacgaggggagctggtgggcagggtttgatcccagggcctgggcaacggaggtgtagctggcagcagcgggcaggtgaggaccccatctgccgggcaggtgagtcccttccctccccaggcctcgcttccccagccttctgaaagaaggaggtttaggggatcgagggctggcggggagaagcagacaccctcccagcagaggggcaggatgggggcaggagagttagcaaaggtgacatcttctcggggggagccgagactgcgcaaggctggggggttatgggcccgttccaggcagaaagagcaagagggcagggagggagcacaggggtggccagcgtagggtccagcacgtggggtggtaccccaggcctgggtcagacagggacatggcaggggacacaggacagaggggtccccagctgccacctcacccaccgcaattcatttagtagcaggcacaggggcagctccggcacggctttctcaggcctatgccggagcctcgagggctggagagcgggaagacaggcagtgctcggggagttgcagcaggacgtcaccaggagggcgaagcggccacgggaggggggccccgggacattgcgcagcaaggaggctgcaggggctcggcctgcgggcgccggtcccacgaggcactgcggcccagggtctggtgcggagagggcccacagtggacttggtgacgctgtatgccctcaccgctcagcccctggggctggcttggcagacagtacagcatccaggggagtcaagggcatggggcgagaccaagctgagctcctccagcgggatgacgccgtccccaccacctccctcttcttctttttcatccttctgtctctttgtttctgagctttcctgtctttccttttttctgagagattcaaagcctccacgactctgtttcccccgtcccttctgaatttaatttgcactaagtcatttgcactggttggagttgtggagacggccttgagtctcagtacgagtgtgcgtgagtgtgagccaccttggcaagtgcctgtgcagggcccggccgccctccatctgggccgggtgactgggcgccggctgtgtgcccgaggcctcaccctgccctcgcctagtctggaagctccgaccgacatcacggagcagccttcaagcattccattacgccccatctcgctctgtgcccctccccaccagggcttcagcaggagccctggactcatcatcaataaacactgttacagcaatttgtctcgaggactctgg

SEQ ID NO: 7547 - protein, 198 aa, Homo sapiens
MGPFQAERARGQGGSTGVASVGSSTWGGTPGLGQTGTWQGTQDRGVPSCHLTHRNSFSSRHRGSSGTAFSGLCRSLEGWRAGRQAVLGELQQDVTRRAKRPREGGPGTLRSKEAAGARPAGAGPTRHCGPGSGAERAHSGLGDAVCPHRSAPGAGLADSTASRGVKGMGRDQAELLQRDDAVPTTSLFFFFILLSLCF

SEQ ID NO: 7548 - DNA, 1622 bp, Homo sapiens
agggtgagggagggggtgggatgggtggggggtaacgggggaaactggggaagtggggaaccgaggggcaaccaggggaagatggggtgctggaggagagcttgtgggagccaaggagcaccttggacatctggagtctggcaggagtgatgacgggtggaggggctagctcgaggcagggctggtggggcctgaggccagtgaggagtgtggagtaggcgcccaggcatcgtgcagacagggcgacatcagctggggacgatgggcctgagctagggctggaaagaagggggagccaggcattcatcccggtcacttttggttacaggacgtggcagctggttggacgaggggagctggtgggcagggtttgatcccagggcctgggcaacggaggtgtagctggcagcagcgggcaggtgaggaccccatctgccgggcaggtgagtcccttccctccccaggcctcgcttccccagccttctgaaagaaggaggtttaggggatcgagggctggcggggagaagcagacaccctcccagcagaggggcaggatgggggcaggagagttagcaaaggtgacatcttctcggggggagccgagactgcgcaaggctggggggttatgggcccgttccaggcagaaagagcaagagggcagggagggagcacaggggtggccagcgtagggtccagcacgtggggtggtaccccaggcctgggtcagacagggacatggcaggggacacaggacagaggggtccccagctgccacctcacccaccgcaattcatttagtagcaggcacaggggcagctccggcacggctttctcaggcctatgccggagcctcgagggctggagagcgggaagacaggcagtgctcggggagttgcagcaggacgtcaccaggagggcgaagcggccacgggaggggggccccgggacattgcgcagcaaggaggctgcaggggctcggcctgcgggcgccggtcccacgaggcactgcggcccagggtctggtgcggagagggcccacagtggacttggtgacgctgtatgccctcaccgctcagcccctggggctggcttggcagacagtacagcatccaggggagtcaagggcatggggcgagaccagactaggcgaggcgggcggggcggagtgaatgagctccctcttcttctttttcatccttctgtctctttgtttctgagctttcctgtctttccttttttctgagagattcaaagcctccacgactctgtttcccccgtcccttctgaatttaatttgcactaagtcatttgcactggttggagttgtggagacggccttgagtctcagtacgagtgtgcgtgagtgtgagccaccttggcaagtgcctgtgcagggcccggccgccctccatctgggccgggtgactgggcgccggctgtgtgcccgaggcctcaccctgccctcgcctagtctggaagctccgaccgacatcacggagcagccttcaagcattccattacgccccatctcgctctgtgcccctccccaccagggcttcagcaggagccctggactcatcatcaataaacactgttacagcaatttgtctcgaggactctgg

SEQ ID NO: 7549 - protein, 205 aa, Homo sapiens
MGPFQAERARGQGGSTGVASVGSSTWGGTPGLGQTGTWQGTQDRGVPSCHLTHRNSFSSRHRGSSGTAFSGLCRSLEGWRAGRQAVLGELQQDVTRRAKRPREGGPGTLRSKEAAGARPAGAGPTRHCGPGSGAERAHSGLGDAVCPHRSAPGAGLADSTASRGVKGMGRDQTRRGGRGGVNELPLLLFHPSVSLFLSFPVFPFF

SEQ ID NO: 7550 - DNA, 975 bp, Homo sapiens
agggtgagggagggggtgggatgggtggggggtaacgggggaaactggggaagtggggaaccgaggggcaaccaggggaagatggggtgctggaggagagcttgtgggagccaaggagcaccttggacatctggagtctggcaggagtgatgacgggtggaggggctagctcgaggcagggctggtggggcctgaggccagtgaggagtgtggaaaatggtgctacccagctcaagcctgggcctttgaatccggacacaaaaccctctagcttggaaatgaatatgctgcactttacaaccactgcactacctgactcaggaatcggctctggaaggtgaagctagaggaaccagacctcatcagcccaacatcaaagacaccatcggaacagcagcgcccgcagcacccaccccgcaccggcgactccatcttcatggccaccccctgcggcggacggttgaccaccagccaccacatcatcccagagctgagctcctccagcgggatgacgccgtccccaccacctccctcttcttctttttcatccttctgtctctttgtttctgagctttcctgtctttccttttttctgagagattcaaagcctccacgactctgtttcccccgtcccttctgaatttaatttgcactaagtcatttgcactggttggagttgtggagacggccttgagtctcagtacgagtgtgcgtgagtgtgagccaccttggcaagtgcctgtgcagggcccggccgccctccatctgggccgggtgactgggcgccggctgtgtgcccgaggcctcaccctgccctcgcctagtctggaagctccgaccgacatcacggagcagccttcaagcattccattacgccccatctcgctctgtgcccctccccaccagggcttcagcaggagccctggactcatcatcaataaacactgttacagcaatttgtctcgaggactctgg

SEQ ID NO: 7551 - protein, 63 aa, Homo sapiens
MTGGGASSRQGWWGLRPVRSVENGATQLKPGPLNPDTKPSSLEMNMLHFTTTALPDSGIGSGR

SEQ ID NO: 7552 - DNA, 2113 bp, Homo sapiens
agggtgagggagggggtgggatgggtggggggtaacgggggaaactggggaagtggggaaccgaggggcaaccaggggaagatggggtgctggaggagagcttgtgggagccaaggagcaccttggacatctggagtctggcaggaggtttgatcccagggcctgggcaacggaggtgtagctggcagcagcgggcaggtgaggaccccatctgccgggcaggtgagtcccttccctccccaggcctcgcttccccagccttctgaaagaaggaggtttaggggatcgagggctggcggggagaagcagacaccctcccagcagaggggcaggatgggggcaggagagttagcaaaggtgacatcttctcggggggagccgagactgcgcaaggctggggggttatgggcccgttccaggcagaaagagcaagagggcagggagggagcacaggggtggccagcgtagggtccagcacgtggggtggtaccccaggcctgggtcagacagggacatggcaggggacacaggacagaggggtccccagctgccacctcacccaccgcaattcatttagtagcaggcacaggggcagctccggcacggctttctcaggcctatgccggagcctcgagggctggagagcgggaagacaggcagtgctcggggagttgcagcaggacgtcaccaggagggcgaagcggccacgggaggggggccccgggacattgcgcagcaaggaggctgcaggggctcggcctgcgggcgccggtcccacgaggcactgcggcccagggtctggtgcggagagggcccacagtggacttggtgacgctgtatgccctcaccgctcagcccctggggctggcttggcagacagtacagcatccaggggagtcaagggcatggggcgagaccagactaggcgaggcgggcggggcggagtgaatgagctctcaggagggaggatggtgcaggcaggggtgaggagcgcagcgggcggcgagcgggaggcactggcctccagagcccgtggccaaggcgggcctcgcgggcggcgacggagccgggatcggtgcctcagcgttcgggctggagacgaggccaggtctccagctggggtggacgtgcccaccagctgccgaaggccaagacgccaggtccggtggacgtgacaagcaggacatgacatggtccggtgtgacggcgaggacagaggaggcgcgtccggccttcctgaacaccttaggctggtggggctgcggcaagaagcgggtctgtttctttacttcctccacggagtcggcacactatggctgccctctgggctcccagaacccacaacatgaaagaaatggtgctacccagctcaagcctgggcctttgaatccggacacaaaaccctctagcttggaaatgaatatgctgcactttacaaccactgcactacctgactcaggaatcggctctggaaggtgaagctagaggaaccagacctcatcagcccaacatcaaagacaccatcggaacagcagcgcccgcagcacccaccccgcaccggcgactccatcttcatggccaccccctgcggcggacggttgaccaccagccaccacatcatcccagagctgagctcctccagcgggatgacgccgtccccaccacctccctcttcttctttttcatccttctgtctctttgtttctgagctttcctgtctttccttttttctgagagattcaaagcctccacgactctgtttcccccgtcccttctgaatttaatttgcactaagtcatttgcactggttggagttgtggagacggccttgagtctcagtacgagtgtgcgtgagtgtgagccaccttggcaagtgcctgtgcagggcccggccgccctccatctgggccgggtgactgggcgccggctgtgtgcccgaggcctcaccctgccctcgcctagtctggaagctccgaccgacatcacggagcagccttcaagcattccattacgccccatctcgctctgtgcccctccccaccagggcttcagcaggagccctggactcatcatcaataaacactgttacagcaatttgtctcgaggactctgg

SEQ ID NO: 7553 - protein, 256 aa, Homo sapiens; identical to SEQ ID NO: 7529

SEQ ID NO: 7554 - DNA, 1203 bp, Homo sapiens
agggtgagggagggggtgggatgggtggggggtaacgggggaaactggggaagtggggaaccgaggggcaaccaggggaagatggggtgctggaggagagcttgtgggagccaaggagcaccttggacatctggagtctggcaggagtgatgacgggtggaggggctagctcgaggcagggctggtggggcctgaggccagtgaggagtgtggagacgtgcccaccagctgccgaaggccaagacgccaggtccggtggacgtgacaagcaggacatgacatggtccggtgtgacggcgaggacagaggaggcgcgtccggccttcctgaacaccttaggctggtggggctgcggcaagaagcgggtctgtttctttacttcctccacggagtcggcacactatggctgccctctgggctcccagaacccacaacatgaaagaaatggtgctacccagctcaagcctgggcctttgaatccggacacaaaaccctctagcttggaaatgaatatgctgcactttacaaccactgcactacctgactcaggaatcggctctggaaggtgaagctagaggaaccagacctcatcagcccaacatcaaagacaccatcggaacagcagcgcccgcagcacccaccccgcaccggcgactccatcttcatggccaccccctgcggcggacggttgaccaccagccaccacatcatcccagagctgagctcctccagcgggatgacgccgtccccaccacctccctcttcttctttttcatccttctgtctctttgtttctgagctttcctgtctttccttttttctgagagattcaaagcctccacgactctgtttcccccgtcccttctgaatttaatttgcactaagtcatttgcactggttggagttgtggagacggccttgagtctcagtacgagtgtgcgtgagtgtgagccaccttggcaagtgcctgtgcagggcccggccgccctccatctgggccgggtgactgggcgccggctgtgtgcccgaggcctcaccctgccctcgcctagtctggaagctccgaccgacatcacggagcagccttcaagcattccattacgccccatctcgctctgtgcccctccccaccagggcttcagcaggagccctggactcatcatcaataaacactgttacagcaatttgtctcgaggactctgg

SEQ ID NO: 7555 - protein, 139 aa, Homo sapiens
MTGGGASSRQGWWGLRPVRSVETCPPAAEGQDARSGGRDKQDMTWSGVTARTEEARPAFLNTLGWWGCGKKRVCFFTSSTESAHYGCPLGSQNPQHERNGATQLKPGPLNPDTKPSSLEMNMLHFTTTALPDSGIGSGR

SEQ ID NO: 7556 - DNA, 1895 bp, Homo sapiens
agggtgagggagggggtgggatgggtggggggtaacgggggaaactggggaagtggggaaccgaggggcaaccaggggaagatggggtgctggaggagagcttgtgggagccaaggagcaccttggacatctggagtctggcaggagtgatgacgggtggaggggctagctcgaggcagggctggtggggcctgaggccagtgaggagtgtggagtaggcgcccaggcatcgtgcagacagggcgacatcagctggggacgatgggcctgagctagggctggaaagaagggggagccaggcattcatcccggtcacttttggttacaggacgtggcagctggttggacgaggggagctggtgggcagggtttgatcccagggcctgggcaacggaggtgtagctggcagcagcgggcaggtgaggaccccatctgccgggcaggtgagtcccttccctccccaggcctcgcttccccagccttctgaaagaaggaggtttaggggatcgagggctggcggggagaagcagacaccctcccagcagaggggcaggatgggggcaggagagttagcaaaggtgacatcttctcggggggagccgagactgcgcaaggctggggggttatgggcccgttccaggcagaaagagcaagagggcagggagggagcacaggggtggccagcgtagggtccagcacgtggggtggtaccccaggcctgggtcagacagggacatggcaggggacacaggacagaggggtccccagctgccacctcacccaccgcaattcatttagtagcaggcacaggggcagctccggcacggctttctcaggcctatgccggagcctcgagggctggagagcgggaagacaggcagtgctcggggagttgcagcaggacgtcaccaggagggcgaagcggccacgggaggggggccccgggacattgcgcagcaaggaggctgcaggggctcggcctgcgggcgccggtcccacgaggcactgcggcccagggtctggtgcggagagggcccacagtggacttggtgacgctgtatgccctcaccgctcagcccctggggctggcttggcagacagtacagcatccaggggaaacccacaacatgaaagaaatggtgctacccagctcaagcctgggcctttgaatccggacacaaaaccctctagcttggaaatgaatatgctgcactttacaaccactgcactacctgactcaggaatcggctctggaaggtgaagctagaggaaccagacctcatcagcccaacatcaaagacaccatcggaacagcagcgcccgcagcacccaccccgcaccggcgactccatcttcatggccaccccctgcggcggacggttgaccaccagccaccacatcatcccagagctgagctcctccagcgggatgacgccgtccccaccacctccctcttcttctttttcatccttctgtctctttgtttctgagctttcctgtctttccttttttctgagagattcaaagcctccacgactctgtttcccccgtcccttctgaatttaatttgcactaagtcatttgcactggttggagttgtggagacggccttgagtctcagtacgagtgtgcgtgagtgtgagccaccttggcaagtgcctgtgcagggcccggccgccctccatctgggccgggtgactgggcgccggctgtgtgcccgaggcctcaccctgccctcgcctagtctggaagctccgaccgacatcacggagcagccttcaagcattccattacgccccatctcgctctgtgcccctccccaccagggcttcagcaggagccctggactcatcatcaataaacactgttacagcaatttgtctcgaggactctgg

SEQ ID NO: 7557 - protein, 211 aa, Homo sapiens
MGPFQAERARGQGGSTGVASVGSSTWGGTPGLGQTGTWQGTQDRGVPSCHLTHRNSFSSRHRGSSGTAFSGLCRSLEGWRAGRQAVLGELQQDVTRRAKRPREGGPGTLRSKEAAGARPAGAGPTRHCGPGSGAERAHSGLGDAVCPHRSAPGAGLADSTASRGNPQHERNGATQLKPGPLNPDTKPSSLEMNMLHFTTTALPDSGIGSGR

SEQ ID NO: 7558 - DNA, 741 bp, Homo sapiens
aggaccgaggagcagggtgagggagggggtgggatgggtggggggtaacgggggaaactggggaagtggggaaccgaggggcaaccaggggaagatggggtgctggaggagagcttgtgggagccaaggagcaccttggacatctggagtctggcaggagtgatgacgggtggaggggctagctcgaggcagggctggtggggcctgaggccagtgaggagtgtggagtaggcgcccaggcatcgtgcagacagagctgagctcctccagcgggatgacgccgtccccaccacctccctcttcttctttttcatccttctgtctctttgtttctgagctttcctgtctttccttttttctgagagattcaaagcctccacgactctgtttcccccgtcccttctgaatttaatttgcactaagtcatttgcactggttggagttgtggagacggccttgagtctcagtacgagtgtgcgtgagtgtgagccaccttggcaagtgcctgtgcagggcccggccgccctccatctgggccgggtgactgggcgccggctgtgtgcccgaggcctcaccctgccctcgcctagtctggaagctccgaccgacatcacggagcagccttcaagcattccattacgccccatctcgctctgtgcccctccccaccagggcttcagcaggagccctggactcatcatcaataaacactgttacagcaatttgtctcgaggactctgg

SEQ ID NO: 7559 - protein, 43 aa, Homo sapiens
MTPSPPPPSSSFSSFCLFVSELSCLSFFLRDSKPPRLCFPRPF

SEQ ID NO: 7560 - DNA, 863 bp, Homo sapiens
aggaccgaggagcagggtgagggagggggtgggatgggtggggggtaacgggggaaactggggaagtggggaaccgaggggcaaccaggggaagatggggtgctggaggagagcttgtgggagccaaggagcaccttggacatctggagtctggcaggagtgatgacgggtggaggggctagctcgaggcagggctggtggggcctgaggccagtgaggagtgtggagtaggcgcccaggcatcgtgcagacagggcgacatcagagacaccatcggaacagcagcgcccgcagcacccaccccgcaccggcgactccatcttcatggccaccccctgcggcggacggttgaccaccagccaccacatcatcccagagctgagctcctccagcgggatgacgccgtccccaccacctccctcttcttctttttcatccttctgtctctttgtttctgagctttcctgtctttccttttttctgagagattcaaagcctccacgactctgtttcccccgtcccttctgaatttaatttgcactaagtcatttgcactggttggagttgtggagacggccttgagtctcagtacgagtgtgcgtgagtgtgagccaccttggcaagtgcctgtgcagggcccggccgccctccatctgggccgggtgactgggcgccggctgtgtgcccgaggcctcaccctgccctcgcctagtctggaagctccgaccgacatcacggagcagccttcaagcattccattacgccccatctcgctctgtgcccctccccaccagggcttcagcaggagccctggactcatcatcaataaacactgttacagcaatttgtctcgaggactctgg

SEQ ID NO: 7561 - protein, 67 aa, Homo sapiens; identical to SEQ ID NO: 7513

SEQ ID NO: 7562 - DNA, 1010 bp, Homo sapiens
aggaccgaggagcagggtgagggagggggtgggatgggtggggggtaacgggggaaactggggaagtggggaaccgaggggcaaccaggggaagatggggtgctggaggagagcttgtgggagccaaggagcaccttggacatctggagtctggcaggagtgatgacgggtggaggggctagctcgaggcagggctggtggggcctgaggccagtgaggagtgtggagtaggcgcccaggcatcgtgcagacagggcgacatcagctggggacgatgggcctgagctagggctggaaagaagggggagccaggcattcatcccggtcatttacaaccactgcactacctgactcaggaatcggctctggaaggtgaagctagaggaaccagacctcatcagcccaacatcaaagacaccatcggaacagcagcgcccgcagcacccaccccgcaccggcgactccatcttcatggccaccccctgcggcggacggttgaccaccagccaccacatcatcccagagctgagctcctccagcgggatgacgccgtccccaccacctccctcttcttctttttcatccttctgtctctttgtttctgagctttcctgtctttccttttttctgagagattcaaagcctccacgactctgtttcccccgtcccttctgaatttaatttgcactaagtcatttgcactggttggagttgtggagacggccttgagtctcagtacgagtgtgcgtgagtgtgagccaccttggcaagtgcctgtgcagggcccggccgccctccatctgggccgggtgactgggcgccggctgtgtgcccgaggcctcaccctgccctcgcctagtctggaagctccgaccgacatcacggagcagccttcaagcattccattacgccccatctcgctctgtgcccctccccaccagggcttcagcaggagccctggactcatcatcaataaacactgttacagcaatttgtctcgaggactctgg

SEQ ID NO: 7563 - protein, 67 aa, Homo sapiens; identical to SEQ ID NO: 7513

SEQ ID NO: 7564 - DNA, 1831 bp, Homo sapiens
aggaccgaggagcagggtgagggagggggtgggatgggtggggggtaacgggggaaactggggaagtggggaaccgaggggcaaccaggggaagatggggtgctggaggagagcttgtgggagccaaggagcaccttggacatctggagtctggcaggagtgatgacgggtggaggggctagctcgaggcagggctggtggggcctgaggccagtgaggagtgtggagtaggcgcccaggcatcgtgcagacagggcgacatcagctgccacctcacccaccgcaattcatttagtagcaggcacaggggcagctccggcacggctttctcaggcctatgccggagcctcgagggctggagagcgggaagacaggcagtgctcggggagttgcagcaggacgtcaccaggagggcgaagcggccacgggaggggggccccgggacattgcgcagcaaggaggctgcaggggctcggcctgcgggcgccggtcccacgaggcactgcggcccagggtctggtgcggagagggcccacagtggacttggtgacgctgtatgccctcaccgctcagcccctggggctggcttggcagacagtacagcatccaggggagtcaagggcatggggcgagaccagactaggcgaggcgggcggggcggagtgaatgagctctcaggagggaggatggtgcaggcaggggtgaggagcgcagcgggcggcgagcgggaggcactggcctccagagcccgtggccaaggcgggcctcgcgggcggcgacggagccgggatcggtgcctcagcgttcgggctggagacgaggccaggtctccagctggggtggacgtgcccaccagctgccgaaggccaagacgccaggtccggtggacgtgacaagcaggacatgacatggtccggtgtgacggcgaggacagaggaggcgcgtccggccttcctgaacaccttaggctggtggggctgcggcaagaagcgggtctgtttctttacttcctccacggagtcggcacactatggctgccctctgggctcccagaacccacaacatgaaagaaatggtgctacccagctcaagcctgggcctttgaatccggacacaaaaccctctagcttggaaatgaatatgctgcactttacaaccactgcactacctgactcaggaatcggctctggaaggtgaagctagaggaaccagacctcatcagcccaacatcaaagacaccatcggaacagcagcgcccgcagcacccaccccgcaccggcgactccatcttcatggccaccccctgcggcggacggttgaccaccagccaccacatcatcccagagctgagctcctccagcgggatgacgccgtccccaccacctccctcttcttctttttcatccttctgtctctttgtttctgagctttcctgtctttccttttttctgagagattcaaagcctccacgactctgtttcccccgtcccttctgaatttaatttgcactaagtcatttgcactggttggagttgtggagacggccttgagtctcagtacgagtgtgcgtgagtgtgagccaccttggcaagtgcctgtgcagggcccggccgccctccatctgggccgggtgactgggcgccggctgtgtgcccgaggcctcaccctgccctcgcctagtctggaagctccgaccgacatcacggagcagccttcaagcattccattacgccccatctcgctctgtgcccctccccaccagggcttcagcaggagccctggactcatcatcaataaacactgttacagcaatttgtctcgaggactctgg

SEQ ID NO: 7565 - protein, 97 aa, Homo sapiens; identical to SEQ ID NO: 7525

SEQ ID NO: 7566 - DNA, 1699 bp, Homo sapiens
aggaccgaggagcagggtgagggagggggtgggatgggtggggggtaacgggggaaactggggaagtggggaaccgaggggcaaccaggggaagatggggtgctggaggagagcttgtgggagccaaggagcaccttggacatctggagtctggcaggagtgatgacgggtggaggggctagctcgaggcagggctggtggggcctgaggccagtgaggagtgtggagtaggcgcccaggcatcgtgcagacagggcgacatcagctggggacgatgggcctgagctagggctggaaagaagggggagccaggcattcatcccggtcacttttggttacaggacgtggcagctggttggacgaggggagctggtgggcaggggtctggtgcggagagggcccacagtggacttggtgacgctgtatgccctcaccgctcagcccctggggctggcttggcagacagtacagcatccaggggagtcaagggcatggggcgagaccagactaggcgaggcgggcggggcggagtgaatgagctctcaggagggaggatggtgcaggcaggggtgaggagcgcagcgggcggcgagcgggaggcactggcctccagagcccgtggccaaggcgggcctcgcgggcggcgacggagccgggatcggtgcctcagcgttcgggctggagacgaggccaggtctccagctggggtggacgtgcccaccagctgccgaaggccaagacgccaggtccggtggacgtgacaagcaggacatgacatggtccggtgtgacggcgaggacagaggaggcgcgtccggccttcctgaacaccttaggctggtggggctgcggcaagaagcgggtctgtttctttacttcctccacggagtcggcacactatggctgccctctgggctcccagaacccacaacatgaaagaaatggtgctacccagctcaagcctgggcctttgaatccggacacaaaaccctctagcttggaaatgaatatgctgcactttacaaccactgcactacctgactcaggaatcggctctggaaggtgaagctagaggaaccagacctcatcagcccaacatcaaagacaccatcggaacagcagcgcccgcagcacccaccccgcaccggcgactccatcttcatggccaccccctgcggcggacggttgaccaccagccaccacatcatcccagagctgagctcctccagcgggatgacgccgtccccaccacctccctcttcttctttttcatccttctgtctctttgtttctgagctttcctgtctttccttttttctgagagattcaaagcctccacgactctgtttcccccgtcccttctgaatttaatttgcactaagtcatttgcactggttggagttgtggagacggccttgagtctcagtacgagtgtgcgtgagtgtgagccaccttggcaagtgcctgtgcagggcccggccgccctccatctgggccgggtgactgggcgccggctgtgtgcccgaggcctcaccctgccctcgcctagtctggaagctccgaccgacatcacggagcagccttcaagcattccattacgccccatctcgctctgtgcccctccccaccagggcttcagcaggagccctggactcatcatcaataaacactgttacagcaatttgtctcgaggactctgg

SEQ ID NO: 7567 - protein, 97 aa, Homo sapiens; identical to SEQ ID NO: 7525

SEQ ID NO: 7568 - DNA, 808 bp, Homo sapiens
aggaccgaggagcagggtgagggagggggtgggatgggtggggggtaacgggggaaactggggaagtggggaaccgaggggcaaccaggggaagatggggtgctggaggagagcttgtgggagccaaggagcaccttggacatctggagtctggcaggagtgatgacgggtggaggggctagctcgaggcagggctggtggggcctgaggccagtgaggagtgtggagtaggcgcccaggcatcgtgcagacagggcgactccatcttcatggccaccccctgcggcggacggttgaccaccagccaccacatcatcccagagctgagctcctccagcgggatgacgccgtccccaccacctccctcttcttctttttcatccttctgtctctttgtttctgagctttcctgtctttccttttttctgagagattcaaagcctccacgactctgtttcccccgtcccttctgaatttaatttgcactaagtcatttgcactggttggagttgtggagacggccttgagtctcagtacgagtgtgcgtgagtgtgagccaccttggcaagtgcctgtgcagggcccggccgccctccatctgggccgggtgactgggcgccggctgtgtgcccgaggcctcaccctgccctcgcctagtctggaagctccgaccgacatcacggagcagccttcaagcattccattacgccccatctcgctctgtgcccctccccaccagggcttcagcaggagccctggactcatcatcaataaacactgttacagcaatttgtctcgaggactctgg

SEQ ID NO: 7569 - protein, 67 aa, Homo sapiens; identical to SEQ ID NO: 7513

SEQ ID NO: 7570 - DNA, 2367 bp, Homo sapiens
agttagaaaaagcccgggctaggaccgaggagcagggtgagggagggggtgggatgggtggggggtaacgggggaaactggggaagtggggaaccgaggggcaaccaggggaagatggggtgctggaggagagcttgtgggagccaaggagcaccttggacatctggagtctggcaggagtgatgacgggtggaggggctagctcgaggcagggctggtggggcctgaggccagtgaggagtgtggagtaggcgcccaggcatcgtgcagacagggcgacatcagctggggacgatgggcctgagctagggctggaaagaagggggagccaggcattcatcccggtcacttttggttacaggacgtggcagctggttggacgaggggagctggtgggcagggtttgatcccagggcctgggcaacggaggtgtagctggcagcagcgggcaggtgaggaccccatctgccgggcaggtgagtcccttccctccccaggcctcgcttccccagccttctgaaagaaggaggtttaggggatcgagggctggcggggagaagcagacaccctcccagcagaggggcaggatgggggcaggagagttagcaaaggtgacatcttctcggggggagccgagactgcgcaaggctggggggttatgggcccgttccaggcagaaagagcaagagggcagggagggagcacaggggtggccagcgtagggtccagcacgtggggtggtaccccaggcctgggtcagacagggacatggcaggggacacaggacagaggggtccccagctgccacctcacccaccgcaattcatttagtagcaggcacaggggcagctccggcacggctttctcaggcctatgccggagcctcgagggctggagagcgggaagacaggcagtgctcggggagttgcagcaggacgtcaccaggagggcgaagcggccacgggaggggggccccgggacattgcgcagcaaggaggctgcaggggctcggcctgcgggcgccggtcccacgaggcactgcggcccagggtctggtgcggagagggcccacagtggacttggtgacgctgtatgccctcaccgctcagcccctggggctggcttggcagacagtacagcatccaggggagtcaagggcatggggcgagaccagactaggcgaggcgggcggggcggagtgaatgagctctcaggagggaggatggtgcaggcaggggtgaggagcgcagcgggcggcgagcgggaggcactggcctccagagcccgtggccaaggcgggcctcgcgggcggcgacggagccgggatcggtgcctcagcgttcgggctggagacgaggccaggtctccagctggggtggacgtgcccaccagctgccgaaggccaagacgccaggtccggtggacgtgacaagcaggacatgacatggtccggtgtgacggcgaggacagaggaggcgcgtccggccttcctgaacaccttaggctggtggggctgcggcaagaagcgggtctgtttctttacttcctccacggagtcggcacactatggctgccctctgggctcccagaacccacaacatgaaagaaatggtgctacccagctcaagcctgggcctttgaatccggacacaaaaccctctagcttggaaatgaatatgctgcactttacaaccactgcactacctgactcaggaatcggctctggaaggtgaagctagaggaaccagacctcatcagcccaacatcaaagacaccatcggaacagcagcgcccgcagcacccaccccgcaccggcgactccatcttcatggccaccccctgcggcggacggttgaccaccagccaccacatcatcccagagctgagctcctccagcgggatgacgccgtccccaccacctccctcttcttctttttcatccttctgtctctttgtttctgagctttcctgtctttccttttttctgagagattcaaagcctccacgactctgtttcccccgtcccttctgaatttaatttgcactaagtcatttgcactggttggagttgtggagacggccttgagtctcagtacgagtgtgcgtgagtgtgagccaccttggcaagtgcctgtgcagggcccggccgccctccatctgggccgggtgactgggcgccggctgtgtgcccgaggcctcaccctgccctcgcctagtctggaagctccgaccgacatcacggagcagccttcaagcattccattacgccccatctcgctctgtgcccctccccaccagggcttcagcaggagccctggactcatcatcaataaacactgttacagcaatttgtctcgaggactctgg

SEQ ID NO: 7571 - protein, 256 aa, Homo sapiens; identical to SEQ ID NO: 7529

SEQ ID NO: 7572 - DNA, 1927 bp, Homo sapiens
agttagaaaaagcccgggctaggaccgaggagcagggtgagggagggggtgggatgggtggggggtaacgggggaaactggggaagtggggaaccgaggggcaaccaggggaagatggggtgctggaggagagcttgtgggagccaaggagcaccttggacatctggagtctggcaggagtgatgacgggtggaggggctagctcgaggcagggctggtggggcctgaggccagtgaggagtgtggagtaggcgcccaggcatcgtgcagacagggcgacatcagctggggacgatgggcctgagctagggctggaaagaagggggagccaggcattcatcccggtcacttttggttacaggacgtggcagctggttggacgaggggagctggtgggcagggtttgatcccagggcctgggcaacggaggtgtagctggcagcagcgggcaggtgaggaccccatctgccgggcaggtgagtcccttccctccccaggcctcgcttccccagccttctgaaagaaggaggtttaggggatcgagggctggcggggagaagcagacaccctcccagcagaggggcaggatgggggcaggagagttagcaaaggtgacatcttctcggggggagccgagactgcgcaaggctggggggttatgggcccgttccaggcagaaagagcaagagggcagggagggagcacaggggtggccagcgtagggtccagcacgtggggtggtaccccaggcctgggtcagacagggacatggcaggggacacaggacagaggggtccccagctgccacctcacccaccgcaattcatttagtagcaggcacaggggcagctccggcacggctttctcaggcctatgccggagcctcgagggctggagagcgggaagacaggcagtgctcggggagttgcagcaggacgtcaccaggagggcgaagcggccacgggaggggggccccgggacattgcgcagcaaggaggctgcaggggctcggcctgcgggcgccggtcccacgaggcactgcggcccagggtctggtgcggagagggcccacagtggacttggtgacgctgtatgccctcaccgctcagcccctggggctggcttggcagacactgagtgggacctcactccttccccatccacagaaatggtgctacccagctcaagcctgggcctttgaatccggacacaaaaccctctagcttggaaatgaatatgctgcactttacaaccactgcactacctgactcaggaatcggctctggaaggtgaagctagaggaaccagacctcatcagcccaacatcaaagacaccatcggaacagcagcgcccgcagcacccaccccgcaccggcgactccatcttcatggccaccccctgcggcggacggttgaccaccagccaccacatcatcccagagctgagctcctccagcgggatgacgccgtccccaccacctccctcttcttctttttcatccttctgtctctttgtttctgagctttcctgtctttccttttttctgagagattcaaagcctccacgactctgtttcccccgtcccttctgaatttaatttgcactaagtcatttgcactggttggagttgtggagacggccttgagtctcagtacgagtgtgcgtgagtgtgagccaccttggcaagtgcctgtgcagggcccggccgccctccatctgggccgggtgactgggcgccggctgtgtgcccgaggcctcaccctgccctcgcctagtctggaagctccgaccgacatcacggagcagccttcaagcattccattacgccccatctcgctctgtgcccctccccaccagggcttcagcaggagccctggactcatcatcaataaacactgttacagcaatttgtctcgaggactctgg

SEQ ID NO: 7573 - protein, 180 aa, Homo sapiens
MGPFQAERARGQGGSTGVASVGSSTWGGTPGLGQTGTWQGTQDRGVPSCHLTHRNSFSSRHRGSSGTAFSGLCRSLEGWRAGRQAVLGELQQDVTRRAKRPREGGPGTLRSKEAAGARPAGAGPTRHCGPGSGAERAHSGLGDAVCPHRSAPGAGLADTEWDLTPSPSTEMVLPSSSLGL

SEQ ID NO: 7574 - DNA, 1580 bp, Homo sapiens
gctaatttaggagcttgagatgctaaagagctgggagtgccactgctgctttattctggggtctaggatccttgtgttggctgagataatctgctaatgtgggtgcagcagacatcccgcggtttgtggaatcgataaaggatggggatcaatggtgtttgtgcactgtgcggtctgtgcccaattgcctgccttgtgctgtggaatctgtacatctggccaacatgtgcttgtgtgagcctgacagtgcattttccagagcctcacctcggctctgccctggaggctctgtgctgctggaatcagactcaaggacctcatcagaggaccatggccccgtatcacctgggtcaggcactgaagctgggacaggagagcagagacttccaaaatgagggatccctgtgttctgaggtgatcatgactgggacccaaggactcaagcgcatgctccagagggaatcgtttcccacaaggcctttggcaggaacagggatcctgggagcctgccaagcagagcgcacagtgttcctggagtctcgctgcccagatgccacggaatcagttgaagccaggtctccagctggggtggacgtgcccaccagctgccgaaggccaagacgccaggtccggtggacgtgacaagcaggacatgacatggtccggtgtgacggcgaggacagaggaggcgcgtccggccttcctgaacaccttaggctggtggggctgcggcaagaagcgggtctgtttctttacttcctccacggagtcggcacactatggctgccctctgggctcccagaacccacaacatgaaagaaatggtgctacccagctcaagcctgggcctttgaatccggacacaaaaccctctagcttggaaatgaatatgctgcactttacaaccactgcactacctgactcaggaatcggctctggaaggtgaagctagaggaaccagacctcatcagcccaacatcaaagacaccatcggaacagcagcgcccgcagcacccaccccgcaccggcgactccatcttcatggccaccccctgcggcggacggttgaccaccagccaccacatcatcccagagctgagctcctccagcgggatgacgccgtccccaccacctccctcttcttctttttcatccttctgtctctttgtttctgagctttcctgtctttccttttttctgagagattcaaagcctccacgactctgtttcccccgtcccttctgaatttaatttgcactaagtcatttgcactggttggagttgtggagacggccttgagtctcagtacgagtgtgcgtgagtgtgagccaccttggcaagtgcctgtgcagggcccggccgccctccatctgggccgggtgactgggcgccggctgtgtgcccgaggcctcaccctgccctcgcctagtctggaagctccgaccgacatcacggagcagccttcaagcattccattacgccccatctcgctctgtgcccctccccaccagggcttcagcaggagccctggactcatcatcaataaacactgttacagcaatttgtctcgaggactctgg

SEQ ID NO: 7575 - protein, 166 aa, Homo sapiens
MGINGVCALCGLCPIACLVLWNLYIWPTCACVSLTVHFPEPHLGSALEALCCWNQTQGPHQRTMAPYHLGQALKLGQESRDFQNEGSLCSEVIMTGTQGLKRMLQRESFPTRPLAGTGILGACQAERTVFLESRCPDATESVEARSPAGVDVPTSCRRPRRQVRWT

SEQ ID NO: 7576 - DNA, 547 bp, Homo sapiens
aggtgaagctagaggaaccagacctcatcagcccaacatcaaagacaccatcggaacagcagcgcccgcagcacccaccccgcaccggcgactccatcttcatggccaccccctgcggcggacggttgaccaccagccaccacatcatcccagagctgagctcctccagcgggatgacgccgtccccaccacctccctcttcttctttttcatccttctgtctctttgtttctgagctttcctgtctttccttttttctgagagacggccttgagtctcagtacgagtgtgcgtgagtgtgagccaccttggcaagtgcctgtgcagggcccggccgccctccatctgggccgggtgactgggcgccggctgtgtgcccgaggcctcaccctgccctcgcctagtctggaagctccgaccgacatcacggagcagccttcaagcattccattacgccccatctcgctctgtgcccctccccaccagggcttcagcaggagccctggactcatcatcaataaacactgttacagcaatttgtctcgag

SEQ ID NO: 7577 - protein, 64 aa, Homo sapiens
MATPCGGRLTTSHHIIPELSSSSGMTPSPPPPSSSFSSFCLFVSELSCLSFFLRDGLESQYECA

SEQ ID NO: 7578 - DNA, 518 bp, Homo sapiens
aggtgaagctagaggaaccagacctcatcagcccaacatcaaagacaccatcggaacagcagcgcccgcagcacccaccccgcaccggcgactccatcttcatggccaccccctgcggcggacggttgaccaccagccaccacatcatcccagagctgagctcctccagcgggatgacgcctcccttctgaatttaatttgcactaagtcatttgcactggttggagttgtggagacggccttgagtctcagtacgagtgtgcgtgagtgtgagccaccttggcaagtgcctgtgcagggcccggccgccctccatctgggccgggtgactgggcgccggctgtgtgcccgaggcctcaccctgccctcgcctagtctggaagctccgaccgacatcacggagcagccttcaagcattccattacgccccatctcgctctgtgcccctccccaccagggcttcagcaggagccctggactcatcatcaataaacactgttacagcaatttgtctcgag

SEQ ID NO: 7579 - protein, 171 aa, Homo sapiens
GEARGTRPHQPNIKDTIGTAAPAAPTPHRRLHLHGHPLRRTVDHQPPHHPRAELLQRDDASLLNLICTKSFALVGVVETALSLSTSVRECEPPWQVPVQGPAALHLGRVTGRRLCARGLTLPSPSLEAPTDITEQPSSIPLRPISLCAPPHQGFSRSPGLIINKHCYSNLS

SEQ ID NO: 7580 - DNA, 1773 bp, Homo sapiens
gggaagatggggtgctggaggagagcttgtgggagccaaggagcaccttggacatctggagtctggcaggagtgatgacgggtggaggggctagctcgaggcagggctggtggggcctgaggccagtgaggagtgtggagtaggcgcccaggcatcgtgcagacagggcgacatcagctggggacgatgggcctgagctagggctggaaagaagggggagccaggcattcatcccggtcacttttggttacaggacgtggcagctggttggacgaggggagctggtgggcagggtttgatcccagggcctgggcaacggaggtgtagctggcagcagcgggcaggtgaggaccccatctgccgggcaggtgagtcccttccctccccaggcctcgcttccccagccttctgaaagaaggaggtttaggggatcgagggctggcggggagaagcagacaccctcccagcagaggggcaggatgggggcaggagagttagcaaaggtgacatcttctcggggggagccgagactgcgcaaggctggggggttatgggcccgttccaggcagaaagagcaagagggcagggagggagcacaggggtggccagcgtagggtccagcacgtggggtggtaccccaggcctgggtcagacagggacatggcaggggacacaggacagaggggtccccagctgccacctcacccaccgcaattcatttagtagcaggcacaggggcagctccggcacggctttctcaggcctatgccggagcctcgagggctggagagcgggaagacaggcagtgctcggggagttgcagcaggacgtcaccaggagggcgaagcggccacgggaggggggccccgggacattgcgcagcaaggaggctgcaggggctcggcctgcgggcgccggtcccacgaggcactgcggcccagggtctggtgcggagagggcccacagtggacttggtgacgctgtatgccctcaccgctcagcccctggggctggcttggcagacagtacagcatccaggggagtcaagggcatggggcgagaccagactaggcgaggcgggcggggcggagtgaatgagctctcaggagggaggatggtgcaggcaggggtgaggagcgcagcgggcggcgagcgggaggcactggcctccagagcccgtggccaaggcgggcctcgcgggcggcgacggagccgggatcggtgcctcagcgttcgggctggagacgaggccaggtctccagctggggtggacgtgcccaccagctgccgaaggccaagacgccaggtccggtggacgtgacaagcaggacatgacatggtccggtgtgacggcgaggacagaggaggcgcgtccggccttcctgaacaccttaggctggtggggctgcggcaagaagcggactctgtttcccccgtcccttctgaatttaatttgcactaagtcatttgcactggttggagttgtggagacggccttgagtctcagtacgagtgtgcgtgagtgtgagccaccttggcaagtgcctgtgcagggcccggccgccctccatctgggccgggtgactgggcgccggctgtgtgcccgaggcctcaccctgccctcgcctagtctggaagctccgaccgacatcacggagcagccttcaagcattccattacgccccatctcgctctgtgcccctccccaccagggcttcagcaggagccctggactcatcatcaataaacactgttacagcaatttgtctcgag

SEQ ID NO: 7581 - protein, 256 aa, Homo sapiens; identical to SEQ ID NO: 7529

SEQ ID NO: 7582 - DNA, 347 bp, Homo sapiens
gggaaactggggaagtggggaaccgaggggcaaccaggggaagatggggtgctggaggagagcttgtgggagccaaggagcaccttggacatctggatgtgagccaccttggcaagtgcctgtgcagggcccggccgccctccatctgggccgggtgactgggcgccggctgtgtgcccgaggcctcaccctgccctcgcctagtctggaagctccgaccgacatcacggagcagccttcaagcattccattacgccccatctcgctctgtgcccctccccaccagggcttcagcaggagccctggactcatcatcaataaacactgttacagcaatttgtctcgag

SEQ ID NO: 7583 - protein, 100 aa, Homo sapiens
MGCWRRACGSQGAPWTSGCEPPWQVPVQGPAALHLGRVTGRRLCARGLTLPSPSLEAPTDITEQPSSIPLRPISLCAPPHQGFSRSPGLIINKHCYSNLS

SEQ ID NO: 7584 - DNA, 599 bp, Homo sapiens
agggggtgggatgggtggggggtaacgggggaaactggggaagtggggaaccgaggggcaaccaggggaagatggggtgctggaggagagcttgtgggagccaaggagcaccttggacatctggagtctggcaggagtgatgacgggtggaggggctagctcgaggcagccaccacatcatcccagagctgagctcctccagcgggatgacgccgtccccaccacctccctcttcttctttttcatccttctgtctctttgtttccttctgaatttaatttgcactaagtcatttgcactggttggagttgtggagacggccttgagtctcagtacgagtgtgcgtgagtgtgagccaccttggcaagtgcctgtgcagggcccggccgccctccatctgggccgggtgactgggcgccggctgtgtgcccgaggcctcaccctgccctcgcctagtctggaagctccgaccgacatcacggagcagccttcaagcattccattacgccccatctcgctctgtgcccctccccaccagggcttcagcaggagccctggactcatcatcaataaacactgttacagcaatttgtctcgag

SEQ ID NO: 7585 - protein, 152 aa, Homo sapiens
MTGGGASSRQPPHHPRAELLQRDDAVPTTSLFFFFILLSLCFLLNLICTKSFALVGVVETALSLSTSVRECEPPWQVPVQGPAALHLGRVTGRRLCARGLTLPSPSLEAPTDITEQPSSIPLRPISLCAPPHQGFSRSPGLIINKHCYSNLS

SEQ ID NO: 7586 - DNA, 1456 bp, Homo sapiens
agggtgagggagggggtgggatgggtggggggtaacgggggaaactggggaagtggggaaccgaggggcaaccaggggaagatggggtgctggaggagagcttgtgggagccaaggagcaccttggacatctggagtctggcaggagtgatgacgggtggaggggctagctcgaggcagggctggtggggcctgaggccagtgaggagtgtggagtaggcgcccaggcatcgtgcagacagggcgacatcagctggggacgatgggcctgagctagggctggaaagaagggggagccaggcattcatcccggtcacttttggttacaggacgtggcagctggttggacgaggggagctggtgggcagggtttgatcccagggcctgggcaacggaggtgtagctggcagcagcgggcaggtgaggaccccatctgccgggcaggtgagtcccttccctccccaggcctcgcttccccagccttctgaaagaaggaggtttaggggatcgagggctggcggggagaagcagacaccctcccagcagaggggcaggatgggggcaggagagttagcaaaggtgacatcttctcggggggagccgagactgcgcaaggctggggggttatgggcccgttccaggcagaaagagcaagagggcagggagggagcacaggggtggccagcgtagggtccagcacgtggggtggtaccccaggcctgggtcagacagggacatggcaggggacacaggacagaggggtccccagctgccacctcacccaccgcaattcatttagtagcaggcacaggggcagctccggcacggctttctcaggcctatgccggagcctcgagggctggagagcgggaagacaggcagtgctcggggagttgcagcaggacgtcaccaggagggcgaagcggccacgggaggggggccccgggacattgcgcagcaaggaggctgcaggggctcggcctgcgggcgccggtcccacgaggcactgcggcccagggtctggtgcggagagggcccacagtggacttggtgacgctgtatgccctcaccgctcagcccctggggctggcttggcagacagtacagcatccaggggagtcaagggcatggggcgagaccagataagtcatttgcactggttggagttgtggagacggccttgagtctcagtacgagtgtgcgtgagtgtgagccaccttggcaagtgcctgtgcagggcccggccgccctccatctgggccgggtgactgggcgccggctgtgtgcccgaggcctcaccctgccctcgcctagtctggaagctccgaccgacatcacggagcagccttcaagcattccattacgccccatctcgctctgtgcccctccccaccagggcttcagcaggagccctggactcatcatcaataaacactgttacagcaatttgtctcgag

SEQ ID NO: 7587 - protein, 185 aa, Homo sapiens
MGPFQAERARGQGGSTGVASVGSSTWGGTPGLGQTGTWQGTQDRGVPSCHLTHRNSFSSRHRGSSGTAFSGLCRSLEGWRAGRQAVLGELQQDVTRRAKRPREGGPGTLRSKEAAGARPAGAGPTRHCGPGSGAERAHSGLGDAVCPHRSAPGAGLADSTASRGVKGMGRDQISHLHWLELWRRP

SEQ ID NO: 7588 - DNA, 856 bp, Homo sapiens
acaccttaggctggtggggctgcggcaagaagcgggtctgtttctttacttcctccacggagtcggcacactatggctgccctctgggctcccagaacccacaacatgaaagaaatggtgctacccagctcaagcctgggcctttgaatccggacacaaaaccctctagcttggaaatgaatatgctgcactttacaaccactgcactacctgactcaggaatcggctctggaaggtgaagctagaggaaccagacctcatcagcccaacatcaaagacaccatcggaacagcagcgcccgcagcacccaccccgcaccggcgactccatcttcatggccaccccctgcggcggacggttgaccaccagccaccacatcatcccagagctgagctcctccagcgggatgacgccgtccccaccacctccctcttcttctttttcatccttctgtctctttgtttctgagctttcctgtctttccttttttctgagagattcaaagcctccacgactctgtttcccccgtcccttctgaatttaatttgcactaagtcatttgcactggttggagttgtggagacggccttgagtctcagtacgagtgtgcgtgagtgtgagccaccttggcaagtgcctgtgcagggcccggccgccctccatctgggccgggtgactgggcgccggctgtgtgcccgaggcctcaccctgccctcgcctagtctggaagctccgaccgacatcacggagcagccttcaagcattccattacgccccatctcgctctgtgcccctccccaccagggcttcagcaggagccctggactcatcatcaataaacactgttacagcaatt

SEQ ID NO: 7589 - protein, 67 aa, Homo sapiens; identical to SEQ ID NO: 7513

SEQ ID NO: 7590 - DNA, 733 bp, Homo sapiens
acaccttaggctggtggggctgcggcaagaagcgggtctgtttctttacttcctccacggagtcggcacactatggctgccctctgggctcccagaacccacaacatgaaaggtgaagctagaggaaccagacctcatcagcccaacatcaaagacaccatcggaacagcagcgcccgcagcacccaccccgcaccggcgactccatcttcatggccaccccctgcggcggacggttgaccaccagccaccacatcatcccagagctgagctcctccagcgggatgacgccgtccccaccacctccctcttcttctttttcatccttctgtctctttgtttctgagctttcctgtctttccttttttctgagagattcaaagcctccacgactctgtttcccccgtcccttctgaatttaatttgcactaagtcatttgcactggttggagttgtggagacggccttgagtctcagtacgagtgtgcgtgagtgtgagccaccttggcaagtgcctgtgcagggcccggccgccctccatctgggccgggtgactgggcgccggctgtgtgcccgaggcctcaccctgccctcgcctagtctggaagctccgaccgacatcacggagcagccttcaagcattccattacgccccatctcgctctgtgcccctccccaccagggcttcagcaggagccctggactcatcatcaataaacactgttacagcaatt

SEQ ID NO: 7591 - protein, 90 aa, Homo sapiens; identical to SEQ ID NO: 7515

SEQ ID NO: 7592 - DNA, 936 bp, Homo sapiens
acaccttaggctggtggggctgcggcaagaagcgggtctgtttctttacttcctccacggagtcggcacactatggctgccctctgggctcccagaacccacaacatgaaaggtgaggggcttcctgccacacttggggtggggggcacgcgagaggagctgagtgggacctcactccttccccatccacagaaatggtgctacccagctcaagcctgggcctttgaatccggacacaaaaccctctagcttggaaatgaatatgctgcactttacaaccactgcactacctgactcaggaatcggctctggaaggtgaagctagaggaaccagacctcatcagcccaacatcaaagacaccatcggaacagcagcgcccgcagcacccaccccgcaccggcgactccatcttcatggccaccccctgcggcggacggttgaccaccagccaccacatcatcccagagctgagctcctccagcgggatgacgccgtccccaccacctccctcttcttctttttcatccttctgtctctttgtttctgagctttcctgtctttccttttttctgagagattcaaagcctccacgactctgtttcccccgtcccttctgaatttaatttgcactaagtcatttgcactggttggagttgtggagacggccttgagtctcagtacgagtgtgcgtgagtgtgagccaccttggcaagtgcctgtgcagggcccggccgccctccatctgggccgggtgactgggcgccggctgtgtgcccgaggcctcaccctgccctcgcctagtctggaagctccgaccgacatcacggagcagccttcaagcattccattacgccccatctcgctctgtgcccctccccaccagggcttcagcaggagccctggactcatcatcaataaacactgttacagcaatt

SEQ ID NO: 7593 - protein, 67 aa, Homo sapiens; identical to SEQ ID NO: 7513

SEQ ID NO: 7594 - DNA, 1152 bp, Homo sapiens
caggtctccagctggggtggacgtgcccaccagctgccgaaggccaagacgccaggtccggtggacgtgacaagcaggacatgacatggtccggtgtgacggcgaggacagaggaggcgcgtccggccttcctgaacaccttaggctggtggggctgcggcaagaagcgggtctgtttctttacttcctccacggagtcggcacactatggctgccctctgggctcccagaacccacaacatgaaaggtgaggggcttcctgccacacttggggtggggggcacgcgagaggagctgagtgggacctcactccttccccatccacagaaatggtgctacccagctcaagcctgggcctttgaatccggacacaaaaccctctagcttggaaatgaatatgctgcactttacaaccactgcactacctgactcaggaatcggctctggaaggtgagcaccagcgctccttccggaagcctccaggcccccgagcaccctgcccccatcccacccacgtgtcgctatctctaggtgaagctagaggaaccagacctcatcagcccaacatcaaagacaccatcggaacagcagcgcccgcagcacccaccccgcaccggcgactccatcttcatggccaccccctgcggcggacggttgaccaccagccaccacatcatcccagagctgagctcctccagcgggatgacgccgtccccaccacctccctcttcttctttttcatccttctgtctctttgtttctgagctttcctgtctttccttttttctgagagattcaaagcctccacgactctgtttcccccgtcccttctgaatttaatttgcactaagtcatttgcactggttggagttgtggagacggccttgagtctcagtacgagtgtgcgtgagtgtgagccaccttggcaagtgcctgtgcagggcccggccgccctccatctgggccgggtgactgggcgccggctgtgtgcccgaggcctcaccctgccctcgcctagtctggaagctccgaccgacatcacggagcagccttcaagcattccattacgccccatctcgctctgtgcccctccccaccagggcttcagcaggagccctggactcatcatcaataaacactgttacagcaatt

SEQ ID NO: 7595 - protein, 56 aa, Homo sapiens; identical to SEQ ID NO: 7523

SEQ ID NO: 7596 - DNA, 868 bp, Homo sapiens
caggtctccagctggggtggacgtgcccaccagctgccgaaggccaagacgccaggtccggtggacgtgacaagcaggacatgacatggtccggtgtgacggcgaggacagaggaggcgcgtccggccttcctgaacaccttaggctggtggggctgcggcaagaagcgggtctgtttctttacttcctccacggagtcggcacactatggctgccctctgggctcccagaacccacaacatgaaaggtgaagctagaggaaccagacctcatcagcccaacatcaaagacaccatcggaacagcagcgcccgcagcacccaccccgcaccggcgactccatcttcatggccaccccctgcggcggacggttgaccaccagccaccacatcatcccagagctgagctcctccagcgggatgacgccgtccccaccacctccctcttcttctttttcatccttctgtctctttgtttctgagctttcctgtctttccttttttctgagagattcaaagcctccacgactctgtttcccccgtcccttctgaatttaatttgcactaagtcatttgcactggttggagttgtggagacggccttgagtctcagtacgagtgtgcgtgagtgtgagccaccttggcaagtgcctgtgcagggcccggccgccctccatctgggccgggtgactgggcgccggctgtgtgcccgaggcctcaccctgccctcgcctagtctggaagctccgaccgacatcacggagcagccttcaagcattccattacgccccatctcgctctgtgcccctccccaccagggcttcagcaggagccctggactcatcatcaataaacactgttacagcaatt

SEQ ID NO: 7597 - protein, 90 aa, Homo sapiens; identical to SEQ ID NO: 7515

SEQ ID NO: 7598 - DNA, 1038 bp, Homo sapiens
acaaccaacacgttctccccacacgactctctcgttctccccacagccaggtctccagctggggtggacgtgcccaccagctgccgaaggccaagacgccaggtccggtggacgtgacaagcaggacatgacatggtccggtgtgacggcgaggacagaggaggcgcgtccggccttcctgaacaccttaggctggtggggctgcggcaagaagcgggtctgtttctttacttcctccacggagtcggcacactatggctgccctctgggctcccagaacccacaacatgaaagaaatggtgctacccagctcaagcctgggcctttgaatccggacacaaaaccctctagcttggaaatgaatatgctgcactttacaaccactgcactacctgactcaggaatcggctctggaaggtgaagctagaggaaccagacctcatcagcccaacatcaaagacaccatcggaacagcagcgcccgcagcacccaccccgcaccggcgactccatcttcatggccaccccctgcggcggacggttgaccaccagccaccacatcatcccagagctgagctcctccagcgggatgacgccgtccccaccacctccctcttcttctttttcatccttctgtctctttgtttctgagctttcctgtctttccttttttctgagagattcaaagcctccacgactctgtttcccccgtcccttctgaatttaatttgcactaagtcatttgcactggttggagttgtggagacggccttgagtctcagtacgagtgtgcgtgagtgtgagccaccttggcaagtgcctgtgcagggcccggccgccctccatctgggccgggtgactgggcgccggctgtgtgcccgaggcctcaccctgccctcgcctagtctggaagctccgaccgacatcacggagcagccttcaagcattccattacgccccatctcgctctgtgcccctccccaccagggcttcagcaggagccctggactcatcatcaataaacactgttacagcaatt

SEQ ID NO: 7599 - protein, 97 aa, Homo sapiens; identical to SEQ ID NO: 7525

SEQ ID NO: 7600 - DNA, 2119 bp, Homo sapiens
gggaagatggggtgctggaggagagcttgtgggagccaaggagcaccttggacatctggagtctggcaggagtgatgacgggtggaggggctagctcgaggcagggctggtggggcctgaggccagtgaggagtgtggagtaggcgcccaggcatcgtgcagacagggcgacatcagctggggacgatgggcctgagctagggctggaaagaagggggagccaggcattcatcccggtcacttttggttacaggacgtggcagctggttggacgaggggagctggtgggcagggtttgatcccagggcctgggcaacggaggtgtagctggcagcagcgggcaggtgaggaccccatctgccgggcaggtgagtcccttccctccccaggcctcgcttccccagccttctgaaagaaggaggtttaggggatcgagggctggcggggagaagcagacaccctcccagcagaggggcaggatgggggcaggagagttagcaaaggtgacatcttctcggggggagccgagactgcgcaaggctggggggttatgggcccgttccaggcagaaagagcaagagggcagggagggagcacaggggtggccagcgtagggtccagcacgtggggtggtaccccaggcctgggtcagacagggacatggcaggggacacaggacagaggggtccccagctgccacctcacccaccgcaattcatttagtagcaggcacaggggcagctccggcacggctttctcaggcctatgccggagcctcgagggctggagagcgggaagacaggcagtgctcggggagttgcagcaggacgtcaccaggagggcgaagcggccacgggaggggggccccgggacattgcgcagcaaggaggctgcaggggctcggcctgcgggcgccggtcccacgaggcactgcggcccagggtctggtgcggagagggcccacagtggacttggtgacgctgtatgccctcaccgctcagcccctggggctggcttggcagacagtacagcatccaggggagtcaagggcatggggcgagaccagactaggcgaggcgggcggggcggagtgaatgagctctcaggagggaggatggtgcaggcaggggtgaggagcgcagcgggcggcgagcgggaggcactggcctccagagcccgtggccaaggcgggcctcgcgggcggcgacggagccgggatcggtgcctcagcgttcgggctggagacgaggccaggtctccagctggggtggacgtgcccaccagctgccgaaggccaagacgccaggtccggtggacgtgacaagcaggacatgacatggtccggtgtgacggcgaggacagaggaggcgcgtccggccttcctgaacaccttaggctggtggggctgcggcaagaagcgggtctgtttctttacttcctccacggagtcggcacactatggctgccctctgggctcccagaacccacaacatgaaaggtgaagctagaggaaccagacctcatcagcccaacatcaaagacaccatcggaacagcagcgcccgcagcacccaccccgcaccggcgactccatcttcatggccaccccctgcggcggacggttgaccaccagccaccacatcatcccagagctgagctcctccagcgggatgacgccgtccccaccacctccctcttcttctttttcatccttctgtctctttgtttctgagctttcctgtctttccttttttctgagagattcaaagcctccacgactctgtttcccccgtcccttctgaatttaatttgcactaagtcatttgcactggttggagttgtggagacggccttgagtctcagtacgagtgtgcgtgagtgtgagccaccttggcaagtgcctgtgcagggcccggccgccctccatctgggccgggtgactgggcgccggctgtgtgcccgaggcctcaccctgccctcgcctagtctggaagctccgaccgacatcacggagcagccttcaagcattccattacgccccatctcgctctgtgcccctccccaccagggcttcagcaggagccctggactcatcatcaataaacactgttacagcaatt

SEQ ID NO: 7601 - protein, 256 aa, Homo sapiens; identical to SEQ ID NO: 7529

SEQ ID NO: 7602 - DNA, 2323 bp, Homo sapiens
gggaagatggggtgctggaggagagcttgtgggagccaaggagcaccttggacatctggagtctggcaggagtgatgacgggtggaggggctagctcgaggcagggctggtggggcctgaggccagtgaggagtgtggagtaggcgcccaggcatcgtgcagacagggcgacatcagctggggacgatgggcctgagctagggctggaaagaagggggagccaggcattcatcccggtcacttttggttacaggacgtggcagctggttggacgaggggagctggtgggcagggtttgatcccagggcctgggcaacggaggtgtagctggcagcagcgggcaggtgaggaccccatctgccgggcaggtgagtcccttccctccccaggcctcgcttccccagccttctgaaagaaggaggtttaggggatcgagggctggcggggagaagcagacaccctcccagcagaggggcaggatgggggcaggagagttagcaaaggtgacatcttctcggggggagccgagactgcgcaaggctggggggttatgggcccgttccaggcagaaagagcaagagggcagggagggagcacaggggtggccagcgtagggtccagcacgtggggtggtaccccaggcctgggtcagacagggacatggcaggggacacaggacagaggggtccccagctgccacctcacccaccgcaattcatttagtagcaggcacaggggcagctccggcacggctttctcaggcctatgccggagcctcgagggctggagagcgggaagacaggcagtgctcggggagttgcagcaggacgtcaccaggagggcgaagcggccacgggaggggggccccgggacattgcgcagcaaggaggctgcaggggctcggcctgcgggcgccggtcccacgaggcactgcggcccagggtctggtgcggagagggcccacagtggacttggtgacgctgtatgccctcaccgctcagcccctggggctggcttggcagacagtacagcatccaggggagtcaagggcatggggcgagaccagactaggcgaggcgggcggggcggagtgaatgagctctcaggagggaggatggtgcaggcaggggtgaggagcgcagcgggcggcgagcgggaggcactggcctccagagcccgtggccaaggcgggcctcgcgggcggcgacggagccgggatcggtgcctcagcgttcgggctggagacgaggccaggtctccagctggggtggacgtgcccaccagctgccgaaggccaagacgccaggtccggtggacgtgacaagcaggacatgacatggtccggtgtgacggcgaggacagaggaggcgcgtccggccttcctgaacaccttaggctggtggggctgcggcaagaagcgggtctgtttctttacttcctccacggagtcggcacactatggctgccctctgggctcccagaacccacaacatgaaagaaatggtgctacccagctcaagcctgggcctttgaatccggacacaaaaccctctagcttggaaatgaatatgctgcactttacaaccactgcactacctgactcaggaatcggctctggaaggtgagcaccagcgctccttccggaagcctccaggcccccgagcaccctgcccccatcccacccacgtgtcgctatctctaggtgaagctagaggaaccagacctcatcagcccaacatcaaagacaccatcggaacagcagcgcccgcagcacccaccccgcaccggcgactccatcttcatggccaccccctgcggcggacggttgaccaccagccaccacatcatcccagagctgagctcctccagcgggatgacgccgtccccaccacctccctcttcttctttttcatccttctgtctctttgtttctgagctttcctgtctttccttttttctgagagattcaaagcctccacgactctgtttcccccgtcccttctgaatttaatttgcactaagtcatttgcactggttggagttgtggagacggccttgagtctcagtacgagtgtgcgtgagtgtgagccaccttggcaagtgcctgtgcagggcccggccgccctccatctgggccgggtgactgggcgccggctgtgtgcccgaggcctcaccctgccctcgcctagtctggaagctccgaccgacatcacggagcagccttcaagcattccattacgccccatctcgctctgtgcccctccccaccagggcttcagcaggagccctggactcatcatcaataaacactgttacagcaatt

SEQ ID NO: 7603 - protein, 256 aa, Homo sapiens; identical to SEQ ID NO: 7529

SEQ ID NO: 7604 - DNA, 563 bp, Homo sapiens
ggggtgggatgggtggggggtaacgggggaaactggggaagtggggaaccgaggggcaaccaggggaagatggggtgctggaggagagcttgtgggagccaaggagcaccttggacatctggagtctggcaggaagttagcaaaggtgacatcttctcggggggagccgagactgcctttcctgtctttccttttttctgagagattcaaagcctccacgactctgtttcccccgtcccttctgaatttaatttgcactaagtcatttgcactggttggagttgtggagacggccttgagtctcagtacgagtgtgcgtgagtgtgagccaccttggcaagtgcctgtgcagggcccggccgccctccatctgggccgggtgactgggcgccggctgtgtgcccgaggcctcaccctgccctcgcctagtctggaagctccgaccgacatcacggagcagccttcaagcattccattacgccccatctcgctctgtgcccctccccaccagggcttcagcaggagccctggactcatcatcaataaacactgttacagcaatt

SEQ ID NO: 7605 - protein, 43 aa, Homo sapiens; identical to SEQ ID NO: 7535

SEQ ID NO: 7606 - DNA, 1559 bp, Homo sapiens
ggggtgggatgggtggggggtaacgggggaaactggggaagtggggaaccgaggggcaaccaggggaagatggggtgctggaggagagcttgtgggagccaaggagcaccttggacatctggagtctggcaggattgcagcaggacgtcaccaggagggcgaagcggccacgggaggggggccccgggacattgcgcagcaaggaggctgcaggggctcggcctgcgggcgccggtcccacgaggcactgcggcccagggtctggtgcggagagggcccacagtggacttggtgacgctgtatgccctcaccgctcagcccctggggctggcttggcagacagtacagcatccaggggagtcaagggcatggggcgagaccagactaggcgaggcgggcggggcggagtgaatgagctctcaggagggaggatggtgcaggcaggggtgaggagcgcagcgggcggcgagcgggaggcactggcctccagagcccgtggccaaggcgggcctcgcgggcggcgacggagccgggatcggtgcctcagcgttcgggctggagacgaggccaggtctccagctggggtggacgtgcccaccagctgccgaaggccaagacgccaggtccggtggacgtgacaagcaggacatgacatggtccggtgtgacggcgaggacagaggaggcgcgtccggccttcctgaacaccttaggctggtggggctgcggcaagaagcgggtctgtttctttacttcctccacggagtcggcacactatggctgccctctgggctcccagaacccacaacatgaaagaaatggtgctacccagctcaagcctgggcctttgaatccggacacaaaaccctctagcttggaaatgaatatgctgcactttacaaccactgcactacctgactcaggaatcggctctggaaggtgaagctagaggaaccagacctcatcagcccaacatcaaagacaccatcggaacagcagcgcccgcagcacccaccccgcaccggcgactccatcttcatggccaccccctgcggcggacggttgaccaccagccaccacatcatcccagagctgagctcctccagcgggatgacgccgtccccaccacctccctcttcttctttttcatccttctgtctctttgtttctgagctttcctgtctttccttttttctgagagattcaaagcctccacgactctgtttcccccgtcccttctgaatttaatttgcactaagtcatttgcactggttggagttgtggagacggccttgagtctcagtacgagtgtgcgtgagtgtgagccaccttggcaagtgcctgtgcagggcccggccgccctccatctgggccgggtgactgggcgccggctgtgtgcccgaggcctcaccctgccctcgcctagtctggaagctccgaccgacatcacggagcagccttcaagcattccattacgccccatctcgctctgtgcccctccccaccagggcttcagcaggagccctggactcatcatcaataaacactgttacagcaatt

SEQ ID NO: 7607 - protein, 113 aa, Homo sapiens; identical to SEQ ID NO: 7539

SEQ ID NO: 7608 - DNA, 1884 bp, Homo sapiens
ggggtgggatgggtggggggtaacgggggaaactggggaagtggggaaccgaggggcaaccaggggaagatggggtgctggaggagagcttgtgggagccaaggagcaccttggacatctggagtctggcaggaagttagcaaaggtgacatcttctcggggggagccgagactgcgcaaggctggggggttatgggcccgttccaggcagaaagagcaagagggcagggagggagcacaggggtggccagcgtagggtccagcacgtggggtggtaccccaggcctgggtcagacagggacatggcaggggacacaggacagaggggtccccagctgccacctcacccaccgcaattcatttagtagcaggcacaggggcagctccggcacggctttctcaggcctatgccggagcctcgagggctggagagcgggaagacaggcagtgctcggggagttgcagcaggacgtcaccaggagggcgaagcggccacgggaggggggccccgggacattgcgcagcaaggaggctgcaggggctcggcctgcgggcgccggtcccacgaggcactgcggcccagggtctggtgcggagagggcccacagtggacttggtgacgctgtatgccctcaccgctcagcccctggggctggcttggcagacagtacagcatccaggggagtcaagggcatggggcgagaccagactaggcgaggcgggcggggcggagtgaatgagctctcaggagggaggatggtgcaggcaggggtgaggagcgcagcgggcggcgagcgggaggcactggcctccagagcccgtggccaaggcgggcctcgcgggcggcgacggagccgggatcggtgcctcagcgttcgggctggagacgaggccaggtctccagctggggtggacgtgcccaccagctgccgaaggccaagacgccaggtccggtggacgtgacaagcaggacatgacatggtccggtgtgacggcgaggacagaggaggcgcgtccggccttcctgaacaccttaggctggtggggctgcggcaagaagcgggtctgtttctttacttcctccacggagtcggcacactatggctgccctctgggctcccagaacccacaacatgaaagaaatggtgctacccagctcaagcctgggcctttgaatccggacacaaaaccctctagcttggaaatgaatatgctgcactttacaaccactgcactacctgactcaggaatcggctctggaaggtgaagctagaggaaccagacctcatcagcccaacatcaaagacaccatcggaacagcagcgcccgcagcacccaccccgcaccggcgactccatcttcatggccaccccctgcggcggacggttgaccaccagccaccacatcatcccagagctgagctcctccagcgggatgacgccgtccccaccacctccctcttcttctttttcatccttctgtctctttgtttctgagctttcctgtctttccttttttctgagagattcaaagcctccacgactctgtttcccccgtcccttctgaatttaatttgcactaagtcatttgcactggttggagttgtggagacggccttgagtctcagtacgagtgtgcgtgagtgtgagccaccttggcaagtgcctgtgcagggcccggccgccctccatctgggccgggtgactgggcgccggctgtgtgcccgaggcctcaccctgccctcgcctagtctggaagctccgaccgacatcacggagcagccttcaagcattccattacgccccatctcgctctgtgcccctccccaccagggcttcagcaggagccctggactcatcatcaataaacactgttacagcaatt

SEQ ID NO: 7609 - protein, 297 aa, Homo sapiens; identical to SEQ ID NO: 7537

SEQ ID NO: 7610 - DNA, 2091 bp, Homo sapiens
gagggagggggtgggatgggtggggggtaacgggggaaactggggaagtggggaaccgaggggcaaccaggggaagatggggtgctggaggagagcttgtgggagccaaggagcaccttggacatctggagtctggcaggagtgatgacgggtggaggggctagctcgaggcagggctggtggggcctgaggccagtgaggagtgtggagtaggcgcccaggcatcgtgcagacagggcgacatcagctggggacgatgggcctgagctagggctggaaagaagggggagccaggcattcatcccggtcacttttggttacaggacgtggcagctggttggacgaggggagctggtgggcagggtttgatcccagggcctgggcaacggaggtgtagctggcagcagcgggcaggtgaggaccccatctgccgggcaggtgagtcccttccctccccaggcctcgcttccccagccttctgaaagaaggaggtttaggggatcgagggctggcggggagaagcagacaccctcccagcagaggggcaggatgggggcaggagagttagcaaaggtgacatcttctcggggggagccgagactgcgcaaggctggggggttatgggcccgttccaggcagaaagagcaagagggcagggagggagcacaggggtggccagcgtagggtccagcacgtggggtggtaccccaggcctgggtcagacagggacatggcaggggacacaggacagaggggtccccagctgccacctcacccaccgcaattcatttagtagcaggcacaggggcagctccggcacggctttctcaggcctatgccggagcctcgagggctggagagcgggaagacaggcatacagcatccaggggagtcaagggcatggggcgagaccagactaggcgaggcgggcggggcggagtgaatgagctctcaggagggaggatggtgcaggcaggggtgaggagcgcagcgggcggcgagcgggaggcactggcctccagagcccgtggccaaggcgggcctcgcgggcggcgacggagccgggatcggtgcctcagcgttcgggctggagacgaggccaggtctccagctggggtggacgtgcccaccagctgccgaaggccaagacgccaggtccggtggacgtgacaagcaggacatgacatggtccggtgtgacggcgaggacagaggaggcgcgtccggccttcctgaacaccttaggctggtggggctgcggcaagaagcgggtctgtttctttacttcctccacggagtcggcacactatggctgccctctgggctcccagaacccacaacatgaaagaaatggtgctacccagctcaagcctgggcctttgaatccggacacaaaaccctctagcttggaaatgaatatgctgcactttacaaccactgcactacctgactcaggaatcggctctggaaggtgaagctagaggaaccagacctcatcagcccaacatcaaagacaccatcggaacagcagcgcccgcagcacccaccccgcaccggcgactccatcttcatggccaccccctgcggcggacggttgaccaccagccaccacatcatcccagagctgagctcctccagcgggatgacgccgtccccaccacctccctcttcttctttttcatccttctgtctctttgtttctgagctttcctgtctttccttttttctgagagattcaaagcctccacgactctgtttcccccgtcccttctgaatttaatttgcactaagtcatttgcactggttggagttgtggagacggccttgagtctcagtacgagtgtgcgtgagtgtgagccaccttggcaagtgcctgtgcagggcccggccgccctccatctgggccgggtgactgggcgccggctgtgtgcccgaggcctcaccctgccctcgcctagtctggaagctccgaccgacatcacggagcagccttcaagcattccattacgccccatctcgctctgtgcccctccccaccagggcttcagcaggagccctggactcatcatcaataaacactgttacagcaatt

SEQ ID NO: 7611 - protein, 99 aa, Homo sapiens; identical to SEQ ID NO: 7543

SEQ ID NO: 7612 - DNA, 1981 bp, Homo sapiens
gtgagggagggggtgggatgggtggggggtaacgggggaaactggggaagtggggaaccgaggggcaaccaggggaagatggggtgctggaggagagcttgtgggagccaaggagcaccttggacatctggagtctggcaggagtgatgacgggtggaggggctagctcgaggcagggctggtggggcctgaggccagtgaggagtgtggagtaggcgcccaggcatcgtgcagacagggcgacatcagctggggacgatgggcctgagctagggctggaaagaagggggagccaggcattcatcccggtcacttttggttacaggacgtggcagctggttggacgaggggagctggtgggcagggtttgatcccagggcctgggcaacggaggtgtagctggcagcagcgggcaggtgaggaccccatctgccgggcaggtgagtcccttccctccccaggcctcgcttccccagccttctgaaagaaggaggtttaggggatcgagggctggcggggagaagcagacaccctcccagcagaggggcaggatgggggcaggagagttagcaaaggtgacatcttctcggggggagccgagactgcgcaaggctggggggttatgggcccgttccaggcagaaagagcaagagggcagggagggagcacaggggtggccagcgtagggtccagcacgtggggtggtaccccaggcctgggtcagacagggacatggcaggggacacaggacagaggggtccccagctgccacctcacccaccgcaattcatttagtagcaggcacaggggcagctccggcacggctttctcaggcctatgccggagcctcgagggctggagagcgggaagacaggcagtgctcggggagttgcagcaggacgtcaccaggagggcgaagcggccacgggaggggggccccgggacattgcgcagcaaggaggctgcaggggctcggcctgcgggcgccggtcccacgaggcactgcggcccagggtctggtgcggagagggcccacagtggacttggtgacgctgtatgccctcaccgctcagcccctggggctggcttggcagacagtacagtccggtggacgtgacaagcagaacaccttaggctggtggggctgcggcaagaagcgggtctgtttctttacttcctccacggagtcggcacactatggctgccctctgggctcccagaacccacaacatgaaagaaatggtgctacccagctcaagcctgggcctttgaatccggacacaaaaccctctagcttggaaatgaatatgctgcactttacaaccactgcactacctgactcaggaatcggctctggaaggtgaagctagaggaaccagacctcatcagcccaacatcaaagacaccatcggaacagcagcgcccgcagcacccaccccgcaccggcgactccatcttcatggccaccccctgcggcggacggttgaccaccagccaccacatcatcccagagctgagctcctccagcgggatgacgccgtccccaccacctccctcttcttctttttcatccttctgtctctttgtttctgagctttcctgtctttccttttttctgagagattcaaagcctccacgactctgtttcccccgtcccttctgaatttaatttgcactaagtcatttgcactggttggagttgtggagacggccttgagtctcagtacgagtgtgcgtgagtgtgagccaccttggcaagtgcctgtgcagggcccggccgccctccatctgggccgggtgactgggcgccggctgtgtgcccgaggcctcaccctgccctcgcctagtctggaagctccgaccgacatcacggagcagccttcaagcattccattacgccccatctcgctctgtgcccctccccaccagggcttcagcaggagccctggactcatcatcaataaacactgttacagcaatt

SEQ ID NO: 7613 - protein, 164 aa, Homo sapiens; identical to SEQ ID NO: 7545

SEQ ID NO: 7614 - DNA, 958 bp, Homo sapiens
agggtgagggagggggtgggatgggtggggggtaacgggggaaactggggaagtggggaaccgaggggcaaccaggggaagatggggtgctggaggagagcttgtgggagccaaggagcaccttggacatctggagtctggcaggagtgatgacgggtggaggggctagctcgaggcagggctggtggggcctgaggccagtgaggagtgtggaaaatggtgctacccagctcaagcctgggcctttgaatccggacacaaaaccctctagcttggaaatgaatatgctgcactttacaaccactgcactacctgactcaggaatcggctctggaaggtgaagctagaggaaccagacctcatcagcccaacatcaaagacaccatcggaacagcagcgcccgcagcacccaccccgcaccggcgactccatcttcatggccaccccctgcggcggacggttgaccaccagccaccacatcatcccagagctgagctcctccagcgggatgacgccgtccccaccacctccctcttcttctttttcatccttctgtctctttgtttctgagctttcctgtctttccttttttctgagagattcaaagcctccacgactctgtttcccccgtcccttctgaatttaatttgcactaagtcatttgcactggttggagttgtggagacggccttgagtctcagtacgagtgtgcgtgagtgtgagccaccttggcaagtgcctgtgcagggcccggccgccctccatctgggccgggtgactgggcgccggctgtgtgcccgaggcctcaccctgccctcgcctagtctggaagctccgaccgacatcacggagcagccttcaagcattccattacgccccatctcgctctgtgcccctccccaccagggcttcagcaggagccctggactcatcatcaataaacactgttacagcaatt

SEQ ID NO: 7615 - protein, 63 aa, Homo sapiens; identical to SEQ ID NO: 7551

SEQ ID NO: 7616 - DNA, 2096 bp, Homo sapiens
agggtgagggagggggtgggatgggtggggggtaacgggggaaactggggaagtggggaaccgaggggcaaccaggggaagatggggtgctggaggagagcttgtgggagccaaggagcaccttggacatctggagtctggcaggaggtttgatcccagggcctgggcaacggaggtgtagctggcagcagcgggcaggtgaggaccccatctgccgggcaggtgagtcccttccctccccaggcctcgcttccccagccttctgaaagaaggaggtttaggggatcgagggctggcggggagaagcagacaccctcccagcagaggggcaggatgggggcaggagagttagcaaaggtgacatcttctcggggggagccgagactgcgcaaggctggggggttatgggcccgttccaggcagaaagagcaagagggcagggagggagcacaggggtggccagcgtagggtccagcacgtggggtggtaccccaggcctgggtcagacagggacatggcaggggacacaggacagaggggtccccagctgccacctcacccaccgcaattcatttagtagcaggcacaggggcagctccggcacggctttctcaggcctatgccggagcctcgagggctggagagcgggaagacaggcagtgctcggggagttgcagcaggacgtcaccaggagggcgaagcggccacgggaggggggccccgggacattgcgcagcaaggaggctgcaggggctcggcctgcgggcgccggtcccacgaggcactgcggcccagggtctggtgcggagagggcccacagtggacttggtgacgctgtatgccctcaccgctcagcccctggggctggcttggcagacagtacagcatccaggggagtcaagggcatggggcgagaccagactaggcgaggcgggcggggcggagtgaatgagctctcaggagggaggatggtgcaggcaggggtgaggagcgcagcgggcggcgagcgggaggcactggcctccagagcccgtggccaaggcgggcctcgcgggcggcgacggagccgggatcggtgcctcagcgttcgggctggagacgaggccaggtctccagctggggtggacgtgcccaccagctgccgaaggccaagacgccaggtccggtggacgtgacaagcaggacatgacatggtccggtgtgacggcgaggacagaggaggcgcgtccggccttcctgaacaccttaggctggtggggctgcggcaagaagcgggtctgtttctttacttcctccacggagtcggcacactatggctgccctctgggctcccagaacccacaacatgaaagaaatggtgctacccagctcaagcctgggcctttgaatccggacacaaaaccctctagcttggaaatgaatatgctgcactttacaaccactgcactacctgactcaggaatcggctctggaaggtgaagctagaggaaccagacctcatcagcccaacatcaaagacaccatcggaacagcagcgcccgcagcacccaccccgcaccggcgactccatcttcatggccaccccctgcggcggacggttgaccaccagccaccacatcatcccagagctgagctcctccagcgggatgacgccgtccccaccacctccctcttcttctttttcatccttctgtctctttgtttctgagctttcctgtctttccttttttctgagagattcaaagcctccacgactctgtttcccccgtcccttctgaatttaatttgcactaagtcatttgcactggttggagttgtggagacggccttgagtctcagtacgagtgtgcgtgagtgtgagccaccttggcaagtgcctgtgcagggcccggccgccctccatctgggccgggtgactgggcgccggctgtgtgcccgaggcctcaccctgccctcgcctagtctggaagctccgaccgacatcacggagcagccttcaagcattccattacgccccatctcgctctgtgcccctccccaccagggcttcagcaggagccctggactcatcatcaataaacactgttacagcaatt

SEQ ID NO: 7617 - protein, 256 aa, Homo sapiens; identical to SEQ ID NO: 7529

SEQ ID NO: 7618 - DNA, 1605 bp, Homo sapiens
agggtgagggagggggtgggatgggtggggggtaacgggggaaactggggaagtggggaaccgaggggcaaccaggggaagatggggtgctggaggagagcttgtgggagccaaggagcaccttggacatctggagtctggcaggagtgatgacgggtggaggggctagctcgaggcagggctggtggggcctgaggccagtgaggagtgtggagtaggcgcccaggcatcgtgcagacagggcgacatcagctggggacgatgggcctgagctagggctggaaagaagggggagccaggcattcatcccggtcacttttggttacaggacgtggcagctggttggacgaggggagctggtgggcagggtttgatcccagggcctgggcaacggaggtgtagctggcagcagcgggcaggtgaggaccccatctgccgggcaggtgagtcccttccctccccaggcctcgcttccccagccttctgaaagaaggaggtttaggggatcgagggctggcggggagaagcagacaccctcccagcagaggggcaggatgggggcaggagagttagcaaaggtgacatcttctcggggggagccgagactgcgcaaggctggggggttatgggcccgttccaggcagaaagagcaagagggcagggagggagcacaggggtggccagcgtagggtccagcacgtggggtggtaccccaggcctgggtcagacagggacatggcaggggacacaggacagaggggtccccagctgccacctcacccaccgcaattcatttagtagcaggcacaggggcagctccggcacggctttctcaggcctatgccggagcctcgagggctggagagcgggaagacaggcagtgctcggggagttgcagcaggacgtcaccaggagggcgaagcggccacgggaggggggccccgggacattgcgcagcaaggaggctgcaggggctcggcctgcgggcgccggtcccacgaggcactgcggcccagggtctggtgcggagagggcccacagtggacttggtgacgctgtatgccctcaccgctcagcccctggggctggcttggcagacagtacagcatccaggggagtcaagggcatggggcgagaccagactaggcgaggcgggcggggcggagtgaatgagctccctcttcttctttttcatccttctgtctctttgtttctgagctttcctgtctttccttttttctgagagattcaaagcctccacgactctgtttcccccgtcccttctgaatttaatttgcactaagtcatttgcactggttggagttgtggagacggccttgagtctcagtacgagtgtgcgtgagtgtgagccaccttggcaagtgcctgtgcagggcccggccgccctccatctgggccgggtgactgggcgccggctgtgtgcccgaggcctcaccctgccctcgcctagtctggaagctccgaccgacatcacggagcagccttcaagcattccattacgccccatctcgctctgtgcccctccccaccagggcttcagcaggagccctggactcatcatcaataaacactgttacagcaatt

SEQ ID NO: 7619 - protein, 205 aa, Homo sapiens; identical to SEQ ID NO: 7549

SEQ ID NO: 7620 - DNA, 1186 bp, Homo sapiens
agggtgagggagggggtgggatgggtggggggtaacgggggaaactggggaagtggggaaccgaggggcaaccaggggaagatggggtgctggaggagagcttgtgggagccaaggagcaccttggacatctggagtctggcaggagtgatgacgggtggaggggctagctcgaggcagggctggtggggcctgaggccagtgaggagtgtggagacgtgcccaccagctgccgaaggccaagacgccaggtccggtggacgtgacaagcaggacatgacatggtccggtgtgacggcgaggacagaggaggcgcgtccggccttcctgaacaccttaggctggtggggctgcggcaagaagcgggtctgtttctttacttcctccacggagtcggcacactatggctgccctctgggctcccagaacccacaacatgaaagaaatggtgctacccagctcaagcctgggcctttgaatccggacacaaaaccctctagcttggaaatgaatatgctgcactttacaaccactgcactacctgactcaggaatcggctctggaaggtgaagctagaggaaccagacctcatcagcccaacatcaaagacaccatcggaacagcagcgcccgcagcacccaccccgcaccggcgactccatcttcatggccaccccctgcggcggacggttgaccaccagccaccacatcatcccagagctgagctcctccagcgggatgacgccgtccccaccacctccctcttcttctttttcatccttctgtctctttgtttctgagctttcctgtctttccttttttctgagagattcaaagcctccacgactctgtttcccccgtcccttctgaatttaatttgcactaagtcatttgcactggttggagttgtggagacggccttgagtctcagtacgagtgtgcgtgagtgtgagccaccttggcaagtgcctgtgcagggcccggccgccctccatctgggccgggtgactgggcgccggctgtgtgcccgaggcctcaccctgccctcgcctagtctggaagctccgaccgacatcacggagcagccttcaagcattccattacgccccatctcgctctgtgcccctccccaccagggcttcagcaggagccctggactcatcatcaataaacactgttacagcaatt

SEQ ID NO: 7621 - protein, 139 aa, Homo sapiens; identical to SEQ ID NO: 7555

SEQ ID NO: 7622 - DNA, 1878 bp, Homo sapiens
agggtgagggagggggtgggatgggtggggggtaacgggggaaactggggaagtggggaaccgaggggcaaccaggggaagatggggtgctggaggagagcttgtgggagccaaggagcaccttggacatctggagtctggcaggagtgatgacgggtggaggggctagctcgaggcagggctggtggggcctgaggccagtgaggagtgtggagtaggcgcccaggcatcgtgcagacagggcgacatcagctggggacgatgggcctgagctagggctggaaagaagggggagccaggcattcatcccggtcacttttggttacaggacgtggcagctggttggacgaggggagctggtgggcagggtttgatcccagggcctgggcaacggaggtgtagctggcagcagcgggcaggtgaggaccccatctgccgggcaggtgagtcccttccctccccaggcctcgcttccccagccttctgaaagaaggaggtttaggggatcgagggctggcggggagaagcagacaccctcccagcagaggggcaggatgggggcaggagagttagcaaaggtgacatcttctcggggggagccgagactgcgcaaggctggggggttatgggcccgttccaggcagaaagagcaagagggcagggagggagcacaggggtggccagcgtagggtccagcacgtggggtggtaccccaggcctgggtcagacagggacatggcaggggacacaggacagaggggtccccagctgccacctcacccaccgcaattcatttagtagcaggcacaggggcagctccggcacggctttctcaggcctatgccggagcctcgagggctggagagcgggaagacaggcagtgctcggggagttgcagcaggacgtcaccaggagggcgaagcggccacgggaggggggccccgggacattgcgcagcaaggaggctgcaggggctcggcctgcgggcgccggtcccacgaggcactgcggcccagggtctggtgcggagagggcccacagtggacttggtgacgctgtatgccctcaccgctcagcccctggggctggcttggcagacagtacagcatccaggggaaacccacaacatgaaagaaatggtgctacccagctcaagcctgggcctttgaatccggacacaaaaccctctagcttggaaatgaatatgctgcactttacaaccactgcactacctgactcaggaatcggctctggaaggtgaagctagaggaaccagacctcatcagcccaacatcaaagacaccatcggaacagcagcgcccgcagcacccaccccgcaccggcgactccatcttcatggccaccccctgcggcggacggttgaccaccagccaccacatcatcccagagctgagctcctccagcgggatgacgccgtccccaccacctccctcttcttctttttcatccttctgtctctttgtttctgagctttcctgtctttccttttttctgagagattcaaagcctccacgactctgtttcccccgtcccttctgaatttaatttgcactaagtcatttgcactggttggagttgtggagacggccttgagtctcagtacgagtgtgcgtgagtgtgagccaccttggcaagtgcctgtgcagggcccggccgccctccatctgggccgggtgactgggcgccggctgtgtgcccgaggcctcaccctgccctcgcctagtctggaagctccgaccgacatcacggagcagccttcaagcattccattacgccccatctcgctctgtgcccctccccaccagggcttcagcaggagccctggactcatcatcaataaacactgttacagcaatt

SEQ ID NO: 7623 - protein, 211 aa, Homo sapiens; identical to SEQ ID NO: 7557

SEQ ID NO: 7624 - DNA, 846 bp, Homo sapiens
aggaccgaggagcagggtgagggagggggtgggatgggtggggggtaacgggggaaactggggaagtggggaaccgaggggcaaccaggggaagatggggtgctggaggagagcttgtgggagccaaggagcaccttggacatctggagtctggcaggagtgatgacgggtggaggggctagctcgaggcagggctggtggggcctgaggccagtgaggagtgtggagtaggcgcccaggcatcgtgcagacagggcgacatcagagacaccatcggaacagcagcgcccgcagcacccaccccgcaccggcgactccatcttcatggccaccccctgcggcggacggttgaccaccagccaccacatcatcccagagctgagctcctccagcgggatgacgccgtccccaccacctccctcttcttctttttcatccttctgtctctttgtttctgagctttcctgtctttccttttttctgagagattcaaagcctccacgactctgtttcccccgtcccttctgaatttaatttgcactaagtcatttgcactggttggagttgtggagacggccttgagtctcagtacgagtgtgcgtgagtgtgagccaccttggcaagtgcctgtgcagggcccggccgccctccatctgggccgggtgactgggcgccggctgtgtgcccgaggcctcaccctgccctcgcctagtctggaagctccgaccgacatcacggagcagccttcaagcattccattacgccccatctcgctctgtgcccctccccaccagggcttcagcaggagccctggactcatcatcaataaacactgttacagcaatt

SEQ ID NO: 7625 - protein, 67 aa, Homo sapiens; identical to SEQ ID NO: 7513

SEQ ID NO: 7626 - DNA, 993 bp, Homo sapiens
aggaccgaggagcagggtgagggagggggtgggatgggtggggggtaacgggggaaactggggaagtggggaaccgaggggcaaccaggggaagatggggtgctggaggagagcttgtgggagccaaggagcaccttggacatctggagtctggcaggagtgatgacgggtggaggggctagctcgaggcagggctggtggggcctgaggccagtgaggagtgtggagtaggcgcccaggcatcgtgcagacagggcgacatcagctggggacgatgggcctgagctagggctggaaagaagggggagccaggcattcatcccggtcatttacaaccactgcactacctgactcaggaatcggctctggaaggtgaagctagaggaaccagacctcatcagcccaacatcaaagacaccatcggaacagcagcgcccgcagcacccaccccgcaccggcgactccatcttcatggccaccccctgcggcggacggttgaccaccagccaccacatcatcccagagctgagctcctccagcgggatgacgccgtccccaccacctccctcttcttctttttcatccttctgtctctttgtttctgagctttcctgtctttccttttttctgagagattcaaagcctccacgactctgtttcccccgtcccttctgaatttaatttgcactaagtcatttgcactggttggagttgtggagacggccttgagtctcagtacgagtgtgcgtgagtgtgagccaccttggcaagtgcctgtgcagggcccggccgccctccatctgggccgggtgactgggcgccggctgtgtgcccgaggcctcaccctgccctcgcctagtctggaagctccgaccgacatcacggagcagccttcaagcattccattacgccccatctcgctctgtgcccctccccaccagggcttcagcaggagccctggactcatcatcaataaacactgttacagcaatt

SEQ ID NO: 7627 - protein, 67 aa, Homo sapiens; identical to SEQ ID NO: 7513

SEQ ID NO: 7628 - DNA, 1682 bp, Homo sapiens
aggaccgaggagcagggtgagggagggggtgggatgggtggggggtaacgggggaaactggggaagtggggaaccgaggggcaaccaggggaagatggggtgctggaggagagcttgtgggagccaaggagcaccttggacatctggagtctggcaggagtgatgacgggtggaggggctagctcgaggcagggctggtggggcctgaggccagtgaggagtgtggagtaggcgcccaggcatcgtgcagacagggcgacatcagctggggacgatgggcctgagctagggctggaaagaagggggagccaggcattcatcccggtcacttttggttacaggacgtggcagctggttggacgaggggagctggtgggcaggggtctggtgcggagagggcccacagtggacttggtgacgctgtatgccctcaccgctcagcccctggggctggcttggcagacagtacagcatccaggggagtcaagggcatggggcgagaccagactaggcgaggcgggcggggcggagtgaatgagctctcaggagggaggatggtgcaggcaggggtgaggagcgcagcgggcggcgagcgggaggcactggcctccagagcccgtggccaaggcgggcctcgcgggcggcgacggagccgggatcggtgcctcagcgttcgggctggagacgaggccaggtctccagctggggtggacgtgcccaccagctgccgaaggccaagacgccaggtccggtggacgtgacaagcaggacatgacatggtccggtgtgacggcgaggacagaggaggcgcgtccggccttcctgaacaccttaggctggtggggctgcggcaagaagcgggtctgtttctttacttcctccacggagtcggcacactatggctgccctctgggctcccagaacccacaacatgaaagaaatggtgctacccagctcaagcctgggcctttgaatccggacacaaaaccctctagcttggaaatgaatatgctgcactttacaaccactgcactacctgactcaggaatcggctctggaaggtgaagctagaggaaccagacctcatcagcccaacatcaaagacaccatcggaacagcagcgcccgcagcacccaccccgcaccggcgactccatcttcatggccaccccctgcggcggacggttgaccaccagccaccacatcatcccagagctgagctcctccagcgggatgacgccgtccccaccacctccctcttcttctttttcatccttctgtctctttgtttctgagctttcctgtctttccttttttctgagagattcaaagcctccacgactctgtttcccccgtcccttctgaatttaatttgcactaagtcatttgcactggttggagttgtggagacggccttgagtctcagtacgagtgtgcgtgagtgtgagccaccttggcaagtgcctgtgcagggcccggccgccctccatctgggccgggtgactgggcgccggctgtgtgcccgaggcctcaccctgccctcgcctagtctggaagctccgaccgacatcacggagcagccttcaagcattccattacgccccatctcgctctgtgcccctccccaccagggcttcagcaggagccctggactcatcatcaataaacactgttacagcaatt

SEQ ID NO: 7629 - protein, 97 aa, Homo sapiens; identical to SEQ ID NO: 7525

SEQ ID NO: 7630 - DNA, 1814 bp, Homo sapiens
aggaccgaggagcagggtgagggagggggtgggatgggtggggggtaacgggggaaactggggaagtggggaaccgaggggcaaccaggggaagatggggtgctggaggagagcttgtgggagccaaggagcaccttggacatctggagtctggcaggagtgatgacgggtggaggggctagctcgaggcagggctggtggggcctgaggccagtgaggagtgtggagtaggcgcccaggcatcgtgcagacagggcgacatcagctgccacctcacccaccgcaattcatttagtagcaggcacaggggcagctccggcacggctttctcaggcctatgccggagcctcgagggctggagagcgggaagacaggcagtgctcggggagttgcagcaggacgtcaccaggagggcgaagcggccacgggaggggggccccgggacattgcgcagcaaggaggctgcaggggctcggcctgcgggcgccggtcccacgaggcactgcggcccagggtctggtgcggagagggcccacagtggacttggtgacgctgtatgccctcaccgctcagcccctggggctggcttggcagacagtacagcatccaggggagtcaagggcatggggcgagaccagactaggcgaggcgggcggggcggagtgaatgagctctcaggagggaggatggtgcaggcaggggtgaggagcgcagcgggcggcgagcgggaggcactggcctccagagcccgtggccaaggcgggcctcgcgggcggcgacggagccgggatcggtgcctcagcgttcgggctggagacgaggccaggtctccagctggggtggacgtgcccaccagctgccgaaggccaagacgccaggtccggtggacgtgacaagcaggacatgacatggtccggtgtgacggcgaggacagaggaggcgcgtccggccttcctgaacaccttaggctggtggggctgcggcaagaagcgggtctgtttctttacttcctccacggagtcggcacactatggctgccctctgggctcccagaacccacaacatgaaagaaatggtgctacccagctcaagcctgggcctttgaatccggacacaaaaccctctagcttggaaatgaatatgctgcactttacaaccactgcactacctgactcaggaatcggctctggaaggtgaagctagaggaaccagacctcatcagcccaacatcaaagacaccatcggaacagcagcgcccgcagcacccaccccgcaccggcgactccatcttcatggccaccccctgcggcggacggttgaccaccagccaccacatcatcccagagctgagctcctccagcgggatgacgccgtccccaccacctccctcttcttctttttcatccttctgtctctttgtttctgagctttcctgtctttccttttttctgagagattcaaagcctccacgactctgtttcccccgtcccttctgaatttaatttgcactaagtcatttgcactggttggagttgtggagacggccttgagtctcagtacgagtgtgcgtgagtgtgagccaccttggcaagtgcctgtgcagggcccggccgccctccatctgggccgggtgactgggcgccggctgtgtgcccgaggcctcaccctgccctcgcctagtctggaagctccgaccgacatcacggagcagccttcaagcattccattacgccccatctcgctctgtgcccctccccaccagggcttcagcaggagccctggactcatcatcaataaacactgttacagcaatt

SEQ ID NO: 7631 - protein, 97 aa, Homo sapiens; identical to SEQ ID NO: 7525

SEQ ID NO: 7632 - DNA, 2350 bp, Homo sapiens
agttagaaaaagcccgggctaggaccgaggagcagggtgagggagggggtgggatgggtggggggtaacgggggaaactggggaagtggggaaccgaggggcaaccaggggaagatggggtgctggaggagagcttgtgggagccaaggagcaccttggacatctggagtctggcaggagtgatgacgggtggaggggctagctcgaggcagggctggtggggcctgaggccagtgaggagtgtggagtaggcgcccaggcatcgtgcagacagggcgacatcagctggggacgatgggcctgagctagggctggaaagaagggggagccaggcattcatcccggtcacttttggttacaggacgtggcagctggttggacgaggggagctggtgggcagggtttgatcccagggcctgggcaacggaggtgtagctggcagcagcgggcaggtgaggaccccatctgccgggcaggtgagtcccttccctccccaggcctcgcttccccagccttctgaaagaaggaggtttaggggatcgagggctggcggggagaagcagacaccctcccagcagaggggcaggatgggggcaggagagttagcaaaggtgacatcttctcggggggagccgagactgcgcaaggctggggggttatgggcccgttccaggcagaaagagcaagagggcagggagggagcacaggggtggccagcgtagggtccagcacgtggggtggtaccccaggcctgggtcagacagggacatggcaggggacacaggacagaggggtccccagctgccacctcacccaccgcaattcatttagtagcaggcacaggggcagctccggcacggctttctcaggcctatgccggagcctcgagggctggagagcgggaagacaggcagtgctcggggagttgcagcaggacgtcaccaggagggcgaagcggccacgggaggggggccccgggacattgcgcagcaaggaggctgcaggggctcggcctgcgggcgccggtcccacgaggcactgcggcccagggtctggtgcggagagggcccacagtggacttggtgacgctgtatgccctcaccgctcagcccctggggctggcttggcagacagtacagcatccaggggagtcaagggcatggggcgagaccagactaggcgaggcgggcggggcggagtgaatgagctctcaggagggaggatggtgcaggcaggggtgaggagcgcagcgggcggcgagcgggaggcactggcctccagagcccgtggccaaggcgggcctcgcgggcggcgacggagccgggatcggtgcctcagcgttcgggctggagacgaggccaggtctccagctggggtggacgtgcccaccagctgccgaaggccaagacgccaggtccggtggacgtgacaagcaggacatgacatggtccggtgtgacggcgaggacagaggaggcgcgtccggccttcctgaacaccttaggctggtggggctgcggcaagaagcgggtctgtttctttacttcctccacggagtcggcacactatggctgccctctgggctcccagaacccacaacatgaaagaaatggtgctacccagctcaagcctgggcctttgaatccggacacaaaaccctctagcttggaaatgaatatgctgcactttacaaccactgcactacctgactcaggaatcggctctggaaggtgaagctagaggaaccagacctcatcagcccaacatcaaagacaccatcggaacagcagcgcccgcagcacccaccccgcaccggcgactccatcttcatggccaccccctgcggcggacggttgaccaccagccaccacatcatcccagagctgagctcctccagcgggatgacgccgtccccaccacctccctcttcttctttttcatccttctgtctctttgtttctgagctttcctgtctttccttttttctgagagattcaaagcctccacgactctgtttcccccgtcccttctgaatttaatttgcactaagtcatttgcactggttggagttgtggagacggccttgagtctcagtacgagtgtgcgtgagtgtgagccaccttggcaagtgcctgtgcagggcccggccgccctccatctgggccgggtgactgggcgccggctgtgtgcccgaggcctcaccctgccctcgcctagtctggaagctccgaccgacatcacggagcagccttcaagcattccattacgccccatctcgctctgtgcccctccccaccagggcttcagcaggagccctggactcatcatcaataaacactgttacagcaatt

SEQ ID NO: 7633 - protein, 256 aa, Homo sapiens; identical to SEQ ID NO: 7529

SEQ ID NO: 7634 - DNA, 1910 bp, Homo sapiens
agttagaaaaagcccgggctaggaccgaggagcagggtgagggagggggtgggatgggtggggggtaacgggggaaactggggaagtggggaaccgaggggcaaccaggggaagatggggtgctggaggagagcttgtgggagccaaggagcaccttggacatctggagtctggcaggagtgatgacgggtggaggggctagctcgaggcagggctggtggggcctgaggccagtgaggagtgtggagtaggcgcccaggcatcgtgcagacagggcgacatcagctggggacgatgggcctgagctagggctggaaagaagggggagccaggcattcatcccggtcacttttggttacaggacgtggcagctggttggacgaggggagctggtgggcagggtttgatcccagggcctgggcaacggaggtgtagctggcagcagcgggcaggtgaggaccccatctgccgggcaggtgagtcccttccctccccaggcctcgcttccccagccttctgaaagaaggaggtttaggggatcgagggctggcggggagaagcagacaccctcccagcagaggggcaggatgggggcaggagagttagcaaaggtgacatcttctcggggggagccgagactgcgcaaggctggggggttatgggcccgttccaggcagaaagagcaagagggcagggagggagcacaggggtggccagcgtagggtccagcacgtggggtggtaccccaggcctgggtcagacagggacatggcaggggacacaggacagaggggtccccagctgccacctcacccaccgcaattcatttagtagcaggcacaggggcagctccggcacggctttctcaggcctatgccggagcctcgagggctggagagcgggaagacaggcagtgctcggggagttgcagcaggacgtcaccaggagggcgaagcggccacgggaggggggccccgggacattgcgcagcaaggaggctgcaggggctcggcctgcgggcgccggtcccacgaggcactgcggcccagggtctggtgcggagagggcccacagtggacttggtgacgctgtatgccctcaccgctcagcccctggggctggcttggcagacactgagtgggacctcactccttccccatccacagaaatggtgctacccagctcaagcctgggcctttgaatccggacacaaaaccctctagcttggaaatgaatatgctgcactttacaaccactgcactacctgactcaggaatcggctctggaaggtgaagctagaggaaccagacctcatcagcccaacatcaaagacaccatcggaacagcagcgcccgcagcacccaccccgcaccggcgactccatcttcatggccaccccctgcggcggacggttgaccaccagccaccacatcatcccagagctgagctcctccagcgggatgacgccgtccccaccacctccctcttcttctttttcatccttctgtctctttgtttctgagctttcctgtctttccttttttctgagagattcaaagcctccacgactctgtttcccccgtcccttctgaatttaatttgcactaagtcatttgcactggttggagttgtggagacggccttgagtctcagtacgagtgtgcgtgagtgtgagccaccttggcaagtgcctgtgcagggcccggccgccctccatctgggccgggtgactgggcgccggctgtgtgcccgaggcctcaccctgccctcgcctagtctggaagctccgaccgacatcacggagcagccttcaagcattccattacgccccatctcgctctgtgcccctccccaccagggcttcagcaggagccctggactcatcatcaataaacactgttacagcaatt

SEQ ID NO: 7635 - protein, 180 aa, Homo sapiens; identical to SEQ ID NO: 7573

SEQ ID NO: 7636 - DNA, 1248 bp, Homo sapiens
agttagaaaaagcccgggctaggaccgaggagcagggtgagggagggggtgggatgggtggggggtaacgggggaaactggggaagtggggaaccgaggggcaaccaggggaagatggggtgctggaggagagcttgtgggagccaaggagcaccttggacatctggagtctggcaggagtgatgacgggtggaggggctagctcgaggcagggctggtggggcctgaggccagtgaggagtgtggagtaggcgcccaggcatcgtgcagacagggcgacatcagctggggacgatgggcctgagctagggctggaaagaagggggagccaggcattcatcccggtcacttttggttacaggacgtggcagctggttggacgaggggagctggtgggcagggtttgatcccagggcctgggcaacggaggtgtagctggcagcagcgggcaggtgaggaccccatctgccgggcaggtgagtcccttccctccccaggcctcgcttccccagccttctgaaagaaggaggtttaggggatcgagggctggcggggagaagcagacaccctcccagcagaggggcaggatgggggcaggagagttagcaaaggtgacatcttctcggggtgaagctagaggaaccagacctcatcagcccaacatcaaagacaccatcggaacagcagcgcccgcagcacccaccccgcaccggcgactccatcttcatggccaccccctgcggcggacggttgaccaccagccaccacatcatcccagagctgagctcctccagcgggatgacgccgtccccaccacctccctcttcttctttttcatccttctgtctctttgtttctgagctttcctgtctttccttttttctgagagattcaaagcctccacgactctgtttcccccgtcccttctgaatttaatttgcactaagtcatttgcactggttggagttgtggagacggccttgagtctcagtacgagtgtgcgtgagtgtgagccaccttggcaagtgcctgtgcagggcccggccgccctccatctgggccgggtgactgggcgccggctgtgtgcccgaggcctcaccctgccctcgcctagtctggaagctccgaccgacatcacggagcagccttcaagcattccattacgccccatctcgctctgtgcccctccccaccagggcttcagcaggagccctggactcatcatcaataaacactgttacagcaatt

SEQ ID NO: 7637 - protein, 90 aa, Homo sapiens
MGAGELAKVTSSRGEARGTRPHQPNIKDTIGTAAPAAPTPHRRLHLHGHPLRRTVDHQPPHHPRAELLQRDDAVPTTSLFFFFILLSLCF

SEQ ID NO: 7638 - DNA, 1563 bp, Homo sapiens
gctaatttaggagcttgagatgctaaagagctgggagtgccactgctgctttattctggggtctaggatccttgtgttggctgagataatctgctaatgtgggtgcagcagacatcccgcggtttgtggaatcgataaaggatggggatcaatggtgtttgtgcactgtgcggtctgtgcccaattgcctgccttgtgctgtggaatctgtacatctggccaacatgtgcttgtgtgagcctgacagtgcattttccagagcctcacctcggctctgccctggaggctctgtgctgctggaatcagactcaaggacctcatcagaggaccatggccccgtatcacctgggtcaggcactgaagctgggacaggagagcagagacttccaaaatgagggatccctgtgttctgaggtgatcatgactgggacccaaggactcaagcgcatgctccagagggaatcgtttcccacaaggcctttggcaggaacagggatcctgggagcctgccaagcagagcgcacagtgttcctggagtctcgctgcccagatgccacggaatcagttgaagccaggtctccagctggggtggacgtgcccaccagctgccgaaggccaagacgccaggtccggtggacgtgacaagcaggacatgacatggtccggtgtgacggcgaggacagaggaggcgcgtccggccttcctgaacaccttaggctggtggggctgcggcaagaagcgggtctgtttctttacttcctccacggagtcggcacactatggctgccctctgggctcccagaacccacaacatgaaagaaatggtgctacccagctcaagcctgggcctttgaatccggacacaaaaccctctagcttggaaatgaatatgctgcactttacaaccactgcactacctgactcaggaatcggctctggaaggtgaagctagaggaaccagacctcatcagcccaacatcaaagacaccatcggaacagcagcgcccgcagcacccaccccgcaccggcgactccatcttcatggccaccccctgcggcggacggttgaccaccagccaccacatcatcccagagctgagctcctccagcgggatgacgccgtccccaccacctccctcttcttctttttcatccttctgtctctttgtttctgagctttcctgtctttccttttttctgagagattcaaagcctccacgactctgtttcccccgtcccttctgaatttaatttgcactaagtcatttgcactggttggagttgtggagacggccttgagtctcagtacgagtgtgcgtgagtgtgagccaccttggcaagtgcctgtgcagggcccggccgccctccatctgggccgggtgactgggcgccggctgtgtgcccgaggcctcaccctgccctcgcctagtctggaagctccgaccgacatcacggagcagccttcaagcattccattacgccccatctcgctctgtgcccctccccaccagggcttcagcaggagccctggactcatcatcaataaacactgttacagcaatt

SEQ ID NO: 7639 - protein, 166 aa, Homo sapiens; identical to SEQ ID NO: 7575

SEQ ID NO: 7640 - DNA, 459 bp, Homo sapiens
aggtgaagctagaggaaccagacctcatcagcccaacatcaaagacaccatcggaacagcagcgcccgcagcacccaccccgcaccggcgactccatcttcatggccaccccctgcggcggacggttgaccaccagccaccacatcatcccagagctgagctcctccagcgggatgacgccgtccccaccacctccctcttcttctttttcatccttctgtctctttgtttctgagctttcctgtctttccttttttctgagagattcaaagcctccacgactctgtttcccccgtcccttctgaatttaatttgcacctcgcctagtctggaagctccgaccgacatcacggagcagccttcaagcattccattacgccccatctcgctctgtgcccctccccaccagggcttcagcaggagccctggactcatcatcaataaacactgttacagcaa

SEQ ID NO: 7641 - protein, 67 aa, Homo sapiens; identical to SEQ ID NO: 7513

SEQ ID NO: 7642 - DNA, 409 bp, Homo sapiens
aggtgaagctagaggaaccagacctcatcagcccaacatcaaagacaccatcggaacagcagcgcccgcagcacccaccccgcaccggcgactccatcttcatggccaccccctgcggcggacggttgaccaccagccaccacatcatcccagagctgagctcctccagcgggatgacgccgtccccaccacctccctcttcttctttttcatccttctgtctctttgtttctgagctttcctgtctttccttttttctgagagattcaaagcctagtctggaagctccgaccgacatcacggagcagccttcaagcattccattacgccccatctcgctctgtgcccctccccaccagggcttcagcaggagccctggactcatcatcaataaacactgttacagcaa

SEQ ID NO: 7643 - protein, 101 aa, Homo sapiens
MATPCGGRLTTSHHIIPELSSSSGMTPSPPPPSSSFSSFCLFVSELSCLSFFLRDSKPSLEAPTDITEQPSSIPLRPISLCAPPHQGFSRSPGLIINKHCY

SEQ ID NO: 7644 - DNA, 372 bp, Homo sapiens
agggtgagggagggggtgggatgggtggggggtaacgggggaaactggggaagtggggaaccgaggggcaaccaggggaagatggggtgctggaggagagcttgtgggagccaaggagcaccttggacatctggagtctggcaggagtgatgacgggtggaggggctagctcgaggcagggctggtggggcctgaggccagtgaggagtgtggagtaggcctcaccctgccctcgcctagtctggaagctccgaccgacatcacggagcagccttcaagcattccattacgccccatctcgctctgtgcccctccccaccagggcttcagcaggagccctggactcatcatcaataaacactgttacagcaa

SEQ ID NO: 7645 - protein, 66 aa, Homo sapiens
LEAGLVGPEASEECGVGLTLPSPSLEAPTDITEQPSSIPLRPISLCAPPHQGFSRSPGLIINKHCY

SEQ ID NO: 7646 - DNA, 1058 bp, Homo sapiens
agggtgagggagggggtgggatgggtggggggtaacgggggaaactggggaagtggggaaccgaggggcaaccaggggaagatggggtgctggaggagagcttgtgggagccaaggagcaccttggacatctggagtctggcaggagtgatgacgggtggaggggctagctcgaggcagggctggtggggcctgaggccagtgaggagtgtggagtaggcgcccaggcatcgtgcagacagggcgacatcagctggggacgatgggcctgagctagggctggaaagaagggggagccaggcattcatcccggtcacttttggttacaggacgtggcagctggttggacgaggggagctggtgggcagggtttgatcccagggcctgggcaacggaggtgtagctggcagcagcgggcaggtgaggaccccatctgccgggcaggtgagtcccttccctccccaggcctcgcttccccagccttctgaaagaaggaggtttaggggatcgagggctggcggggagaagcagacaccctcccagcagaggggcaggatgggggcaggagagttagcaaaggtgacatcttctcggggggagccgagactgcgcaaggctggggggttatgggcccgttccaggcagaaagagcaagagggcagggagggagcacaggggtggccagcgtagggtccagcacgtggggtggtaccccaggcctgggtcagacagggacatggcaggggacacaggacagaggggtccccagctgccacctcacccaccgcaattcatttagtagcaggcacaggggcagctccggcacggctttctcaggcctatgccggagcctcgagggctggagagcgggaagacaggcagtgctcggggagttgcagcaggacgcctcaccctgccctcgcctagtctggaagctccgaccgacatcacggagcagccttcaagcattccattacgccccatctcgctctgtgcccctccccaccagggcttcagcaggagccctggactcatcatcaataaacactgttacagcaa

SEQ ID NO: 7647 - protein, 143 aa, Homo sapiens
MGPFQAERARGQGGSTGVASVGSSTWGGTPGLGQTGTWQGTQDRGVPSCHLTHRNSFSSRHRGSSGTAFSGLCRSLEGWRAGRQAVLGELQQDASPCPRLVWKLRPTSRSSLQAFHYAPSRSVPLPTRASAGALDSSSINTVT

SEQ ID NO: 7648 - DNA, 1274 bp, Homo sapiens
agttagaaaaagcccgggctaggaccgaggagcagggtgagggagggggtgggatgggtggggggtaacgggggaaactggggaagtggggaaccgaggggcaaccaggggaagatggggtgctggaggagagcttgtgggagccaaggagcaccttggacatctggagtctggcaggagtgatgacgggtggaggggctagctcgaggcagggctggtggggcctgaggccagtgaggagtgtggagtaggcgcccaggcatcgtgcagacagggcgacatcagctggggacgatgggcctgagctagggctggaaagaagggggagccaggcattcatcccggtcacttttggttacaggacgtggcagctggttggacgaggggagctggtgggcagggtttgatcccagggcctgggcaacggaggtgtagctggcagcagcgggcaggtgaggaccccatctgccgggcaggtgagtcccttccctccccaggcctcgcttccccagccttctgaaagaaggaggtttaggggatcgagggctggcggggagaagcagacaccctcccagcagaggggcaggatgggggcaggagagttagcaaaggtgacatcttctcggggggagccgagactgcgcaaggctggggggttatgggcccgttccaggcagaaagagcaagagggcagggagggagcacaggggtggccagcgtagggtccagcacgtggggtggtaccccaggcctgggtcagacagggacatggcaggggacacaggacagaggggtccccagctgccacctcacccaccgcaattcatttagtagcaggcacaggggcagctccggcacggctttctcaggcctatgccggagcctcgagggctggagagcgggaagacaggcagtgctcggggagttgcagcaggacgtcaccaggagggcgaagcggccacgggaggggggccccgggacattgcgcagcaaggaggctgcaggggctcggcctgcgggcgccggtcccacgaggcactgcggcccagggtctggtgcggagagggcccacagtggacttggtgacgctgtatgccctcaccgctcagcccctggggctggcttggcagacagtacagcatccaggggactccgaccgacatcacggagcagccttcaagcattccattacgccccatctcgctctgtgcccctccccaccagggcttcagcaggagccctggactcatcatcaataaacactgttacagcaa

SEQ ID NO: 7649 - protein, 204 aa, Homo sapiens
MGPFQAERARGQGGSTGVASVGSSTWGGTPGLGQTGTWQGTQDRGVPSCHLTHRNSFSSRHRGSSGTAFSGLCRSLEGWRAGRQAVLGELQQDVTRRAKRPREGGPGTLRSKEAAGARPAGAGPTRHCGPGSGAERAHSGLGDAVCPHRSAPGAGLADSTASRGLRPTSRSSLQAFHYAPSRSVPLPTRASAGALDSSSINTVT

SEQ ID NO: 7650 - DNA, 613 bp, Homo sapiens
agcgggtctgtttctttacttcctccacggagtcggcacactatggctgccctctgggctcccagaacccaccccgcaccggcgactccatcttcatggccaccccctgcggcggacggttgaccaccagccaccacatcatcccagagctgagctcctccagcgggatgacgccgtccccaccacctccctcttcttctttttcatccttctgtctctttgtttctgagctttcctgtctttccttttttctgagagattcaaagcctccacgactctgtttcccccgtcccttctgaatttaatttgcactaagtcatttgcactggttggagttgtggagacggccttgagtctcagtacgagtgtgcgtgagtgtgagccaccttggcaagtgcctgtgcagggcccggccgccctccatctgggccgggtgactgggcgccggctgtgtgcccgaggcctcaccctgccctcgcctagtctggaagctccgaccgacatcacggagcagccttcaagcattccattacgccccatctcgctctgtgcccctccccaccagggcttcagcaggagccctggactcatcatcaataaacactgttacagc

SEQ ID NO: 7651 - protein, 67 aa, Homo sapiens; identical to SEQ ID NO: 7513

SEQ ID NO: 7652 - DNA, 633 bp, Homo sapiens
gaaactggggaagtggggaaccgaggggcaaccagacctcatcagcccaacatcaaagacaccatcggaacagcagcgcccgcagcacccaccccgcaccggcgactccatcttcatggccaccccctgcggcggacggttgaccaccagccaccacatcatcccagagctgagctcctccagcgggatgacgccgtccccaccacctccctcttcttctttttcatccttctgtctctttgtttctgagctttcctgtctttccttttttctgagagattcaaagcctccacgactctgtttcccccgtcccttctgaatttaatttgcactaagtcatttgcactggttggagttgtggagacggccttgagtctcagtacgagtgtgcgtgagtgtgagccaccttggcaagtgcctgtgcagggcccggccgccctccatctgggccgggtgactgggcgccggctgtgtgcccgaggcctcaccctgccctcgcctagtctggaagctccgaccgacatcacggagcagccttcaagcattccattacgccccatctcgctctgtgcccctccccaccagggcttcagcaggagccctggactcatcatcaataaacactgttacagc

SEQ ID NO: 7653 - protein, 67 aa, Homo sapiens; identical to SEQ ID NO: 7513

SEQ ID NO: 7654 - DNA, 652 bp, Homo sapiens
agggggtgggatgggtggggggtaacgggggaaactggggaagtggggaaccgaggggcaaccaggggaagatggggtgctggaggagagcttgtgggagccaaggagcaccttggacatctggagtctggcaggagtgatgacgggtggaggggctagctcgaggcagccaccacatcatcccagagctgagctcctccagcgggatgacgccgtccccaccacctccctcttcttctttttcatccttctgtctctttgtttctgagctttcctgtctttccttttttctgagagattcaaagcctccacgactctgtttcccccgtcccttctgaatttaatttgcactaagtcatttgcactggttggagttgtggagacggccttgagtctcagtacgagtgtgcgtgagtgtgagccaccttggcaagtgcctgtgcagggcccggccgccctccatctgggccgggtgactgggcgccggctgtgtgcccgaggcctcaccctgccctcgcctagtctggaagctccgaccgacatcacggagcagccttcaagcattccattacgccccatctcgctctgtgcccctccccaccagggcttcagcaggagccctggactcatcatcaataaacactgttacagc

SEQ ID NO: 7655 - protein, 42 aa, Homo sapiens; identical to SEQ ID NO: 7541

SEQ ID NO: 7656 - DNA, 1603 bp, Homo sapiens
gtgagggagggggtgggatgggtggggggtaacgggggaaactggggaagtggggaaccgaggggcaaccaggggaagatggggtgctggaggagagcttgtgggagccaaggagcaccttggacatctggagtctggcaggagtgatgacgggtggaggggctagctcgaggcagggctggtggggcctgaggccagtgaggagtgtggagtaggcgcccaggcatcgtgcagacagggcgacatcagctggggacgatgggcctgagctagggctggaaagaagggggagccaggcattcatcccggtcacttttggttacaggacgtggcagctggttggacgaggggagctggtgggcagggtttgatcccagggcctgggcaacggaggtgtagctggcagcagcgggcaggtgaggaccccatctgccgggcaggtgagtcccttccctccccaggcctcgcttccccagccttctgaaagaaggaggtttaggggatcgagggctggcggggagaagcagacaccctcccagcagaggggcaggatgggggcaggagagttagcaaaggtgacatcttctcggggggagccgagactgcgcaaggctggggggttatgggcccgttccaggcagaaagagcaagagggcagggagggagcacaggggtggccagcgtagggtccagcacgtggggtggtaccccaggcctgggtcagacagggacatggcaggggacacaggacagaggggtccccagctgccacctcacccaccgcaattcatttagtagcaggcacaggggcagctccggcacggctttctcaggcctatgccggagcctcgagggctggagagcgggaagacaggcagtgctcggggagttgcagcaggacgtcaccaggagggcgaagcggccacgggaggggggccccgggacattgcgcagcaaggaggctgcaggggctcggcctgcgggcgccggtcccacgaggcactgcggcccagggtctggtgcggagagggcccacagtggacttggtgacgctgtatgccctcaccgctcagcccctggggctggcttggcagacagtacagcatccaggggagtcaagggcatggggcgagaccaagctgagctcctccagcgggatgacgccgtccccaccacctccctcttcttctttttcatccttctgtctctttgtttctgagctttcctgtctttccttttttctgagagattcaaagcctccacgactctgtttcccccgtcccttctgaatttaatttgcactaagtcatttgcactggttggagttgtggagacggccttgagtctcagtacgagtgtgcgtgagtgtgagccaccttggcaagtgcctgtgcagggcccggccgccctccatctgggccgggtgactgggcgccggctgtgtgcccgaggcctcaccctgccctcgcctagtctggaagctccgaccgacatcacggagcagccttcaagcattccattacgccccatctcgctctgtgcccctccccaccagggcttcagcaggagccctggactcatcatcaataaacactgttacagc

SEQ ID NO: 7657 - protein, 198 aa, Homo sapiens; identical to SEQ ID NO: 7547

SEQ ID NO: 7658 - DNA, 720 bp, Homo sapiens
aggaccgaggagcagggtgagggagggggtgggatgggtggggggtaacgggggaaactggggaagtggggaaccgaggggcaaccaggggaagatggggtgctggaggagagcttgtgggagccaaggagcaccttggacatctggagtctggcaggagtgatgacgggtggaggggctagctcgaggcagggctggtggggcctgaggccagtgaggagtgtggagtaggcgcccaggcatcgtgcagacagagctgagctcctccagcgggatgacgccgtccccaccacctccctcttcttctttttcatccttctgtctctttgtttctgagctttcctgtctttccttttttctgagagattcaaagcctccacgactctgtttcccccgtcccttctgaatttaatttgcactaagtcatttgcactggttggagttgtggagacggccttgagtctcagtacgagtgtgcgtgagtgtgagccaccttggcaagtgcctgtgcagggcccggccgccctccatctgggccgggtgactgggcgccggctgtgtgcccgaggcctcaccctgccctcgcctagtctggaagctccgaccgacatcacggagcagccttcaagcattccattacgccccatctcgctctgtgcccctccccaccagggcttcagcaggagccctggactcatcatcaataaacactgttacagc

SEQ ID NO: 7659 - protein, 43 aa, Homo sapiens; identical to SEQ ID NO: 7559

SEQ ID NO: 7660 - DNA, 787 bp, Homo sapiens
aggaccgaggagcagggtgagggagggggtgggatgggtggggggtaacgggggaaactggggaagtggggaaccgaggggcaaccaggggaagatggggtgctggaggagagcttgtgggagccaaggagcaccttggacatctggagtctggcaggagtgatgacgggtggaggggctagctcgaggcagggctggtggggcctgaggccagtgaggagtgtggagtaggcgcccaggcatcgtgcagacagggcgactccatcttcatggccaccccctgcggcggacggttgaccaccagccaccacatcatcccagagctgagctcctccagcgggatgacgccgtccccaccacctccctcttcttctttttcatccttctgtctctttgtttctgagctttcctgtctttccttttttctgagagattcaaagcctccacgactctgtttcccccgtcccttctgaatttaatttgcactaagtcatttgcactggttggagttgtggagacggccttgagtctcagtacgagtgtgcgtgagtgtgagccaccttggcaagtgcctgtgcagggcccggccgccctccatctgggccgggtgactgggcgccggctgtgtgcccgaggcctcaccctgccctcgcctagtctggaagctccgaccgacatcacggagcagccttcaagcattccattacgccccatctcgctctgtgcccctccccaccagggcttcagcaggagccctggactcatcatcaataaacactgttacagc

SEQ ID NO: 7661 - protein, 67 aa, Homo sapiens; identical to SEQ ID NO: 7513

SEQ ID NO: 7662 - DNA, 928 bp, Homo sapiens
agggtgagggagggggtgggatgggtggggggtaacgggggaaactggggaagtggggaaccgaggggcctcgcttccccagccttctgaaagaaggaggtttaggggatcgagggctggcggggagaagcagacaccctcccagcagaggggcaggatgggggcaggagagttagcaaaggtgacatcttctcggggggagccgagactgcgcaaggctggggggttatgggcccgttccaggcagaaagagcaagagggcagggagggagcacaggggtggccagcgtagggtccagcacgtggggtggtaccccaggcctgggtcagacagggacatggcaggggacacaggacagaggggtccccagctgccacctcacccaccgcaattcatttagtagcaggcacaggggcagctccggcacggctttctcaggcctatgccggagcctcgagggctggagagcgggaagacaggcagtgctcggggagttgcagcaggacgtcaccaggagggcgaagcggccacgggaggggggccccgggacattgcgcagcaaggaggctgcaggggctcggcctgcgggcgccggtcccacgaggcactgcggcccagggtctggtgcggagagggcccacagtggacttggtgacgctgtatgccctcaccgctcagcccctggggctggcttggcagacagtacagcatccaggggagtcaagggcatggggcgagaccagactaggcgaggcgggcggggcggagtgaatgagctctcaggagggaggatggtgcaggcaggggtgaggagcgcagcgggcggcgagcgggaggcactggcctccagagcccgtggccaaggcgggcctcgcgggcggcgacggagccgggatcggtgcctcagcgttcgggctggagacgagg

SEQ ID NO: 7663 - protein, 232 aa, Homo sapiens
MGPFQAERARGQGGSTGVASVGSSTWGGTPGLGQTGTWQGTQDRGVPSCHLTHRNSFSSRHRGSSGTAFSGLCRSLEGWRAGRQAVLGELQQDVTRRAKRPREGGPGTLRSKEAAGARPAGAGPTRHCGPGSGAERAHSGLGDAVCPHRSAPGAGLADSTASRGVKGMGRDQTRRGGRGGVNELSGGRMVQAGVRSAAGGEREALASRARGQGGPRGRRRSRDRCLSVRAGD

SEQ ID NO: 7664 - DNA, 996 bp, Homo sapiens
aggaccgaggagcagggtgagggagggggtgggatgggtggggggtaacgggggaaactggggaagtggggaaccgaggggcaaccaggggaagatggggtgctggaggagagcttgtgggagccaaggagcaccttggacatctggagtctggcaggagtgatgacgggtggaggggctagctcgaggcagggctggtggggcctgaggccagtgaggagtgtggagtaggcgcccaggcatcgtgcagacagggcgacatcagctggggacgatgggcctgagctagggctggaaagaagggggagccaggcattcatcccggtcacttttggttacaggacgtggcagctggttggacgaggggagctggtgggcagggtttgatcccagggcagacagggacatggcaggggacacaggacagaggggtccccagctgccacctcacccaccgcaattcatttagtagcaggcacaggggcagctccggcacggctttctcaggcctatgccggagcctcgagggctggagagcgggaagacaggcagtgctcggggagttgcagcaggacgtcaccaggagggcgaagcggccacgggaggggggccccgggacattgcgcagcaaggaggctgcaggggctcggcctgcgggcgccggtcccacgaggcactgcggcccagggtctggtgcggagagggcccacagtggacttggtgacgctgtatgccctcaccgctcagcccctggggctggcttggcagacagtacagcatccaggggagtcaagggcatggggcgagaccagactaggcgaggcgggcggggcggagtgaatgagctctcaggagggaggatggtgcaggcaggggtgaggagcgcagcgggcggcgagcgggaggcactggcctccagagcccgtggccaaggcgggcctcgcgggcggcgacggagccgggatcggtgcctcagcgttcgggctggagacgagg

SEQ ID NO: 7665 - protein, 70 aa, Homo sapiens
MPEPRGLESGKTGSARGVAAGRHQEGEAATGGGPRDIAQQGGCRGSACGRRSHEALRPRVWCGEGPQWTW

SEQ ID NO: 7666 - DNA, 1002 bp, Homo sapiens
aggaccgaggagcagggtgagggagggggtgggatgggtggggggtaacgggggaaactggggaagtggggaaccgaggggcaaccaggggaagatggggtgctggaggagagcttgtgggagccaaggagcaccttggacatctggagtctggcaggagtgatgacgggtggaggggctagctcgaggcagggctggtggggcctgaggccagtgaggagtgtggagtaggcgcccaggcatcgtgcagacagggtgacatcttctcggggggagccgagactgcgcaaggctggggggttatgggcccgttccaggcagaaagagcaagagggcagggagggagcacaggggtggccagcgtagggtccagcacgtggggtggtaccccaggcctgggtcagacagggacatggcaggggacacaggacagaggggtccccagctgccacctcacccaccgcaattcatttagtagcaggcacaggggcagctccggcacggctttctcaggcctatgccggagcctcgagggctggagagcgggaagacaggcagtgctcggggagttgcagcaggacgtcaccaggagggcgaagcggccacgggaggggggccccgggacattgcgcagcaaggaggctgcaggggctcggcctgcgggcgccggtcccacgaggcactgcggcccagggtctggtgcggagagggcccacagtggacttggtgacgctgtatgccctcaccgctcagcccctggggctggcttggcagacagtacagcatccaggggagtcaagggcatggggcgagaccagactaggcgaggcgggcggggcggagtgaatgagctctcaggagggaggatggtgcaggcaggggtgaggagcgcagcgggcggcgagcgggaggcactggcctccagagcccgtggccaaggcgggcctcgcgggcggcgacggagccgggatcggtgcctcagcgttcgggctggagacgagg

SEQ ID NO: 7667 - protein, 232 aa, Homo sapiens; identical to SEQ ID NO: 7663

SEQ ID NO: 7668 - DNA, 995 bp, Homo sapiens
aggaccgaggagcagggtgagggagggggtgggatgggtggggggtaacgggggaaactggggaagtggggaaccgaggggcaaccaggggaagatggggtgctggaggagagcttgtgggagccaaggagcaccttggacatctggagtctggcaggagtgatgacgggtggaggggctagctcgaggcagggctggtggggcctgaggccagtgaggagtgtggagtaggcgcccaggcatcgtgcagacagggcgacatcagctggggacgatgggcctgagctagggctggaaagaagggggagccaggcattcatcccggtcacttttggttacaggacgggtggccagcgtagggtccagcacgtggggtggtaccccaggcctgggtcagacagggacatggcaggggacacaggacagaggggtccccagctgccacctcacccaccgcaattcatttagtagcaggcacaggggcagctccggcacggctttctcaggcctatgccggagcctcgagggctggagagcgggaagacaggcagtgctcggggagttgcagcaggacgtcaccaggagggcgaagcggccacgggaggggggccccgggacattgcgcagcaaggaggctgcaggggctcggcctgcgggcgccggtcccacgaggcactgcggcccagggtctggtgcggagagggcccacagtggacttggtgacgctgtatgccctcaccgctcagcccctggggctggcttggcagacagtacagcatccaggggagtcaagggcatggggcgagaccagactaggcgaggcgggcggggcggagtgaatgagctctcaggagggaggatggtgcaggcaggggtgaggagcgcagcgggcggcgagcgggaggcactggcctccagagcccgtggccaaggcgggcctcgcgggcggcgacggagccgggatcggtgcctcagcgttcgggctggagacgagg

SEQ ID NO: 7669 - protein, 70 aa, Homo sapiens; identical to SEQ ID NO: 7665

SEQ ID NO: 7670 - DNA, 1033 bp, Homo sapiens
agttagaaaaagcccgggctaggaccgaggagcagggacgtggcagctggttggacgaggggagctggtgggcagggtttgatcccagggcctgggcaacggaggtgtagctggcagcagcgggcaggtgaggaccccatctgccgggcaggtgagtcccttccctccccaggcctcgcttccccagccttctgaaagaaggaggtttaggggatcgagggctggcggggagaagcagacaccctcccagcagaggggcaggatgggggcaggagagttagcaaaggtgacatcttctcggggggagccgagactgcgcaaggctggggggttatgggcccgttccaggcagaaagagcaagagggcagggagggagcacaggggtggccagcgtagggtccagcacgtggggtggtaccccaggcctgggtcagacagggacatggcaggggacacaggacagaggggtccccagctgccacctcacccaccgcaattcatttagtagcaggcacaggggcagctccggcacggctttctcaggcctatgccggagcctcgagggctggagagcgggaagacaggcagtgctcggggagttgcagcaggacgtcaccaggagggcgaagcggccacgggaggggggccccgggacattgcgcagcaaggaggctgcaggggctcggcctgcgggcgccggtcccacgaggcactgcggcccagggtctggtgcggagagggcccacagtggacttggtgacgctgtatgccctcaccgctcagcccctggggctggcttggcagacagtacagcatccaggggagtcaagggcatggggcgagaccagactaggcgaggcgggcggggcggagtgaatgagctctcaggagggaggatggtgcaggcaggggtgaggagcgcagcgggcggcgagcgggaggcactggcctccagagcccgtggccaaggcgggcctcgcgggcggcgacggagccgggatcggtgcctcagcgttcgggctggagacgagg

SEQ ID NO: 7671 - protein, 232 aa, Homo sapiens; identical to SEQ ID NO: 7663

SEQ ID NO: 7672 - DNA, 1568 bp, Homo sapiens
gctaatttaggagcttgagatgctaaagagctgggagtgccactgctgctttattctggggtctaggatccttgtgttggctgagataatctgctaatgtgggtgcagcagacatcccgcggtttgtggaatcgataaaggatggggatcaatggtgtttgtgcactgtgcggtctgtgcccaattgcctgccttgtgctgtggaatctgtacatctggccaacatgtgcttgtgtgagcctgacagtgcattttccagagcctcacctcggctctgccctggaggctctgtgctgctggaatcagactcaaggacctcatcagaggaccatggccccgtatcacctgggtcaggcactgaagctgggacaggagagcagagacttccaaaatgagggatccctgtgttctgaggtgatcatgactgggacccaaggactcaagcgcatgctccagagggaatcgtttcccacaaggcctttggcaggaacagggatcctgggagcctgccaagcagagcgcacagtgttcctggagtctcgctgcccagatgccacggaatcagttgaaggacgtggcagctggttggacgaggggagctggtgggcagggtttgatcccagggcctgggcaacggaggtgtagctggcagcagcgggcaggtgaggaccccatctgccgggcaggtgagtcccttccctccccaggcctcgcttccccagccttctgaaagaaggaggtttaggggatcgagggctggcggggagaagcagacaccctcccagcagaggggcaggatgggggcaggagagttagcaaaggtgacatcttctcggggggagccgagactgcgcaaggctggggggttatgggcccgttccaggcagaaagagcaagagggcagggagggagcacaggggtggccagcgtagggtccagcacgtggggtggtaccccaggcctgggtcagacagggacatggcaggggacacaggacagaggggtccccagctgccacctcacccaccgcaattcatttagtagcaggcacaggggcagctccggcacggctttctcaggcctatgccggagcctcgagggctggagagcgggaagacaggcagtgctcggggagttgcagcaggacgtcaccaggagggcgaagcggccacgggaggggggccccgggacattgcgcagcaaggaggctgcaggggctcggcctgcgggcgccggtcccacgaggcactgcggcccagggtctggtgcggagagggcccacagtggacttggtgacgctgtatgccctcaccgctcagcccctggggctggcttggcagacagtacagcatccaggggagtcaagggcatggggcgagaccagactaggcgaggcgggcggggcggagtgaatgagctctcaggagggaggatggtgcaggcaggggtgaggagcgcagcgggcggcgagcgggaggcactggcctccagagcccgtggccaaggcgggcctcgcgggcggcgacggagccgggatcggtgcctcagcgttcgggctggagacgagg

SEQ ID NO: 7673 - protein, 167 aa, Homo sapiens
MGINGVCALCGLCPIACLVLWNLYIWPTCACVSLTVHFPEPHLGSALEALCCWNQTQGPHQRTMAPYHLGQALKLGQESRDFQNEGSLCSEVIMTGTQGLKRMLQRESFPTRPLAGTGILGACQAERTVFLESRCPDATESVEGRGSWLDEGSWWAGFDPRAWATEV

SEQ ID NO: 7674 - DNA, 1143 bp, Homo sapiens
atggcactgtccaaagatgcccagatcactgaatgcacagcatgcagaagggctgaatcgagggtcacgtggcgggggctgctggtgtgggccatgctccccaaaccccaggcagcacagaggtcaccaggtctccagggctgtccctccagggccgtccctccagggctgtccctccagggcctttacagatcccgagtcctgactcctcacacacagagcgtgggcctgggagtaggagtccaggcaccccgggcccagggccctgcatcttccctccccagccagactcacagcaccagccagactcacagcaccagcccttgggccacgggggcggcaggcccagcttcagaggcgcagtggctgtcccggcctctggtcggtctcgctaggggccgcctctccccacagaccagggcctccctttgggtgggtgctgcctcacaagggagcctcagtgggcactggcccggctctgcttctgggatgaggttgagtgagcacatgggggtccctgcaaggtccagggccaaggcagagacacagaagcagagggagatgggtctccatcgtcgcccaggccccttgagagacctccacccccgccagagcctgtggacagctgagcaggagctgcccccgcatcctgcagtgggagcggagggtcggccagcacgggcaaccgacaggagccggcccggcccctccatcctccttcggtgcggggctgaggaggcctctgtctggtcaggctgctggacacccaaggctcgagaggaagccatggctttggagggtggcattagcacggaggggagccggcggcccacgggcatcgtgcacacccagcacagcggtggcaccaagcctgccctgagggctggttctgggatgggcagaagtggctcctgcggagtggcaggagagaaaggcaggtgtgccctcccggctcaggcctctccgcacctgaaggtccagaggggaggcagcccccagaaggctgcacgggcggggcttacagacagggctccgggaccaaggtgtgggcctcagggacagcagacagcagggagggaagagggggaagacggggcttctgctgagggagatggcccctcgctggacgaagggcagttctag

SEQ ID NO: 7675 - protein, 380 aa, Homo sapiens
MALSKDAQITECTACRRAESRVTWRGLLVWAMLPKPQAAQRSPGLQGCPSRAVPPGLSLQGLYRSRVLTPHTQSVGLGVGVQAPRAQGPASSLPSQTHSTSQTHSTSPWATGAAGPASEAQWLSRPLVGLARGRLSPQTRASLWVGAASQGSLSGHWPGSASGMRLSEHMGVPARSRAKAETQKQREMGLHRRPGPLRDLHPRQSLWTAEQELPPHPAVGAEGRPARATDRSRPGPSILLRCGAEEASVWSGCWTPKAREEAMALEGGISTEGSRRPTGIVHTQHSGGTKPALRAGSGMGRSGSCGVAGEKGRCALPAQASPHLKVQRGGSPQKAARAGLTDRAPGPRCGPQGQQTAGREEGEDGASAEGDGPSLDEGQF

SEQ ID NO: 7676 - DNA, 988 bp, Homo sapiens
cttagctttatgcgctcagaaaccaaattaaaccccccccccatgtaacaggggggcagtgacaaaagcaagaacgcacgaagccagcctggagaccaccacgtcctgccccccgccatttatcgccctgattggattttgtttttcatctgtccctgttgcttgggttgagttgagggtggagcctcctggggggcactggccactgagcccccttggagaagtcagaggggagtggagaaggccactgtccggcctggcttctggggacagtggctggtccccagaagtcctgagggcggaggggggggttgggcagggtctcctcaggtgtcaggagggtgctcggaggccacaggagggggctcctggctggcctgaggctggccggaggggaaggggctagcaggtgtgtaaacagagggttccatcaggctggggcagggtggccgccttccgcacacttgaggaaccctcccctctccctcggtgacatcttgcccgcccctcagcaccctgccttgtctccaggaggtccgaagctctgtgggacctcttgggggcaaggtggggtgaggccggggagtagggaggtcaggcgggtctgagcccacagagcaggagagctgccaggtctgcccatcgaccaggtttgcagctctcccctgggccactaaccatcctggcccgggctgcctgtctgacctccgtgcctagtcgtggctctccatcttgtctcctccccgtgtccccaatgtcttcagtggggggccccctcttgggtcccctcctctgccatcacctgaagacccccacgccaaacactgaatgtcacctgtgcctgccgcctcggtccaccttgcggcccgtgtttgactcaactcaactcctttaacgctaatatttccggcaaaatcccatgcttgggttttgtctttaaccttgtaacgcttgcaatcccaataaagcattaaaagtcatgatcttc

SEQ ID NO: 7677 - protein, 46 aa, Homo sapiens
MSSVGGPLLGPLLCHHLKTPTPNTECHLCLPPRSTLRPVFDSTQLL

SEQ ID NO: 7678 - DNA, 1176 bp, Homo sapiens
atttcatgtcaattgatctattccccctctttgtttcttggggcatttttccttttttttttttttttgttttttttttacccctccttagctttatgcgctcagaaaccaaattaaaccccccccccatgtaacaggggggcagtgacaaaagcaagaacgcacgaagccagcctggagaccaccacgtcctgccccccgccatttatcgccctgattggattttgtttttcatctgtccctgttgcttgggttgagttgagggtggagcctcctggggggcactggccactgagcccccttggagaagtcagaggggagtggagaaggccactgtccggcctggcttctggggacagtggctggtccccagaagtcctgagggcggaggggggggttgggcagggtctcctcaggtgtcaggagggtgctcggaggccacaggagggggctcctggctggcctgaggctggccggaggggaaggggctagcaggtgtgtaaacagagggttccatcaggctggggcagggtggccgccttccgcacacttgaggaaccctcccctctccctcggtgacatcttgcccgcccctcagcaccctgccttgtctccaggaggtccgaagctctgtgggacctcttgggggcaaggtggggtgaggccggggagtagggaggtcaggcgggtctgagcccacagagcaggagagctgccaggtctgcccatcgaccaggttgcttgggccccggagcccacgggtctggtgatgccatagcagccaccaccgcggcgcctagggctgcggcagggactcggcctctgggaggtttacctcgcccccacttgtgcccccagctcagcccccctgcacgcagcccgactagcagtctagaggcctgaggcttctgggtcctggtgacggggctggcatgaccccgggggtcgtccatgccagtccgcctcttgggtcccctcctctgccatcacctgaagacccccacgccaaacactgaatgtcacctgtgcctgccgcctcggtccaccttgcggcccgtgtttgactcaactcaactcctttaacgctaatatttccggcaaaatcccatgcttgggttttgtctttaaccttgtaacgcttgcaatcccaataaagcattaaaagtcatgatcttc

SEQ ID NO: 7679 - protein, 43 aa, Homo sapiens
MPVRLLGPLLCHHLKTPTPNTECHLCLPPRSTLRPVFDSTQLL

SEQ ID NO: 7680 - DNA, 1149 bp, Homo sapiens
ggctgggcggggggagttctggggtaggaagtggtcccgggagattttggatggaaaagtcaggaggattgacagcagacttgcagaattacatagagaaattaggaacccccaaatttcatgtcaattgatctattccccctctttgtttcttggggcatttttccttttttttttttttttgttttttttttacccctccttagctttatgcgctcagaaaccaaattaaaccccccccccatgtaacaggggggcagtgacaaaagcaagaacgcacgaagccagcctggagaccaccacgtcctgccccccgccatttatcgccctgattggattttgtttttcatctgtccctgttgcttgggttgagttgagggtggagcctcctggggggcactggccactgagcccccttggagaagtcagaggggagtggagaaggccactgtccggcctggcttctggggacagtggctggtccccagaagtcctgagggcggaggggggggttgggcagggtctcctcaggtgtcaggagggtgctcggaggccacaggagggggctcctggctggcctgaggctggccggaggggaaggggctagcaggtgtgtaaacagagggttccatcaggctggggcagggtggccgccttccgcacacttgaggaaccctcccctctccctcggtgacatcttgcccgcccctcagcaccctgccttgtctccaggaggtccgaagctctgtgggacctcttgggggcaaggtggggtgaggccggggagtagggaggtcaggcgggtctgagcccacagagcaggagagctgccaggtctgcccatcgaccaggttgcttgggccccggagcccacgggtctggtgatgccatagcagccaccaccgcggcgcctagggctgcggcagggactcggccttcttgggtcccctcctctgccatcacctgaagacccccacgccaaacactgaatgtcacctgtgcctgccgcctcggtccaccttgcggcccgtgtttgactcaactcaactcctttaacgctaatatttccggcaaaatcccatgcttgggttttgtctttaaccttgtaacgcttgcaatcccaataaagcattaaaagtcatgatcttc

SEQ ID NO: 7681 - protein, 42 aa, Homo sapiens
MSIDLFPLFVSWGIFPFFFFFVFFLPLLSFMRSETKLNPPPM

SEQ ID NO: 7682 - DNA, 1574 bp, Homo sapiens
ggctgggcggggggagttctggggtaggaagtggtcccgggagattttggatggaaaagtcaggaggattgacagcagacttgcagaattacatagagaaattaggaacccccaaatttcatgtcaattgatctattccccctctttgtttcttggggcatttttccttttttttttttttttgttttttttttacccctccttagctttatgcgctcagaaaccaaattaaaccccccccccatgtaacaggggggcagtgacaaaagcaagaacgcacgaagccagcctggagaccaccacgtcctgccccccgccatttatcgccctgattggattttgtttttcatctgtccctgttgcttgggttgagttgagggtggagcctcctggggggcactggccactgagcccccttggagaagtcagaggggagtggagaaggccactgtccggcctggcttctggggacagtggctggtccccagaagtcctgagggcggaggggggggttgggcagggtctcctcaggtgtcaggagggtgctcggaggccacaggagggggctcctggctggcctgaggctggccggaggggaaggggctagcaggtgtgtaaacagagggttccatcaggctggggcagggtggccgccttccgcacacttgaggaaccctcccctctccctcggtgacatcttgcccgcccctcagcaccctgccttgtctccaggaggtccgaagctctgtgggacctcttgggggcaaggtggggtgaggccggggagtagggaggtcaggcgggtctgagcccacagagcaggagagctgccaggtctgcccatcgaccaggttgcttgggccccggagcccacgggtctggtgatgccatagcagccaccaccgcgcccgactagcagtctagaggcctgaggcttctgggtcctggtgacggggctggcatgaccccgggggtcgtccatgccagtccgcctcagtcgcagagggtccctcggcaagcgccctgtgagtgggccattcggaacattggacagaagcccaaagagccaaattgtcacaattgtggaacccacattggcctgagatccaaaacgcttcgaggcaccccaaattacctgcccattcgtcaggacacccacccacccagtgttatattctgcctcgccggagtgggtgttcccgggggcacttgccgaccagccccttgcgtccccaggtttgcagctctcccctgggccactaaccatcctggcccgggctgcctgtctgacctccgtgcctagtcgtggctctccatcttgtctcctccccgtgtccccaatgtcttcagtggggggccccctcttgggtcccctcctctgccatcacctgaagacccccacgccaaacactgaatgtcacctgtgcctgccgcctcggtccaccttgcggcccgtgtttgactcaactcaactcctttaacgctaatatttccggcaaaatcccatgcttgggttttgtctttaaccttgtaacgcttgcaatcccaataaagcattaaaagtcatgatcttc

SEQ ID NO: 7683 - protein, 113 aa, Homo sapiens
MTPGVVHASPPQSQRVPRQAPCEWAIRNIGQKPKEPNCHNCGTHIGLRSKTLRGTPNYLPIRQDTHPPSVIFCLAGVGVPGGTCRPAPCVPRFAALPWATNHPGPGCLSDLRA

SEQ ID NO: 7684 - DNA, 1467 bp, Homo sapiens
gtgggtggggggcagtgggggctgggcggggggagttctggggtaggaagtggtcccgggagattttggatggaaaagtcaggaggattgacagcagacttgcagaattacatagagaaattaggaacccccaaatttcatgtcaattgatctattccccctctttgtttcttggggcatttttccttttttttttttttttgttttttttttacccctccttagctttatgcgctcagaaaccaaattaaaccccccccccatgtaacaggggggcagtgacaaaagcaagaacgcacgaagccagcctggagaccaccacgtcctgccccccgccatttatcgccctgattggattttgtttttcatctgtccctgttgcttgggttgagttgagggtggagcctcctggggggcactggccactgagcccccttggagaagtcagaggggagtggagaaggccactgtccggcctggcttctggggacagtggctggtccccagaagtcctgagggcggaggggggggttgggcagggtctcctcaggtgtcaggagggtgctcggaggccacaggagggggctcctggctggcctgaggctggccggaggggaaggggctagcaggtgtgtaaacagagggttccatcaggcaggttgcttgggccccggagcccacgggtctggtgatgccatagcagccaccaccgcggcgcctagggctgcggcagggactcggcctctgggaggtttacctcgcccccacttgtgcccccagctcagcccccctgcacgcagcccgactagcagtctagaggcctgaggcttctgggtcctggtgacggggctggcatgaccccgggggtcgtccatgccagtccgcctcagtcgcagagggtccctcggcaagcgccctgtgagtgggccattcggaacattggacagaagcccaaagagccaaattgtcacaattgtggaacccacattggcctgagatccaaaacgcttcgaggcaccccaaattacctgcccattcgtcaggacacccacccacccagtgttatattctgcctcgccggagtgggtgttcccgggggcacttgccgaccagccccttgcgtccccaggtttgcagctctcccctgggccactaaccatcctggcccgggctgcctgtctgacctccgtgcctagtcgtggctctccatcttgtctcctccccgtgtccccaatgtcttcagtggggggccccctcttgggtcccctcctctgccatcacctgaagacccccacgccaaacactgaatgtcacctgtgcctgccgcctcggtccaccttgcggcccgtgtttgactcaactcaactcctttaacgctaatatttccggcaaaatcccatgcttgggttttgtctttaaccttgtaacgcttgcaatcccaataaagcattaaaagtcatgatcttc

SEQ ID NO: 7685 - protein, 113 aa, Homo sapiens; identical to SEQ ID NO: 7683

SEQ ID NO: 7686 - DNA, 1231 bp, Homo sapiens
gtgggtggggggcagtgggggctgggcggggggagttctggggtaggaagtggtcccgggagattttggatggaaaagtcaggaggattgacagcagacttgcagaattacatagagaaattaggaacccccaaatttcatgtcaattgatctattccccctctttgtttcttggggcatttttccttttttttttttttttgttttttttttacccctccttagctttatgcgctcagaaaccaaattaaaccccccccccatgtaacaggggggcagtgacaaaagcaagaacgcacgaagccagcctggagaccaccacgtcctgccccccgccatttatcgccctgattggattttgtttttcatctgtccctgttgcttgggttgagttgagggtggagcctcctggggggcactggccactgagcccccttggagaagtcagaggggagtggagaaggccactgtccggcctggcttctggggacagtggctggtccccagaagtcctgagggcggaggggggggttgggcagggtctcctcaggtgtcaggagggtgctcggaggccacaggagggggctcctggctggcctgaggctggccggaggggaaggggctagcaggtgtgtaaacagaggtccgcctcagtcgcagagggtccctcggcaagcgccctgtgagtgggccattcggaacattggacagaagcccaaagagccaaattgtcacaattgtggaacccacattggcctgagatccaaaacgcttcgaggcaccccaaattacctgcccattcgtcaggacacccacccacccagtgttatattctgcctcgccggagtgggtgttcccgggggcacttgccgaccagccccttgcgtccccaggtttgcagctctcccctgggccactaaccatcctggcccgggctgcctgtctgacctccgtgcctagtcgtggctctccatcttgtctcctccccgtgtccccaatgtcttcagtggggggccccctcttgggtcccctcctctgccatcacctgaagacccccacgccaaacactgaatgtcacctgtgcctgccgcctcggtccaccttgcggcccgtgtttgactcaactcaactcctttaacgctaatatttccggcaaaatcccatgcttgggttttgtctttaaccttgtaacgcttgcaatcccaataaagcattaaaagtcatgatcttc

SEQ ID NO: 7687 - protein, 46 aa, Homo sapiens; identical to SEQ ID NO: 7677

SEQ ID NO: 7688 - DNA, 1524 bp, Homo sapiens
gtgtgggaagtctggcggttggaggggtgggtggggggcagtgggggctgggcggggggagttctggggtaggaagtggtcccgggagattttggatggaaaagtcaggaggattgacagcagacttgcagaattacatagagaaattaggaacccccaaatttcatgtcaattgatctattccccctctttgtttcttggggcatttttccttttttttttttttttgttttttttttacccctccttagctttatgcgctcagaaaccaaattaaaccccccccccatgtaacaggggggcagtgacaaaagcaagaacgcacgaagccagcctggagaccaccacgtcctgccccccgccatttatcgccctgattggattttgtttttcatctgtccctgttgcttgggttgagttgagggtggagcctcctggggggcactggccactgagcccccttggagaagtcagaggggagtggagaaggccactgtccggcctggcttctggggacagtggctggtccccagaagtccctcccctctccctcggtgacatcttgcccgcccctcagcaccctgccttgtctccaggaggtccgaagctctgtgggacctcttgggggcaaggtggggtgaggccggggagtagggaggtcaggcgggtctgagcccacagagcaggagagctgccaggtctgcccatcgaccaggttgcttgggccccggagcccacgggtctggtgatgccatagcagccaccaccgcggcgcctagggctgcggcagggactcggcctctgggaggtttacctcgcccccacttgtgcccccagctcagcccccctgcacgcagcccgactagcagtctagaggcctgaggcttctgggtcctggtgacggggctggcatgaccccgggggtcgtccatgccagtccgcctcagtcgcagagggtccctcggcaagcgccctgtgagtgggccattcggaacattggacagaagcccaaagagccaaattgtcacaattgtggaacccacattggcctgagatccaaaacgcttcgaggcaccccaaattacctgcccattcgtcaggacacccacccacccagtgttatattctgcctcgccggagtgggtgttcccgggggcacttgccgaccagccccttgcgtccccaggtttgcagctctcccctgggccactaaccatcctggcccgggctgcctgtctgacctccgtgcctagtcgtggctctccatcttgtctcctccccgtgtccccaatgtcttcagtggggggccccctcttgggtcccctcctctgccatcacctgaagacccccacgccaaacactgaatgtcacctgtgcctgccgcctcggtccaccttgcggcccgtgtttgactcaactcaactcctttaacgctaatatttccggcaaaatcccatgcttgggttttgtctttaaccttgtaacgcttgcaatcccaataaagcattaaaagtcatgatcttc

SEQ ID NO: 7689 - protein, 113 aa, Homo sapiens; identical to SEQ ID NO: 7683

SEQ ID NO: 7690 - DNA, 1598 bp, Homo sapiens
attcccgatacaccttacttactgtgtgttggcccagccagagtgaggaaggagtttggccacattggagatggcggtagctgagcagacatgcccccacgagtagcctgactccctggtgtgctcctggaaggaagatcttggggacccccccaccggagcacacctagggatcatctttgcccgtctcctggggaccccccaagaaatgtggagtcctcgggggccgtgcactgatgcggggagtgtgggaagtctggcggttggaggggtgggtggggggcagtgggggctgggcggggggagttctggggtaggaagtggtcccgggagattttggatggaaaagtcaggaggattgacagcagacttgcagaattacatagagaaattaggaacccccaaatttcatgtcaattgatctattccccctctttgtttcttggggcatttttccttttttttttttttttgttttttttttacccctccttagctttatgcgctcagaaaccaaattaaaccccccccccatgtaacaggggggcagtgacaaaagcaagaacgcacgaagccagcctggagaccaccacgtcctgccccccgccatttatcgccctgattggattttgtttttcatctgtccctgttgcttgggttgagttgagggtggagcctcctggggggcactggccactgagcccccttggagaagtcagaggggatagggaggtcaggcgggtctgagcccacagagcaggagagctgccaggtctgcccatcgaccaggttgcttgggccccggagcccacgggtctggtgatgccatagcagccaccaccgcggcgcctagggctgcggcagggactcggcctctgggaggtttacctcgcccccacttgtgcccccagctcagcccccctgcacgcagcccgactagcagtctagaggcctgaggcttctgggtcctggtgacggggctggcatgaccccgggggtcgtccatgccagtccgcctcagtcgcagagggtccctcggcaagcgccctgtgagtgggccattcggaacattggacagaagcccaaagagccaaattgtcacaattgtggaacccacattggcctgagatccaaaacgcttcgaggcaccccaaattacctgcccattcgtcaggacacccacccacccagtgttatattctgcctcgccggagtgggtgttcccgggggcacttgccgaccagccccttgcgtccccaggtttgcagctctcccctgggccactaaccatcctggcccgggctgcctgtctgacctccgtgcctagtcgtggctctccatcttgtctcctccccgtgtccccaatgtcttcagtggggggccccctcttgggtcccctcctctgccatcacctgaagacccccacgccaaacactgaatgtcacctgtgcctgccgcctcggtccaccttgcggcccgtgtttgactcaactcaactcctttaacgctaatatttccggcaaaatcccatgcttgggttttgtctttaaccttgtaacgcttgcaatcccaataaagcattaaaagtcatgatcttc

SEQ ID NO: 7691 - protein, 113 aa, Homo sapiens; identical to SEQ ID NO: 7683

SEQ ID NO: 7692 - DNA, 1859 bp, Homo sapiens
agcgtgagccacgatgctccccataccccacccattcccgatacaccttacttactgtgtgttggcccagccagagtgaggaaggagtttggccacattggagatggcggtagctgagcagacatgcccccacgagtagcctgactccctggtgtgctcctggaaggaagatcttggggacccccccaccggagcacacctagggatcatctttgcccgtctcctggggaccccccaagaaatgtggagtcctcgggggccgtgcactgatgcggggagtgtgggaagtctggcggttggaggggtgggtggggggcagtgggggctgggcggggggagttctggggtaggaagtggtcccgggagattttggatggaaaagtcaggaggattgacagcagacttgcagaattacatagagaaattaggaacccccaaatttcatgtcaattgatctattccccctctttgtttcttggggcatttttccttttttttttttttttgttttttttttacccctccttagctttatgcgctcagaaaccaaattaaaccccccccccatgtaacaggggggcagtgacaaaagcaagaacgcacgaagccagcctggagaccaccacgtcctgccccccgccatttatcgccctgattggattttgtttttcatctgtccctgttgcttgggttgagttgagggtggagcctcctggggggcactggccactgagcccccttggagaagtcagaggggagtggagaaggccactgtccggcctggcttctggggacagtggctggtccccagaagtcctgagggcggaggggggggttgggcagggtctcctcaggtgtcaggagggtgctcggaggccacaggagggggctcctggctggcctgaggctggccggaggggaaggggctagcaggtgtgtaaacagagggttccatcaggctggggcagggtggccgccttccgcacacttgaggtcaggcgggtctgagcccacagagcaggagagctgccaggtctgcccatcgaccaggttgcttgggccccggagcccacgggtctggtgatgccatagcagccaccaccgcggcgcctagggctgcggcagggactcggcctctgggaggtttacctcgcccccacttgtgcccccagctcagcccccctgcacgcagcccgactagcagtctagaggcctgaggcttctgggtcctggtgacggggctggcatgaccccgggggtcgtccatgccagtccgcctcagtcgcagagggtccctcggcaagcgccctgtgagtgggccattcggaacattggacagaagcccaaagagccaaattgtcacaattgtggaacccacattggcctgagatccaaaacgcttcgaggcaccccaaattacctgcccattcgtcaggacacccacccacccagtgttatattctgcctcgccggagtgggtgttcccgggggcacttgccgaccagccccttgcgtccccaggtttgcagctctcccctgggccactaaccatcctggcccgggctgcctgtctgacctccgtgcctagtcgtggctctccatcttgtctcctccccgtgtccccaatgtcttcagtggggggccccctcttgggtcccctcctctgccatcacctgaagacccccacgccaaacactgaatgtcacctgtgcctgccgcctcggtccaccttgcggcccgtgtttgactcaactcaactcctttaacgctaatatttccggcaaaatcccatgcttgggttttgtctttaaccttgtaacgcttgcaatcccaataaagcattaaaagtcatgatcttc

SEQ ID NO: 7693 - protein, 113 aa, Homo sapiens; identical to SEQ ID NO: 7683

SEQ ID NO: 7694 - DNA, 1745 bp, Homo sapiens
gtcccgctaagattctccaatgttttcatggtctgagccccgctcctgttcccatctccactgcccctcggccctgtctgtgccctgcctctcagaggagggggctcagatggtgcggcctgagtgtgcggccggcggcatttgggatacacccgtagggtgggcggggtgtgtcccaggcctaattccatctttccaccatgacagagatgcccttgtgaggctggcctccttggcgcctgtccccacggcccccgcagcgtgagccacgatgctccccataccccacccattcccgatacaccttacttactgtgtgttggcccagccagagtgaggaaggagtttggccacattggagatggcggtagctgagcagacatgcccccacgagtagcctgactccctggtgtgctcctggaaggaagatcttggggacccccccaccggagcacacctagggatcatctttgcccgtctcctggggaccccccaagaaatgtggagtcctcgggggccgtgcactgatgcggggagtgtgggaagtctggcggttggaggggtgggtggggggcagtgggggctgggcggggggagttctggggtaggaagtggtcccgggagattttggatggaaaagtcaggagggggctcctggctggcctgaggctggccggaggggaaggggctagcaggtgtgtaaacagagggttccatcaggctggggcagggtggccgccttccgcacacttgaggaaccctcccctctccctcggtgacatcttgcccgcccctcagcaccctgccttgtctccaggaggtccgaagctctgtgggacctcttgggggcaaggtggggtgaggccggggagtagggaggtcaggcgggtctgagcccacagagcaggagagctgccaggtctgcccatcgaccaggttgcttgggccccggagcccacgggtctggtgatgccatagcagccaccaccgcggcgcctagggctgcggcagggactcggcctctgggaggtttacctcgcccccacttgtgcccccagctcagcccccctgcacgcagcccgactagcagtctagaggcctgaggcttctgggtcctggtgacggggctggcatgaccccgggggtcgtccatgccagtccgcctcagtcgcagagggtccctcggcaagcgccctgtgagtgggccattcggaacattggacagaagcccaaagagccaaattgtcacaattgtggaacccacattggcctgagatccaaaacgcttcgaggcaccccaaattacctgcccattcgtcaggacacccacccacccagtgttatattctgcctcgccggagtgggtgttcccgggggcacttgccgaccagccccttgcgtccccaggtttgcagctctcccctgggccactaaccatcctggcccgggctgcctgtctgacctccgtgcctagtcgtggctctccatcttgtctcctccccgtgtccccaatgtcttcagtggggggccccctcttgggtcccctcctctgccatcacctgaagacccccacgccaaacactgaatgtcacctgtgcctgccgcctcggtccaccttgcggcccgtgtttgactcaactcaactcctttaacgctaatatttccggcaaaatcccatgcttgggttttgtctttaaccttgtaacgcttgcaatcccaataaagcattaaaagtcatgatcttc

SEQ ID NO: 7695 - protein, 55 aa, Homo sapiens [sequence omitted]

SEQ ID NO: 7696 - DNA, 2550 bp, Homo sapiens
gcacacacgaacacagcacacacagcacacacacaaacacagcacacacatgcacacagcacacgcacacacagcacacacatgaacacagcacacagcacacacatgcacacacagcacacacgcatgcacagcacacatgaacacagcacacacacaaacacacagcacacacatgcacacacagcacacacactcatgcgcagcacatacatgaacacagctcacagcacacaaacacgcagcacacacgttgcacacgcaagcacccacctgcacacacacatgcgcacacacacgcacacccccacaaaattggatgaaaacaataagcatatctaagcaactacgatatctgtatggatcaggccaaagtcccgctaagattctccaatgttttcatgaggagggggctcagatggtgcggcctgagtgtgcggccggcggcatttgggatacacccgtagggtgggcggggtgtgtcccaggcctaattccatctttccaccatgacagagatgcccttgtgaggctggcctccttggcgcctgtccccacggcccccgcagcgtgagccacgatgctccccataccccacccattcccgatacaccttacttactgtgtgttggcccagccagagtgaggaaggagtttggccacattggagatggcggtagctgagcagacatgcccccacgagtagcctgactccctggtgtgctcctggaaggaagatcttggggacccccccaccggagcacacctagggatcatctttgcccgtctcctggggaccccccaagaaatgtggagtcctcgggggccgtgcactgatgcggggagtgtgggaagtctggcggttggaggggtgggtggggggcagtgggggctgggcggggggagttctggggtaggaagtggtcccgggagattttggatggaaaagtcaggaggattgacagcagacttgcagaattacatagagaaattaggaacccccaaatttcatgtcaattgatctattccccctctttgtttcttggggcatttttccttttttttttttttttgttttttttttacccctccttagctttatgcgctcagaaaccaaattaaaccccccccccatgtaacaggggggcagtgacaaaagcaagaacgcacgaagccagcctggagaccaccacgtcctgccccccgccatttatcgccctgattggattttgtttttcatctgtccctgttgcttgggttgagttgagggtggagcctcctggggggcactggccactgagcccccttggagaagtcagaggggagtggagaaggccactgtccggcctggcttctggggacagtggctggtccccagaagtcctgagggcggaggggggggttgggcagggtctcctcaggtgtcaggagggtgctcggaggccacaggagggggctcctggctggcctgaggctggccggaggggaaggggctagcaggtgtgtaaacagagggttccatcaggctggggcagggtggccgccttccgcacacttgaggaaccctcccctctccctcggtgacatcttgcccgcccctcagcaccctgccttgtctccaggaggtccgaagctctgtgggacctcttgggggcaaggtggggtgaggccggggagtagggaggtcaggcgggtctgagcccacagagcaggagagctgccaggtctgcccatcgaccaggttgcttgggccccggagcccacgggtctggtgatgccatagcagccaccaccgcggcgcctagggctgcggcagggactcggcctctgggaggtttacctcgcccccacttgtgcccccagctcagcccccctgcacgcagcccgactagcagtctagaggcctgaggcttctgggtcctggtgacggggctggcatgaccccgggggtcgtccatgccagtccgcctcagtcgcagagggtccctcggcaagcgccctgtgagtgggccattcggaacattggacagaagcccaaagagccaaattgtcacaattgtggaacccacattggcctgagatccaaaacgcttcgaggcaccccaaattacctgcccattcgtcaggacacccacccacccagtgttatattctgcctcgccggagtgggtgttcccgggggcacttgccgaccagccccttgcgtccccaggtttgcagctctcccctgggccactaaccatcctggcccgggctgcctgtctgacctccgtgcctagtcgtggctctccatcttgtctcctccccgtgtccccaatgtcttcagtggggggccccctcttgggtcccctcctctgccatcacctgaagacccccacgccaaacactgaatgtcacctgtgcctgccgcctcggtccaccttgcggcccgtgtttgactcaactcaactcctttaacgctaatatttccggcaaaatcccatgcttgggttttgtctttaaccttgtaacgcttgcaatcccaataaagcattaaaagtcatgatcttc

SEQ ID NO: 7697 - protein, 84 aa, Homo sapiens
MKTISISKQLRYLYGSGQSPAKILQCFHEEGAQMVRPECAAGGIWDTPVGWAGCVPGLIPSFHHDRDALVRLASLAPVPTAPAA

SEQ ID NO: 7698 - DNA, 1700 bp, Homo sapiens
tccccgcagctacacacacacaacacacagcacacgcatgaacacagcacacacacgagcacagcacacacacaaacgcacagcacacacagcacacagatgagcacacagcacacacacaaacgcacagcacacacacgcacacacatgcacacacagcacacaaacgcacggcacacacacgcacacacatgcacacacagcacacacacaaacgcacagcacacacaaacgcacagcacacacgcacacacagcacacacacgagcacacagcacacaaacgcacagcacacgcacacacatgcacacacagcacacacactagcacacagcacacacacaaagacacagcacacacatgcacacacagcacacacacgcgaacacagcacacacgaacacagcacacacagcacacacacaaacacagcacacacatgcacacagcacacgcacacacagcacacacatgaacacagcacacagcacacacatgcacacacagcacacacgcatgcacagcacacatgaacacagcacacacacaaacacacagcacacacatgcacacacagcacacacactcatgcgcagcacatacatgaacacagctcacagcacacaaacacgcagcacacacgttgcacacgcaagcacccacctgcacacacacatgcgcacacacacgcacacccccacaaaattggatgaaaacaataagcatatctaagcaactacgatatctgtatggatcaggccaaagtcccgctaagattctccaatgttttcatggtctgagccccgctcctgttcccatctccactgcccctcggccctgtctgtgccctgcctctcagaggagggggctcagatggtgcggcctgagtgtgcggccggcggcatttgggatacacccgtagggtgggcggggtgtgtcccaggcctaattccatctttccaccatgacagagatgcccttgtgaggctggcctccttggcgcctgtccccacggcccccgcagcgtgagccacgatgctccccataccccacccattcccgatacaccttacttactgtgtgttggcccagccagagtgaggaaggagtttggccacattggagatggcggtagctgagcagacatgcccccacgagtagcctgactccctggtgtgctcctggaaggaagatcttggggacccccccaccggagcacacctagggatcatctttgcccgtctcctggggaccccccaagaaatgtggagtcctcgggggccgtgcactgatgcggggagtgtgggaagtctggcggttggaggggtgggtggggggcagtgggggctgggcggggggagttctggggtaggaagtggtcccgggagattttggatggaaaagtcaggaggattgacagcagacttgcagaattacatagagaaattaggaacccccaaatttcatgtcaattgatctattcccccttcttgggtcccctcctctgccatcacctgaagacccccacgccaaacactgaatgtcacctgtgcctgccgcctcggtccaccttgcggcccgtgtttgactcaactcaactcctttaacgctaatatttccggcaaaatcccatgcttgggttttgtctttaaccttgtaacgcttgcaatcccaataaagcattaaaagtcatgatcttc

SEQ ID NO: 7699 - protein, 123 aa, Homo sapiens
MHTQHTHANTAHTNTAHTAHTQTQHTHAHSTRTHSTHMNTAHSTHMHTQHTRMHSTHEHSTHTNTQHTHAHTAHTLMRSTYMNTAHSTQTRSTHVAHASTHLHTHMRTHTHTPTKLDENNKHI

SEQ ID NO: 7700 - DNA, 1473 bp, Homo sapiens
ccatcactaaaaatcacagagcagtcagagggacccagtaagaccaaaggaggggaggacagagcatgaaaaccaaaatccatgcaaatgaaatgtaattggcacgaccctcacccccaaatcttacatctcaattcccatcctaaaaagcactcatactttatgcatccccgcagctacacacacacaacacacagcacacgcatgaacacagcacacacacgagcacagcacacacacaaacgcacagcacacacagcacacagatgagcacacagcacacacacaaacgcacagcacacacacgcacacacatgcacacacagcacacaaacgcacggcacacacacgcacacacatgcacacacagcacacacacaaacgcacagcacacacaaacgcacagcacacacgcacacacagcacacacacgagcacacagcacacaaacgcacagcacacgcacacacatgcacacacagcacacacactagcacacagcacacacacaaagacacagcacacacatgcacacacagcacacacacgcgaacacagcacacacgaacacagcacacacagcacacacacaaacacagcacacacatgcacacagcacacgcacacacagcacacacatgaacacagcacacagcacacacatgcacacacagcacacacgcatgcacagcacacatgaacacagcacacacacaaacacacagcacacacatgcacacacagcacacacactcatgcgcagcacatacatgaacacagctcacactcagcccccctgcacgcagcccgactagcagtctagaggcctgaggcttctgggtcctggtgacggggctggcatgaccccgggggtcgtccatgccagtccgcctcagtcgcagagggtccctcggcaagcgccctgtgagtgggccattcggaacattggacagaagcccaaagagccaaattgtcacaattgtggaacccacattggcctgagatccaaaacgcttcgaggcaccccaaattacctgcccattcgtcaggacacccacccacccagtgttatattctgcctcgccggagtgggtgttcccgggggcacttgccgaccagccccttgcgtccccaggtttgcagctctcccctgggccactaaccatcctggcccgggctgcctgtctgacctccgtgcctagtcgtggctctccatcttgtctcctccccgtgtccccaatgtcttcagtggggggccccctcttgggtcccctcctctgccatcacctgaagacccccacgccaaacactgaatgtcacctgtgcctgccgcctcggtccaccttgcggcccgtgtttgactcaactcaactcctttaacgctaatatttccggcaaaatcccatgcttgggttttgtctttaaccttgtaacgcttgcaatcccaataaagcattaaaagtcatgatcttc

SEQ ID NO: 7701 - protein, 95 aa, Homo sapiens
MHTQHTHANTAHTNTAHTAHTQTQHTHAHSTRTHSTHMNTAHSTHMHTQHTRMHSTHEHSTHTNTQHTHAHTAHTLMRSTYMNTAHTQPPCTQPD

SEQ ID NO: 7702 - DNA, 954 bp, Homo sapiens
ccacccaagaccccgcccacgggggcgcccccccagagatggccagcaatcggaagtgagcaaaactgccgcaagtctgcagcccggcgccaccatcctgcagcctcctcctgaccacggacgtttccatcaggttccatcccgaaaatctctcggttccacgtccccctggggcttctcctgacccagtccccgtgccccgcctccccgaaacaggctactctcctcggccccctccatcgggctgaggaagcacagcagcatcttcaaacatgtacaaaatcgattggctttaaacacccttcacataccctccccccaaattatccccaattatccccacacataaaaaatcaaaacattaaactaacccccttcccccccccccacaacaaccctcttaaaactaattggctttttagaaacaccccacaaaagctcagaaattggctttaaaaaaaacaaccaccaaaaaaaatcaattggctaaaaaaaaaaagtattaaaaacgaattggctgagaaacaattggcaaaataaaggaatttggcactccccacccccctctttctcttctcccttggactttgagtcaaattggcctggacttgagtccctgaaccagcaaagagaaaagaaggaccccagaaatcacaggtgggcacgtcgctgctaccgccatctcccttctcacgggaattttcagggtaaactggccatccgaaaatagcaacaacccagactggctcctcactcctctgccatcacctgaagacccccacgccaaacactgaatgtcacctgtgcctgccgcctcggtccaccttgcggcccgtgtttgactcaactcaactcctttaacgctaatatttccggcaaaatcccatgcttgggttttgtctttaaccttgtaacgcttgcaatcccaataaagcattaaaagtcatgatcttc

SEQ ID NO: 7703 - protein, 57 aa, Homo sapiens
TSKEKRRTPEITGGHVAATAISLLTGIFRVNWPSENSNNPDWLLTPLPSPEDPHAKH

SEQ ID NO: 7704 - DNA, 4023 bp, Homo sapiens
gacaacttccccagataccccgtgggcaagttcttccaatatgacacctggaagcagtccacccagcgcctgcgcaggggcctgcctgccctcctgcgtgcccgccggggtcacgtgctcgccaaggagctcgaggcgttcagggaggccaaacgtcaccgtcccctgattgctctacccacccaagaccccgcccacgggggcgcccccccagagatggccagcaatcggaagtgagcaaaactgccgcaagtctgcagcccggcgccaccatcctgcagcctcctcctgaccacggacgtttccatcaggttccatcccgaaaatctctcggttccacgtccccctggggcttctcctgacccagtccccgtgccccgcctccccgaaacaggctactctcctcggccccctccatcgggctgaggaagcacagcagcatcttcaaacatgtacaaaatcgattggctttaaacacccttcacataccctccccccaaattatccccaattatccccacacataaaaaatcaaaacattaaactaacccccttcccccccccccacaacaaccctcttaaaactaattggctttttagaaacaccccacaaaagctcagaaattggctttaaaaaaaacaaccaccaaaaaaaatcaattggctaaaaaaaaaaagtattaaaaacgaattggctgagaaacaattggcaaaataaaggaatttggcactccccacccccctctttctcttctcccttggactttgagtcaaattggcctggacttgagtccctgaaccagcaaagagaaaagaaggaccccagaaatcacaggtgggcacgtcgctgctaccgccatctcccttctcacgggaattttcagggtaaactggccatccgaaaatagcaacaacccagactggctcctcactcccttttccatcactaaaaatcacagagcagtcagagggacccagtaagaccaaaggaggggaggacagagcatgaaaaccaaaatccatgcaaatgaaatgtaattggcacgaccctcacccccaaatcttacatctcaattcccatcctaaaaagcactcatactttatgcatccccgcagctacacacacacaacacacagcacacgcatgaacacagcacacacacgagcacagcacacacacaaacgcacagcacacacagcacacagatgagcacacagcacacacacaaacgcacagcacacacaacaaacgcacagcacacacgcacacacagcacacacacgagcacacagcacacaaacgcacagcacacgcacacacatgcacacacagcacacacactagcacacagcacacacacaaagacacagcacacacatgcacacacagcacacacacgcgaacacagcacacacgaacacagcacacacagcacacacacaaacacagcacacacatgcacacagcacacgcacacacagcacacacatgaacacagcacacagcacacacatgcacacacagcacacacgcatgcacagcacacatgaacacagcacacacacaaacacacagcacacacatgcacacacagcacacacactcatgcgcagcacatacatgaacacagctcacagcacacaaacacgcagcacacacgttgcacacgcaagcacccacctgcacacacacatgcgcacacacacgcacacccccacaaaattggatgaaaacaataagcatatctaagcaactacgatatctgtatggatcaggccaaagtcccgctaagattctccaatgttttcatggtctgagccccgctcctgttcccatctccactgcccctcggccctgtctgtgccctgcctctcagaggagggggctcagatggtgcggcctgagtgtgcggccggcggcatttgggatacacccgtagggtgggcggggtgtgtcccaggcctaattccatctttccaccatgacagagatgcccttgtgaggctggcctccttggcgcctgtccccacggcccccgcagcgtgagccacgatgctccccataccccacccattcccgatacaccttacttactgtgtgttggcccagccagagtgaggaaggagtttggccacattggagatggcggtagctgagcagacatgcccccacgagtagcctgactccctggtgtgctcctggaaggaagatcttggggacccccccaccggagcacacctagggatcatctttgcccgtctcctggggaccccccaagaaatgtggagtcctcgggggccgtgcactgatgcggggagtgtgggaagtctggcggttggaggggtgggtggggggcagtgggggctgggcggggggagttctggggtaggaagtggtcccgggagattttggatggaaaagtcaggaggattgacagcagacttgcagaattacatagagaaattaggaacccccaaatttcatgtcaattgatctattccccctctttgtttcttggggcatttttccttttttttttttttttgttttttttttacccctccttagctttatgcgctcagaaaccaaattaaaccccccccccatgtaacaggggggcagtgacaaaagcaagaacgcacgaagccagcctggagaccaccacgtcctgccccccgccatttatcgccctgattggattttgtttttcatctgtccctgttgcttgggttgagttgagggtggagcctcctggggggcactggccactgagcccccttggagaagtcagaggggagtggagaaggccactgtccggcctggcttctggggacagtggctggtccccagaagtcctgagggcggaggggggggttgggcagggtctcctcaggtgtcaggagggtgctcggaggccacaggagggggctcctggctggcctgaggctggccggaggggaaggggctagcaggtgtgtaaacagagggttccatcaggctggggcagggtggccgccttccgcacacttgaggaaccctcccctctccctcggtgacatcttgcccgcccctcagcaccctgccttgtctccaggaggtccgaagctctgtgggacctcttgggggcaaggtggggtgaggccggggagtagggaggtcaggcgggtctgagcccacagagcaggagagctgccaggtctgcccatcgaccaggttgcttgggccccggagcccacgggtctggtgatgccatagcagccaccaccgcggcgcctagggctgcggcagggactcggcctctgggaggtttacctcgcccccacttgtgcccccagctcagcccccctgcacgcagcccgactagcagtctagaggcctgaggcttctgggtcctggtgacggggctggcatgaccccgggggtcgtccatgccagtccgcctcagtcgcagagggtccctcggcaagcgccctgtgagtgggccattcggaacattggacagaagcccaaagagccaaattgtcacaattgtggaacccacattggcctgagatccaaaacgcttcgaggcaccccaaattacctgcccattcgtcaggacacccacccacccagtgttatattctgcctcgccggagtgggtgttcccgggggcacttgccgaccagccccttgcgtccccaggtttgcagctctcccctgggccactaaccatcctggcccgggctgcctgtctgacctccgtgcctagtcgtggctctccatcttgtctcctccccgtgtccccaatgtcttcagtggggggccccctcttgggtcccctcctctgccatcacctgaagacccccacgccaaacactgaatgtcacctgtgcctgccgcctcggtccaccttgcggcccgtgtttgactcaactcaactcctttaacgctaatatttccggcaaaatcccatgcttgggttttgtctttaaccttgtaacgcttgcaatcccaataaagcattaaaagtcatgatcttc

SEQ ID NO: 7705 - protein, 114 aa, Homo sapiens
MSTQHTHKRTAHTTNAQHTRTHSTHTSTQHTNAQHTHTHAHTAHTLAHSTHTKTQHTHAHTAHTREHSTHEHSTHSTHTNTAHTCTQHTHTQHTHEHSTQHTHAHTAHTHAQHT

SEQ ID NO: 7706 - DNA, 4357 bp, Homo sapiens
ggcatcgttgaggagtgctgtttccgcagctgtgacctggccctcctggagacgtactgtgctacccccgccaagtccgagagggacgtgtcgacccctccgaccgtgcttccggtgagggtcctgggcccctttcccactctctagagacagagaaatagggcttcgggcgcccagcgtttcctgtggcctctgggacctcttggccagggacaaggacccgtgacttccttgcttgctgtgtggcccgggagcagctcagacgctggctccttctgtccctctgcccgtggacattagctcaagtcactgatcagtcacaggggtggcctgtcaggtcaggcgggcggctcaggcggaagagcgtggagagcaggcacctgctgaccagccccttcccctcccaggacaacttccccagataccccgtgggcaagttcttccaatatgacacctggaagcagtccacccagcgcctgcgcaggggcctgcctgccctcctgcgtgcccgccggggtcacgtgctcgccaaggagctcgaggcgttcagggaggccaaacgtcaccgtcccctgattgctctacccacccaagaccccgcccacgggggcgcccccccagagatggccagcaatcggaagtgagcaaaactgccgcaagtctgcagcccggcgccaccatcctgcagcctcctcctgaccacggacgtttccatcaggttccatcccgaaaatctctcggttccacgtccccctggggcttctcctgacccagtccccgtgccccgcctccccgaaacaggctactctcctcggccccctccatcgggctgaggaagcacagcagcatcttcaaacatgtacaaaatcgattggctttaaacaccaaccaccaaaaaaaatcaattggctaaaaaaaaaaagtattaaaaacgaattggctgagaaacaattggcaaaataaaggaatttggcactccccacccccctctttctcttctcccttggactttgagtcaaattggcctggacttgagtccctgaaccagcaaagagaaaagaaggaccccagaaatcacaggtgggcacgtcgctgctaccgccatctcccttctcacgggaattttcagggtaaactggccatccgaaaatagcaacaacccagactggctcctcactcccttttccatcactaaaaatcacagagcagtcagagggacccagtaagaccaaaggaggggaggacagagcatgaaaaccaaaatccatgcaaatgaaatgtaattggcacgaccctcacccccaaatcttacatctcaattcccatcctaaaaagcactcatactttatgcatccccgcagctacacacacacaacacacagcacacgcatgaacacagcacacacacgagcacagcacacacacaaacgcacagcacacacagcacacagatgagcacacagcacacacacaaacgcacagcacacacacgcacacacatgcacacacagcacacaaacgcacggcacacacacgcacacacatgcacacacagcacacacacaaacgcacagcacacacaaacgcacagcacacacgcacacacagcacacacacgagcacacagcacacaaacgcacagcacacgcacacacatgcacacacagcacacacactagcacacagcacacacacaaagacacagcacacacatgcacacacagcacacacacgcgaacacagcacacacgaacacagcacacacagcacacacacaaacacagcacacacatgcacacagcacacgcacacacagcacacacatgaacacagcacacagcacacacatgcacacacagcacacacgcatgcacagcacacatgaacacagcacacacacaaacacacagcacacacatgcacacacagcacacacactcatgcgcagcacatacatgaacacagctcacagcacacaaacacgcagcacacacgttgcacacgcaagcacccacctgcacacacacatgcgcacacacacgcacacccccacaaaattggatgaaaacaataagcatatctaagcaactacgatatctgtatggatcaggccaaagtcccgctaagattctccaatgttttcatggtctgagccccgctcctgttcccatctccactgcccctcggccctgtctgtgccctgcctctcagaggagggggctcagatggtgcggcctgagtgtgcggccggcggcatttgggatacacccgtagggtgggcggggtgtgtcccaggcctaattccatctttccaccatgacagagatgcccttgtgaggctggcctccttggcgcctgtccccacggcccccgcagcgtgagccacgatgctccccataccccacccattcccgatacaccttacttactgtgtgttggcccagccagagtgaggaaggagtttggccacattggagatggcggtagctgagcagacatgcccccacgagtagcctgactccctggtgtgctcctggaaggaagatcttggggacccccccaccggagcacacctagggatcatctttgcccgtctcctggggaccccccaagaaatgtggagtcctcgggggccgtgcactgatgcggggagtgtgggaagtctggcggttggaggggtgggtggggggcagtgggggctgggcggggggagttctggggtaggaagtggtcccgggagattttggatggaaaagtcaggaggattgacagcagacttgcagaattacatagagaaattaggaacccccaaatttcatgtcaattgatctattccccctctttgtttcttggggcatttttccttttttttttttttttgttttttttttacccctccttagctttatgcgctcagaaaccaaattaaaccccccccccatgtaacaggggggcagtgacaaaagcaagaacgcacgaagccagcctggagaccaccacgtcctgccccccgccatttatcgccctgattggattttgtttttcatctgtccctgttgcttgggttgagttgagggtggagcctcctggggggcactggccactgagcccccttggagaagtcagaggggagtggagaaggccactgtccggcctggcttctggggacagtggctggtccccagaagtcctgagggcggaggggggggttgggcagggtctcctcaggtgtcaggagggtgctcggaggccacaggagggggctcctggctggcctgaggctggccggaggggaaggggctagcaggtgtgtaaacagagggttccatcaggctggggcagggtggccgccttccgcacacttgaggaaccctcccctctccctcggtgacatcttgcccgcccctcagcaccctgccttgtctccaggaggtccgaagctctgtgggacctcttgggggcaaggtggggtgaggccggggagtagggaggtcaggcgggtctgagcccacagagcaggagagctgccaggtctgcccatcgaccaggttgcttgggccccggagcccacgggtctggtgatgccatagcagccaccaccgcggcgcctagggctgcggcagggactcggcctctgggaggtttacctcgcccccacttgtgcccccagctcagcccccctgcacgcagcccgactagcagtctagaggcctgaggcttctgggtcctggtgacggggctggcatgaccccgggggtcgtccatgccagtccgcctcagtcgcagagggtccctcggcaagcgccctgtgagtgggccattcggaacattggacagaagcccaaagagccaaattgtcacaattgtggaacccacattggcctgagatccaaaacgcttcgaggcaccccaaattacctgcccattcgtcaggacacccacccacccagtgttatattctgcctcgccggagtgggtgttcccgggggcacttgccgaccagccccttgcgtccccaggtttgcagctctcccctgggccactaaccatcctggcccgggctgcctgtctgacctccgtgcctagtcgtggctctccatcttgtctcctccccgtgtccccaatgtcttcagtggggggccccctcttgggtcccctcctctgccatcacctgaagacccccacgccaaacactgaatgtcacctgtgcctgccgcctcggtccaccttgcggcccgtgtttgactcaactcaactcctttaacgctaatatttccggcaaaatcccatgcttgggttttgtctttaaccttgtaacgcttgcaatcccaataaagcattaaaagtcatgatcttc

SEQ ID NO: 7707 - protein, 123 aa, Homo sapiens; identical to SEQ ID NO: 7699

SEQ ID NO: 7708 - DNA, 4475 bp, Homo sapiens
aactggacattagcttctcctgtgaaagagacttccagcttcctcctcctcctcttcctcctcctcctcctgccccagcgagccttctgctgagctacaccaatgggaatcccaatggggaagtcgatgctggtgcttctcaccttcttggccttcgcctcgtgctgcattgctgcttaccgccccagtgagaccctgtgcggcggggagctggtggacaccctccagttcgtctgtggggaccgcggcttctacttcagcaggcccgcaagccgtgtgagccgtcgcagccgtggcatcgttgaggagtgctgtttccgcagctgtgacctggccctcctggagacgtactgtgctacccccgacaacttccccagataccccgtgggcaagttcttccaatatgacacctggaagcagtccacccagcgcctgcgcaggggcctgcctgccctcctgcgtgcccgccggggtcacgtgctcgccaaggagctcgaggcgttcagggaggccaaacgtcaccgtcccctgattgctctacccacccaagaccccgcccacgggggcgcccccccagagatggccagcaatcggaagtgagcaaaactgccgcaagtctgcagcccggcgccaccatcctgcagcctcctcctgaccacggacgtttccatcaggttccatcccgaaaatctctcggttccacgtccccctggggcttctcctgacccagtccccgtgccccgcctccccgaaacaggctactctcctcggccccctccatcgggctgaggaagcacagcagcatcttcaaacatgtacaaaatcgattggctttaaacacccttcacataccctccccccaaattatccccaattatccccacacataaaaaatcaaaacattaaactaacccccttcccccccccccacaacaaccctcttaaaactaattggctttttagaaacaccccacaaaagctcagaaattggctttaaaaaaaacaaccaccaaaaaaaatcaattggctaaaaaaaaaaagtattaaaaacgaattggctgagaaacaattggcaaaataaaggaatttggcactccccacccccctctttctcttctcccttggactttgagtcaaattggcctggacttgagtccctgaaccagcaaagagaaaagaaggaccccagaaatcacaggtgggcacgtcgctgctaccgccatctcccttctcacgggaattttcagggtaaactggccatccgaaaatagcaacaacccagactggctcctcactcccttttccatcactaaaaatcacagagcagtcagagggacccagtaagaccaaaggaggggaggacagagcatgaaaaccaaaatccatgcaaatgaaatgtaattggcacgaccctcacccccaaatcttacatctcaattcccatcctaaaaagcactcatactttatgcatccccgcagctacacacacacaacacacagcacacgcatgaacacagcacacacacgagcacagcacacacacaaacgcacagcacacacagcacacagatgagcacacagcacacacacaaacgcacagcacacacacgcacacacatgcacacacagcacacaaacgcacggcacacacacgcacacacatgcacacacagcacacacacaaacgcacagcacacacaaacgcacagcacacacgcacacacagcacacacacgagcacacagcacacaaacgcacagcacacgcacacacatgcacacacagcacacacactagcacacagcacacacacaaagacacagcacacacatgcacacacagcacacacacgcgaacacagcacacacgaacacagcacacacagcacacacacaaacacagcacacacatgcacacagcacacgcacacacagcacacacatgaacacagcacacagcacacacatgcacacacagcacacacgcatgcacagcacacatgaacacagcacacacacaaacacacagcacacacatgcacacacagcacacacactcatgcgcagcacatacatgaacacagctcacagcacacaaacacgcagcacacacgttgcacacgcaagcacccacctgcacacacacatgcgcacacacacgcacacccccacaaaattggatgaaaacaataagcatatctaagcaactacgatatctgtatggatcaggccaaagtcccgctaagattctccaatgttttcatggtctgagccccgctcctgttcccatctccactgcccctcggccctgtctgtgccctgcctctcagaggagggggctcagatggtgcggcctgagtgtgcggccggcggcatttgggatacacccgtagggtgggcggggtgtgtcccaggcctaattccatctttccaccatgacagagatgcccttgtgaggctggcctccttggcgcctgtccccacggcccccgcagcgtgagccacgatgctccccataccccacccattcccgatacaccttacttactgtgtgttggcccagccagagtgaggaaggagtttggccacattggagatggcggtagctgagcagacatgcccccacgagtagcctgactccctggtgtgctcctggaaggaagatcttggggacccccccaccggagcacacctagggatcatctttgcccgtctcctggggaccccccaagaaatgtggagtcctcgggggccgtgcactgatgcggggagtgtgggaagtctggcggttggaggggtgggtggggggcagtgggggctgggcggggggagttctggggtaggaagtggtcccgggagattttggatggaaaagtcaggaggattgacagcagacttgcagaattacatagagaaattaggaacccccaaatttcatgtcaattgatctattccccctctttgtttcttggggcatttttccttttttttttttttttgttttttttttacccctccttagctttatgcgctcagaaaccaaattaaaccccccccccatgtaacaggggggcagtgacaaaagcaagaacgcacgaagccagcctggagaccaccacgtcctgccccccgccatttatcgccctgattggattttgtttttcatctgtccctgttgcttgggttgagttgagggtggagcctcctggggggcactggccactgagcccccttggagaagtcagaggggagtggagaaggccactgtccggcctggcttctggggacagtggctggtccccagaagtcctgagggcggaggggggggttgggcagggtctcctcaggtgtcaggagggtgctcggaggccacaggagggggctcctggctggcctgaggctggccggaggggaaggggctagcaggtgtgtaaacagagggttccatcaggctggggcagggtggccgccttccgcacacttgaggaaccctcccctctccctcggtgacatcttgcccgcccctcagcaccctgccttgtctccaggaggtccgaagctctgtgggacctcttgggggcaaggtggggtgaggccggggagtagggaggtcaggcgggtctgagcccacagagcaggagagctgccaggtctgcccatcgaccaggttgcttgggccccggagcccacgggtctggtgatgccatagcagccaccaccgcggcgcctagggctgcggcagggactcggcctctgggaggtttacctcgcccccacttgtgcccccagctcagcccccctgcacgcagcccgactagcagtctagaggcctgaggcttctgggtcctggtgacggggctggcatgaccccgggggtcgtccatgccagtccgcctcagtcgcagagggtccctcggcaagcgccctgtgagtgggccattcggaacattggacagaagcccaaagagccaaattgtcacaattgtggaacccacattggcctgagatccaaaacgcttcgaggcaccccaaattacctgcccattcgtcaggacacccacccacccagtgttatattctgcctcgccggagtgggtgttcccgggggcacttgccgaccagccccttgcgtccccaggtttgcagctctcccctgggccactaaccatcctggcccgggctgcctgtctgacctccgtgcctagtcgtggctctccatcttgtctcctccccgtgtccccaatgtcttcagtggggggccccctcttgggtcccctcctctgccatcacctgaagacccccacgccaaacactgaatgtcacctgtgcctgccgcctcggtccaccttgcggcccgtgtttgactcaactcaactcctttaacgctaatatttccggcaaaatcccatgcttgggttttgtctttaaccttgtaacgcttgcaatcccaataaagcattaaaagtcatgatcttc

SEQ ID NO: 7709 - protein, 165 aa, Homo sapiens
MGIPMGKSMLVLLTFLAFASCCIAAYRPSETLCGGELVDTLQFVCGDRGFYFSRPASRVSRRSRGIVEECCFRSCDLALLETYCATPDNFPRYPVGKFFQYDTWKQSTQRLRRGLPALLRARRGHVLAKELEAFREAKRHRPLIALPTQDPAHGGAPPEMASNRK

SEQ ID NO: 7710 - DNA, 4538 bp, Homo sapiens
ggcactgaccagcctgcaaactggacattagcttctcctgtgaaagagacttccagcttcctcctcctcctcttcctcctcctcctcctgccccagcgagccttctgctgagctacaccaatgggaatcccaatggggaagtcgatgctggtgcttctcaccttcttggccttcgcctcgtgctgcattgctgcttaccgccccagtgagaccctgtgcggcggggagctggtggacaccctccagttcgtctgtggggaccgcggcttctacttcagcaggcccgcaagccgtgtgagccgtcgcagccgtggcatcgttgaggagtgctgtttccgcagctgtgacctggccctcctggagacgtactgtgctacccccgccaagtccgagagggacgtgtcgacccctccgaccgtgcttccggacaacttccccagataccccgtgggcaagttcttccaatatgacacctggaagcagtccacccagcgcctgcgcaggggcctgcctgccctcctgcgtgcccgccggggtcacgtgctcgccaaggagctcgaggcgttcagggaggccaaacgtcaccgtcccctgattgctctacccacccaagaccccgcccacgggggcgcccccccagagatggccagcaatcggaagtgagcaaaactgccgcaagtctgcagcccggcgccaccatcctgcagcctcctcctgaccacggacgtttccatcaggttccatcccgaaaatctctcggttccacgtccccctggggcttctcctgacccagtccccgtgccccgcctccccgaaacaggctactctcctcggccccctccatcgggctgaggaagcacagcagcatcttcaaacatgtacaaaatcgattggctttaaacacccttcacataccctccccccaaattatccccaattatccccacacataaaaaatcaaaacattaaactaacccccttcccccccccccacaacaaccctcttaaaactaattggctttttagaaacaccccacaaaagctcagaaattggctttaaaaaaaacaaccaccaaaaaaaatcaattggctaaaaaaaaaaagtattaaaaacgaattggctgagaaacaattggcaaaataaaggaatttggcactccccacccccctctttctcttctcccttggactttgagtcaaattggcctggacttgagtccctgaaccagcaaagagaaaagaaggaccccagaaatcacaggtgggcacgtcgctgctaccgccatctcccttctcacgggaattttcagggtaaactggccatccgaaaatagcaacaacccagactggctcctcactcccttttccatcactaaaaatcacagagcagtcagagggacccagtaagaccaaaggaggggaggacagagcatgaaaaccaaaatccatgcaaatgaaatgtaattggcacgaccctcacccccaaatcttacatctcaattcccatcctaaaaagcactcatactttatgcatccccgcagctacacacacacaacacacagcacacgcatgaacacagcacacacacgagcacagcacacacacaaacgcacagcacacacagcacacagatgagcacacagcacacacacaaacgcacagcacacacacgcacacacatgcacacacagcacacaaacgcacggcacacacacgcacacacatgcacacacagcacacacacaaacgcacagcacacacaaacgcacagcacacacgcacacacagcacacacacgagcacacagcacacaaacgcacagcacacgcacacacatgcacacacagcacacacactagcacacagcacacacacaaagacacagcacacacatgcacacacagcacacacacgcgaacacagcacacacgaacacagcacacacagcacacacacaaacacagcacacacatgcacacagcacacgcacacacagcacacacatgaacacagcacacagcacacacatgcacacacagcacacacgcatgcacagcacacatgaacacagcacacacacaaacacacagcacacacatgcacacacagcacacacactcatgcgcagcacatacatgaacacagctcacagcacacaaacacgcagcacacacgttgcacacgcaagcacccacctgcacacacacatgcgcacacacacgcacacccccacaaaattggatgaaaacaataagcatatctaagcaactacgatatctgtatggatcaggccaaagtcccgctaagattctccaatgttttcatggtctgagccccgctcctgttcccatctccactgcccctcggccctgtctgtgccctgcctctcagaggagggggctcagatggtgcggcctgagtgtgcggccggcggcatttgggatacacccgtagggtgggcggggtgtgtcccaggcctaattccatctttccaccatgacagagatgcccttgtgaggctggcctccttggcgcctgtccccacggcccccgcagcgtgagccacgatgctccccataccccacccattcccgatacaccttacttactgtgtgttggcccagccagagtgaggaaggagtttggccacattggagatggcggtagctgagcagacatgcccccacgagtagcctgactccctggtgtgctcctggaaggaagatcttggggacccccccaccggagcacacctagggatcatctttgcccgtctcctggggaccccccaagaaatgtggagtcctcgggggccgtgcactgatgcggggagtgtgggaagtctggcggttggaggggtgggtggggggcagtgggggctgggcggggggagttctggggtaggaagtggtcccgggagattttggatggaaaagtcaggaggattgacagcagacttgcagaattacatagagaaattaggaacccccaaatttcatgtcaattgatctattccccctctttgtttcttggggcatttttccttttttttttttttttgttttttttttacccctccttagctttatgcgctcagaaaccaaattaaaccccccccccatgtaacaggggggcagtgacaaaagcaagaacgcacgaagccagcctggagaccaccacgtcctgccccccgccatttatcgccctgattggattttgtttttcatctgtccctgttgcttgggttgagttgagggtggagcctcctggggggcactggccactgagcccccttggagaagtcagaggggagtggagaaggccactgtccggcctggcttctggggacagtggctggtccccagaagtcctgagggcggaggggggggttgggcagggtctcctcaggtgtcaggagggtgctcggaggccacaggagggggctcctggctggcctgaggctggccggaggggaaggggctagcaggtgtgtaaacagagggttccatcaggctggggcagggtggccgccttccgcacacttgaggaaccctcccctctccctcggtgacatcttgcccgcccctcagcaccctgccttgtctccaggaggtccgaagctctgtgggacctcttgggggcaaggtggggtgaggccggggagtagggaggtcaggcgggtctgagcccacagagcaggagagctgccaggtctgcccatcgaccaggttgcttgggccccggagcccacgggtctggtgatgccatagcagccaccaccgcggcgcctagggctgcggcagggactcggcctctgggaggtttacctcgcccccacttgtgcccccagctcagcccccctgcacgcagcccgactagcagtctagaggcctgaggcttctgggtcctggtgacggggctggcatgaccccgggggtcgtccatgccagtccgcctcagtcgcagagggtccctcggcaagcgccctgtgagtgggccattcggaacattggacagaagcccaaagagccaaattgtcacaattgtggaacccacattggcctgagatccaaaacgcttcgaggcaccccaaattacctgcccattcgtcaggacacccacccacccagtgttatattctgcctcgccggagtgggtgttcccgggggcacttgccgaccagccccttgcgtccccaggtttgcagctctcccctgggccactaaccatcctggcccgggctgcctgtctgacctccgtgcctagtcgtggctctccatcttgtctcctccccgtgtccccaatgtcttcagtggggggccccctcttgggtcccctcctctgccatcacctgaagacccccacgccaaacactgaatgtcacctgtgcctgccgcctcggtccaccttgcggcccgtgtttgactcaactcaactcctttaacgctaatatttccggcaaaatcccatgcttgggttttgtctttaaccttgtaacgcttgcaatcccaataaagcattaaaagtcatgatcttc

SEQ ID NO: 7711 - protein, 180 aa, Homo sapiens; identical to SEQ ID NO: 830

SEQ ID NO: 7712 - DNA, 4527 bp, Homo sapiens
gagaggggctgctggtctgaggctaagaagggcagagccttcgacccggagagaggccgcggcccctgcccagtgggcagcgtggaagtttccatacaaggagacaccaatgggaatcccaatggggaagtcgatgctggtgcttctcaccttcttggccttcgcctcgtgctgcattgctgcttaccgccccagtgagaccctgtgcggcggggagctggtggacaccctccagttcgtctgtggggaccgcggcttctacttcagcaggcccgcaagccgtgtgagccgtcgcagccgtggcatcgttgaggagtgctgtttccgcagctgtgacctggccctcctggagacgtactgtgctacccccgccaagtccgagagggacgtgtcgacccctccgaccgtgcttccggacaacttccccagataccccgtgggcaagttcttccaatatgacacctggaagcagtccacccagcgcctgcgcaggggcctgcctgccctcctgcgtgcccgccggggtcacgtgctcgccaaggagctcgaggcgttcagggaggccaaacgtcaccgtcccctgattgctctacccacccaagaccccgcccacgggggcgcccccccagagatggccagcaatcggaagtgagcaaaactgccgcaagtctgcagcccggcgccaccatcctgcagcctcctcctgaccacggacgtttccatcaggttccatcccgaaaatctctcggttccacgtccccctggggcttctcctgacccagtccccgtgccccgcctccccgaaacaggctactctcctcggccccctccatcgggctgaggaagcacagcagcatcttcaaacatgtacaaaatcgattggctttaaacacccttcacataccctccccccaaattatccccaattatccccacacataaaaaatcaaaacattaaactaacccccttcccccccccccacaacaaccctcttaaaactaattggctttttagaaacaccccacaaaagctcagaaattggctttaaaaaaaacaaccaccaaaaaaaatcaattggctaaaaaaaaaaagtattaaaaacgaattggctgagaaacaattggcaaaataaaggaatttggcactccccacccccctctttctcttctcccttggactttgagtcaaattggcctggacttgagtccctgaaccagcaaagagaaaagaaggaccccagaaatcacaggtgggcacgtcgctgctaccgccatctcccttctcacgggaattttcagggtaaactggccatccgaaaatagcaacaacccagactggctcctcactcccttttccatcactaaaaatcacagagcagtcagagggacccagtaagaccaaaggaggggaggacagagcatgaaaaccaaaatccatgcaaatgaaatgtaattggcacgaccctcacccccaaatcttacatctcaattcccatcctaaaaagcactcatactttatgcatccccgcagctacacacacacaacacacagcacacgcatgaacacagcacacacacgagcacagcacacacacaaacgcacagcacacacagcacacagatgagcacacagcacacacacaaacgcacagcacacacacgcacacacatgcacacacagcacacaaacgcacggcacacacacgcacacacatgcacacacagcacacacacaaacgcacagcacacacaaacgcacagcacacacgcacacacagcacacacacgagcacacagcacacaaacgcacagcacacgcacacacatgcacacacagcacacacactagcacacagcacacacacaaagacacagcacacacatgcacacacagcacacacacgcgaacacagcacacacgaacacagcacacacagcacacacacaaacacagcacacacatgcacacagcacacgcacacacagcacacacatgaacacagcacacagcacacacatgcacacacagcacacacgcatgcacagcacacatgaacacagcacacacacaaacacacagcacacacatgcacacacagcacacacactcatgcgcagcacatacatgaacacagctcacagcacacaaacacgcagcacacacgttgcacacgcaagcacccacctgcacacacacatgcgcacacacacgcacacccccacaaaattggatgaaaacaataagcatatctaagcaactacgatatctgtatggatcaggccaaagtcccgctaagattctccaatgttttcatggtctgagccccgctcctgttcccatctccactgcccctcggccctgtctgtgccctgcctctcagaggagggggctcagatggtgcggcctgagtgtgcggccggcggcatttgggatacacccgtagggtgggcggggtgtgtcccaggcctaattccatctttccaccatgacagagatgcccttgtgaggctggcctccttggcgcctgtccccacggcccccgcagcgtgagccacgatgctccccataccccacccattcccgatacaccttacttactgtgtgttggcccagccagagtgaggaaggagtttggccacattggagatggcggtagctgagcagacatgcccccacgagtagcctgactccctggtgtgctcctggaaggaagatcttggggacccccccaccggagcacacctagggatcatctttgcccgtctcctggggaccccccaagaaatgtggagtcctcgggggccgtgcactgatgcggggagtgtgggaagtctggcggttggaggggtgggtggggggcagtgggggctgggcggggggagttctggggtaggaagtggtcccgggagattttggatggaaaagtcaggaggattgacagcagacttgcagaattacatagagaaattaggaacccccaaatttcatgtcaattgatctattccccctctttgtttcttggggcatttttccttttttttttttttttgttttttttttacccctccttagctttatgcgctcagaaaccaaattaaaccccccccccatgtaacaggggggcagtgacaaaagcaagaacgcacgaagccagcctggagaccaccacgtcctgccccccgccatttatcgccctgattggattttgtttttcatctgtccctgttgcttgggttgagttgagggtggagcctcctggggggcactggccactgagcccccttggagaagtcagaggggagtggagaaggccactgtccggcctggcttctggggacagtggctggtccccagaagtcctgagggcggaggggggggttgggcagggtctcctcaggtgtcaggagggtgctcggaggccacaggagggggctcctggctggcctgaggctggccggaggggaaggggctagcaggtgtgtaaacagagggttccatcaggctggggcagggtggccgccttccgcacacttgaggaaccctcccctctccctcggtgacatcttgcccgcccctcagcaccctgccttgtctccaggaggtccgaagctctgtgggacctcttgggggcaaggtggggtgaggccggggagtagggaggtcaggcgggtctgagcccacagagcaggagagctgccaggtctgcccatcgaccaggttgcttgggccccggagcccacgggtctggtgatgccatagcagccaccaccgcggcgcctagggctgcggcagggactcggcctctgggaggtttacctcgcccccacttgtgcccccagctcagcccccctgcacgcagcccgactagcagtctagaggcctgaggcttctgggtcctggtgacggggctggcatgaccccgggggtcgtccatgccagtccgcctcagtcgcagagggtccctcggcaagcgccctgtgagtgggccattcggaacattggacagaagcccaaagagccaaattgtcacaattgtggaacccacattggcctgagatccaaaacgcttcgaggcaccccaaattacctgcccattcgtcaggacacccacccacccagtgttatattctgcctcgccggagtgggtgttcccgggggcacttgccgaccagccccttgcgtccccaggtttgcagctctcccctgggccactaaccatcctggcccgggctgcctgtctgacctccgtgcctagtcgtggctctccatcttgtctcctccccgtgtccccaatgtcttcagtggggggccccctcttgggtcccctcctctgccatcacctgaagacccccacgccaaacactgaatgtcacctgtgcctgccgcctcggtccaccttgcggcccgtgtttgactcaactcaactcctttaacgctaatatttccggcaaaatcccatgcttgggttttgtctttaaccttgtaacgcttgcaatcccaataaagcattaaaagtcatgatcttc

SEQ ID NO: 7713 - protein, 180 aa, Homo sapiens; identical to SEQ ID NO: 830

SEQ ID NO: 7714 - DNA, 4094 bp, Homo sapiens
ccccagtcaccgcctcccccggcccctcgacgtggcgcccttccctccgcttctctgtgctccccgcgcccctcttggcgtctggccccggcccccgctctttctcccgcaaccttcccttcgctccctcccgtcccccccagctcctagcctccgactccctccccccctcacgcccgccctctcgccttcgccgaaccaaagtggattaattacacgctttctgtttctctccgtgctgttctctcccgctgtgcgcctgcccgcctctcgctgtcctctctccccctcgccctctcttcggcccccccctttcacgttcactctgtctctcccactatctctgcccccctctatccttgatacaacagctgacctcatttcccgataccttttcccccccgaaaagtacaacatctggcccgccccagcccgaagacagcccgtcctccctggacaatcagacgaattcctccccccaaattatccccaattatccccacacataaaaaatcaaaacattaaactaacccccttcccccccccccacaacaaccctcttaaaactaattggctttttagaaacaccccacaaaagctcagaaattggctttaaaaaaaacaaccaccaaaaaaaatcaattggctaaaaaaaaaaagtattaaaaacgaattggctgagaaacaattggcaaaataaaggaatttggcactccccacccccctctttctcttctcccttggactttgagtcaaattggcctggacttgagtccctgaaccagcaaagagaaaagaaggaccccagaaatcacaggtgggcacgtcgctgctaccgccatctcccttctcacgggaattttcagggtaaactggccatccgaaaatagcaacaacccagactggctcctcactcccttttccatcactaaaaatcacagagcagtcagagggacccagtaagaccaaaggaggggaggacagagcatgaaaaccaaaatccatgcaaatgaaatgtaattggcacgaccctcacccccaaatcttacatctcaattcccatcctaaaaagcactcatactttatgcatccccgcagctacacacacacaacacacagcacacgcatgaacacagcacacacacgagcacagcacacacacaaacgcacagcacacacagcacacagatgagcacacagcacacacacaaacgcacagcacacacacgcacacacatgcacacacagcacacaaacgcacggcacacacacgcacacacatgcacacacagcacacacacaaacgcacagcacacacaaacgcacagcacacacgcacacacagcacacacacgagcacacagcacacaaacgcacagcacacgcacacacatgcacacacagcacacacactagcacacagcacacacacaaagacacagcacacacatgcacacacagcacacacacgcgaacacagcacacacgaacacagcacacacagcacacacacaaacacagcacacacatgcacacagcacacgcacacacagcacacacatgaacacagcacacagcacacacatgcacacacagcacacacgcatgcacagcacacatgaacacagcacacacacaaacacacagcacacacatgcacacacagcacacacactcatgcgcagcacatacatgaacacagctcacagcacacaaacacgcagcacacacgttgcacacgcaagcacccacctgcacacacacatgcgcacacacacgcacacccccacaaaattggatgaaaacaataagcatatctaagcaactacgatatctgtatggatcaggccaaagtcccgctaagattctccaatgttttcatggtctgagccccgctcctgttcccatctccactgcccctcggccctgtctgtgccctgcctctcagaggagggggctcagatggtgcggcctgagtgtgcggccggcggcatttgggatacacccgtagggtgggcggggtgtgtcccaggcctaattccatctttccaccatgacagagatgcccttgtgaggctggcctccttggcgcctgtccccacggcccccgcagcgtgagccacgatgctccccataccccacccattcccgatacaccttacttactgtgtgttggcccagccagagtgaggaaggagtttggccacattggagatggcggtagctgagcagacatgcccccacgagtagcctgactccctggtgtgctcctggaaggaagatcttggggacccccccaccggagcacacctagggatcatctttgcccgtctcctggggaccccccaagaaatgtggagtcctcgggggccgtgcactgatgcggggagtgtgggaagtctggcggttggaggggtgggtggggggcagtgggggctgggcggggggagttctggggtaggaagtggtcccgggagattttggatggaaaagtcaggaggattgacagcagacttgcagaattacatagagaaattaggaacccccaaatttcatgtcaattgatctattccccctctttgtttcttggggcatttttccttttttttttttttttgttttttttttacccctccttagctttatgcgctcagaaaccaaattaaaccccccccccatgtaacaggggggcagtgacaaaagcaagaacgcacgaagccagcctggagaccaccacgtcctgccccccgccatttatcgccctgattggattttgtttttcatctgtccctgttgcttgggttgagttgagggtggagcctcctggggggcactggccactgagcccccttggagaagtcagaggggagtggagaaggccactgtccggcctggcttctggggacagtggctggtccccagaagtcctgagggcggaggggggggttgggcagggtctcctcaggtgtcaggagggtgctcggaggccacaggagggggctcctggctggcctgaggctggccggaggggaaggggctagcaggtgtgtaaacagagggttccatcaggctggggcagggtggccgccttccgcacacttgaggaaccctcccctctccctcggtgacatcttgcccgcccctcagcaccctgccttgtctccaggaggtccgaagctctgtgggacctcttgggggcaaggtggggtgaggccggggagtagggaggtcaggcgggtctgagcccacagagcaggagagctgccaggtctgcccatcgaccaggttgcttgggccccggagcccacgggtctggtgatgccatagcagccaccaccgcggcgcctagggctgcggcagggactcggcctctgggaggtttacctcgcccccacttgtgcccccagctcagcccccctgcacgcagcccgactagcagtctagaggcctgaggcttctgggtcctggtgacggggctggcatgaccccgggggtcgtccatgccagtccgcctcagtcgcagagggtccctcggcaagcgccctgtgagtgggccattcggaacattggacagaagcccaaagagccaaattgtcacaattgtggaacccacattggcctgagatccaaaacgcttcgaggcaccccaaattacctgcccattcgtcaggacacccacccacccagtgttatattctgcctcgccggagtgggtgttcccgggggcacttgccgaccagccccttgcgtccccaggtttgcagctctcccctgggccactaaccatcctggcccgggctgcctgtctgacctccgtgcctagtcgtggctctccatcttgtctcctccccgtgtccccaatgtcttcagtggggggccccctcttgggtcccctcctctgccatcacctgaagacccccacgccaaacactgaatgtcacctgtgcctgccgcctcggtccaccttgcggcccgtgtttgactcaactcaactcctttaacgctaatatttccggcaaaatcccatgcttgggttttgtctttaaccttgtaacgcttgcaatcccaataaagcattaaaagtcatgatcttc

SEQ ID NO: 7715 - protein, 123 aa, Homo sapiens; identical to SEQ ID NO: 7699

SEQ ID NO: 7716 - DNA, 5461 bp, Homo sapiens
cctgtccccctcccgaggcccgggctcgcgacggcagagggctccgtcggcccaaaccgagctgggcgcccgcggtccgggtgcagcctccactccgccccccagtcaccgcctcccccggcccctcgacgtggcgcccttccctccgcttctctgtgctccccgcgcccctcttggcgtctggccccggcccccgctctttctcccgcaaccttcccttcgctccctcccgtcccccccagctcctagcctccgactccctccccccctcacgcccgccctctcgccttcgccgaaccaaagtggattaattacacgctttctgtttctctccgtgctgttctctcccgctgtgcgcctgcccgcctctcgctgtcctctctccccctcgccctctcttcggcccccccctttcacgttcactctgtctctcccactatctctgcccccctctatccttgatacaacagctgacctcatttcccgataccttttcccccccgaaaagtacaacatctggcccgccccagcccgaagacagcccgtcctccctggacaatcagacgaattctccccccccccccaaaaaaaagccatccccccgctctgccccgtcgcacattcggcccccgcgactcggccagagcggcgctggcagaggagtgtccggcaggagggccaacgcccgctgttcggtttgcgacacgcagcagggaggtgggcggcagcgtcgccggcttccagacaccaatgggaatcccaatggggaagtcgatgctggtgcttctcaccttcttggccttcgcctcgtgctgcattgctgcttaccgccccagtgagaccctgtgcggcggggagctggtggacaccctccagttcgtctgtggggaccgcggcttctacttcagcaggcccgcaagccgtgtgagccgtcgcagccgtggcatcgttgaggagtgctgtttccgcagctgtgacctggccctcctggagacgtactgtgctacccccgccaagtccgagagggacgtgtcgacccctccgaccgtgcttccggtgagggtcctgggcccctttcccactctctagagacagagaaatagggcttcgggcgcccagcgtttcctgtggcctctgggacctcttggccagggacaaggacccgtgacttccttgcttgctgtgtggcccgggagcagctcagacgctggctccttctgtccctctgcccgtggacattagctcaagtcactgatcagtcacaggggtggcctgtcaggtcaggcgggcggctcaggcggaagagcgtggagagcaggcacctgctgaccagccccttcccctcccaggacaacttccccagataccccgtgggcaagttcttccaatatgacacctggaagcagtccacccagcgcctgcgcaggggcctgcctgccctcctgcgtgcccgccggggtcacgtgctcgccaaggagctcgaggcgttcagggaggccaaacgtcaccgtcccctgattgctctacccacccaagaccccgcccacgggggcgcccccccagagatggccagcaatcggaagtgagcaaaactgccgcaagtctgcagcccggcgccaccatcctgcagcctcctcctgaccacggacgtttccatcaggttccatcccgaaaatctctcggttccacgtccccctggggcttctcctgacccagtccccgtgccccgcctccccgaaacaggctactctcctcggccccctccatcgggctgaggaagcacagcagcatcttcaaacatgtacaaaatcgattggctttaaacacccttcacataccctccccccaaattatccccaattatccccacacataaaaaatcaaaacattaaactaacccccttcccccccccccacaacaaccctcttaaaactaattggctttttagaaacaccccacaaaagctcagaaattggctttaaaaaaaacaaccaccaaaaaaaatcaattggctaaaaaaaaaaagtattaaaaacgaattggctgagaaacaattggcaaaataaaggaatttggcactccccacccccctctttctcttctcccttggactttgagtcaaattggcctggacttgagtccctgaaccagcaaagagaaaagaaggaccccagaaatcacaggtgggcacgtcgctgctaccgccatctcccttctcacgggaattttcagggtaaactggccatccgaaaatagcaacaacccagactggctcctcactcccttttccatcactaaaaatcacagagcagtcagagggacccagtaagaccaaaggaggggaggacagagcatgaaaaccaaaatccatgcaaatgaaatgtaattggcacgaccctcacccccaaatcttacatctcaattcccatcctaaaaagcactcatactttatgcatccccgcagctacacacacacaacacacagcacacgcatgaacacagcacacacacgagcacagcacacacacaaacgcacagcacacacagcacacagatgagcacacagcacacacacaaacgcacagcacacacacgcacacacatgcacacacagcacacaaacgcacggcacacacacgcacacacatgcacacacagcacacacacaaacgcacagcacacacaaacgcacagcacacacgcacacacagcacacacacgagcacacagcacacaaacgcacagcacacgcacacacatgcacacacagcacacacactagcacacagcacacacacaaagacacagcacacacatgcacacacagcacacacacgcgaacacagcacacacgaacacagcacacacagcacacacacaaacacagcacacacatgcacacagcacacgcacacacagcacacacatgaacacagcacacagcacacacatgcacacacagcacacacgcatgcacagcacacatgaacacagcacacacacaaacacacagcacacacatgcacacacagcacacacactcatgcgcagcacatacatgaacacagctcacagcacacaaacacgcagcacacacgttgcacacgcaagcacccacctgcacacacacatgcgcacacacacgcacacccccacaaaattggatgaaaacaataagcatatctaagcaactacgatatctgtatggatcaggccaaagtcccgctaagattctccaatgttttcatggtctgagccccgctcctgttcccatctccactgcccctcggccctgtctgtgccctgcctctcagaggagggggctcagatggtgcggcctgagtgtgcggccggcggcatttgggatacacccgtagggtgggcggggtgtgtcccaggcctaattccatctttccaccatgacagagatgcccttgtgaggctggcctccttggcgcctgtccccacggcccccgcagcgtgagccacgatgctccccataccccacccattcccgatacaccttacttactgtgtgttggcccagccagagtgaggaaggagtttggccacattggagatggcggtagctgagcagacatgcccccacgagtagcctgactccctggtgtgctcctggaaggaagatcttggggacccccccaccggagcacacctagggatcatctttgcccgtctcctggggaccccccaagaaatgtggagtcctcgggggccgtgcactgatgcggggagtgtgggaagtctggcggttggaggggtgggtggggggcagtgggggctgggcggggggagttctggggtaggaagtggtcccgggagattttggatggaaaagtcaggaggattgacagcagacttgcagaattacatagagaaattaggaacccccaaatttcatgtcaattgatctattccccctctttgtttcttggggcatttttccttttttttttttttttgttttttttttacccctccttagctttatgcgctcagaaaccaaattaaaccccccccccatgtaacaggggggcagtgacaaaagcaagaacgcacgaagccagcctggagaccaccacgtcctgccccccgccatttatcgccctgattggattttgtttttcatctgtccctgttgcttgggttgagttgagggtggagcctcctggggggcactggccactgagcccccttggagaagtcagaggggagtggagaaggccactgtccggcctggcttctggggacagtggctggtccccagaagtcctgagggcggaggggggggttgggcagggtctcctcaggtgtcaggagggtgctcggaggccacaggagggggctcctggctggcctgaggctggccggaggggaaggggctagcaggtgtgtaaacagagggttccatcaggctggggcagggtggccgccttccgcacacttgaggaaccctcccctctccctcggtgacatcttgcccgcccctcagcaccctgccttgtctccaggaggtccgaagctctgtgggacctcttgggggcaaggtggggtgaggccggggagtagggaggtcaggcgggtctgagcccacagagcaggagagctgccaggtctgcccatcgaccaggttgcttgggccccggagcccacgggtctggtgatgccatagcagccaccaccgcggcgcctagggctgcggcagggactcggcctctgggaggtttacctcgcccccacttgtgcccccagctcagcccccctgcacgcagcccgactagcagtctagaggcctgaggcttctgggtcctggtgacggggctggcatgaccccgggggtcgtccatgccagtccgcctcagtcgcagagggtccctcggcaagcgccctgtgagtgggccattcggaacattggacagaagcccaaagagccaaattgtcacaattgtggaacccacattggcctgagatccaaaacgcttcgaggcaccccaaattacctgcccattcgtcaggacacccacccacccagtgttatattctgcctcgccggagtgggtgttcccgggggcacttgccgaccagccccttgcgtccccaggtttgcagctctcccctgggccactaaccatcctggcccgggctgcctgtctgacctccgtgcctagtcgtggctctccatcttgtctcctccccgtgtccccaatgtcttcagtggggggccccctcttgggtcccctcctctgccatcacctgaagacccccacgccaaacactgaatgtcacctgtgcctgccgcctcggtccaccttgcggcccgtgtttgactcaactcaactcctttaacgctaatatttccggcaaaatcccatgcttgggttttgtctttaaccttgtaacgcttgcaatcccaataaagcattaaaagtcatgatcttc

SEQ ID NO: 7717 - protein, 112 aa, Homo sapiens
MGIPMGKSMLVLLTFLAFASCCIAAYRPSETLCGGELVDTLQFVCGDRGFYFSRPASRVSRRSRGIVEECCFRSCDLALLETYCATPAKSERDVSTPPTVLPVRVLGPFPTL

SEQ ID NO: 7718 - DNA, 5553 bp, Homo sapiens
gccggccccggccccccccttccggccgcccccgcctcctggcccacgcctgcccgcgctctgcccaccagcgcctccatcgggcaaggcggccccgcgtcgacgccgcccgctgcctcgctgctgactcccgtcccgggcgccgtccgcggggtcgcgctccgccgggcctgcggattccccgccgcctcctcttcatctacctcaactccccccatccccgcttcgcccgaggaggcggttccccccgcaggcagtccggctcgcaggccgccggcgttgtcacccccccccgcgctccccctccagccctccccccggcgcgcagcctcgggccgctcccctttccgcgctgcgtcccggagcggccccggtgccgccaccgcctgtccccctcccgaggcccgggctcgcgacggcagagggctccgtcggcccaaaccgagctgggcgcccgcggtccgggtgcagcctccactccgccccccagtcaccgcctcccccggcccctcgacgtggcgcccttccctccgcttctctgtgctccccgcgcccctcttggcgtctggccccggcccccgctctttctcccgcaaccttcccttcgctccctcccgtcccccccagctcctagcctccgactccctccccccctcacgcccgccctctcgccttcgccgaaccaaagtggattaattacacgctttctgtttctctccgtgctgttctctcccgctgtgcgcctgcccgcctctcgctgtcctctctccccctcgccctctcttcggcccccccctttcacgttcactctgtctctcccactatctctgcccccctctatccttgatacaacagctgacctcatttcccgataccttttcccccccgaaaagtacaacatctggcccgccccagcccgaagacagcccgtcctccctggacaatcagacgaattctccccccccccccaaaaaaaagccatccccccgctctgccccgtcgcacattcggcccccgcgactcggccagagcggcgctggcagaggagtgtccggcaggagggccaacgcccgctgttcggtttgcgacacgcagcagggaggtgggcggcagcgtcgccggcttccagacaccaatgggaatcccaatggggaagtcgatgctggtgcttctcaccttcttggccttcgcctcgtgctgcattgctgcttaccgccccagtgagaccctgtgcggcggggagctggtggacaccctccagttcgtctgtggggaccgcggcttctacttcagcaggcccgcaagccgtgtgagccgtcgcagccgtggcatcgttgaggagtgctgtttccgcagctgtgacctggccctcctggagacgtactgtgctacccccgccaagtccgagagggacgtgtcgacccctccgaccgtgcttccggacaacttccccagataccccgtgggcaagttcttccaatatgacacctggaagcagtccacccagcgcctgcgcaggggcctgcctgccctcctgcgtgcccgccggggtcacgtgctcgccaaggagctcgaggcgttcagggaggccaaacgtcaccgtcccctgattgctctacccacccaagaccccgcccacgggggcgcccccccagagatggccagcaatcggaagtgagcaaaactgccgcaagtctgcagcccggcgccaccatcctgcagcctcctcctgaccacggacgtttccatcaggttccatcccgaaaatctctcggttccacgtccccctggggcttctcctgacccagtccccgtgccccgcctccccgaaacaggctactctcctcggccccctccatcgggctgaggaagcacagcagcatcttcaaacatgtacaaaatcgattggctttaaacacccttcacataccctccccccaaattatccccaattatccccacacataaaaaatcaaaacattaaactaacccccttcccccccccccacaacaaccctcttaaaactaattggctttttagaaacaccccacaaaagctcagaaattggctttaaaaaaaacaaccaccaaaaaaaatcaattggctaaaaaaaaaaagtattaaaaacgaattggctgagaaacaattggcaaaataaaggaatttggcactccccacccccctctttctcttctcccttggactttgagtcaaattggcctggacttgagtccctgaaccagcaaagagaaaagaaggaccccagaaatcacaggtgggcacgtcgctgctaccgccatctcccttctcacgggaattttcagggtaaactggccatccgaaaatagcaacaacccagactggctcctcactcccttttccatcactaaaaatcacagagcagtcagagggacccagtaagaccaaaggaggggaggacagagcatgaaaaccaaaatccatgcaaatgaaatgtaattggcacgaccctcacccccaaatcttacatctcaattcccatcctaaaaagcactcatactttatgcatccccgcagctacacacacacaacacacagcacacgcatgaacacagcacacacacgagcacagcacacacacaaacgcacagcacacacagcacacagatgagcacacagcacacacacaaacgcacagcacacacacgcacacacatgcacacacagcacacaaacgcacggcacacacacgcacacacatgcacacacagcacacacacaaacgcacagcacacacaaacgcacagcacacacgcacacacagcacacacacgagcacacagcacacaaacgcacagcacacgcacacacatgcacacacagcacacacactagcacacagcacacacacaaagacacagcacacacatgcacacacagcacacacacgcgaacacagcacacacgaacacagcacacacagcacacacacaaacacagcacacacatgcacacagcacacgcacacacagcacacacatgaacacagcacacagcacacacatgcacacacagcacacacgcatgcacagcacacatgaacacagcacacacacaaacacacagcacacacatgcacacacagcacacacactcatgcgcagcacatacatgaacacagctcacagcacacaaacacgcagcacacacgttgcacacgcaagcacccacctgcacacacacatgcgcacacacacgcacacccccacaaaattggatgaaaacaataagcatatctaagcaactacgatatctgtatggatcaggccaaagtcccgctaagattctccaatgttttcatggtctgagccccgctcctgttcccatctccactgcccctcggccctgtctgtgccctgcctctcagaggagggggctcagatggtgcggcctgagtgtgcggccggcggcatttgggatacacccgtagggtgggcggggtgtgtcccaggcctaattccatctttccaccatgacagagatgcccttgtgaggctggcctccttggcgcctgtccccacggcccccgcagcgtgagccacgatgctccccataccccacccattcccgatacaccttacttactgtgtgttggcccagccagagtgaggaaggagtttggccacattggagatggcggtagctgagcagacatgcccccacgagtagcctgactccctggtgtgctcctggaaggaagatcttggggacccccccaccggagcacacctagggatcatctttgcccgtctcctggggaccccccaagaaatgtggagtcctcgggggccgtgcactgatgcggggagtgtgggaagtctggcggttggaggggtgggtggggggcagtgggggctgggcggggggagttctggggtaggaagtggtcccgggagattttggatggaaaagtcaggaggattgacagcagacttgcagaattacatagagaaattaggaacccccaaatttcatgtcaattgatctattccccctctttgtttcttggggcatttttccttttttttttttttttgttttttttttacccctccttagctttatgcgctcagaaaccaaattaaaccccccccccatgtaacaggggggcagtgacaaaagcaagaacgcacgaagccagcctggagaccaccacgtcctgccccccgccatttatcgccctgattggattttgtttttcatctgtccctgttgcttgggttgagttgagggtggagcctcctggggggcactggccactgagcccccttggagaagtcagaggggagtggagaaggccactgtccggcctggcttctggggacagtggctggtccccagaagtcctgagggcggaggggggggttgggcagggtctcctcaggtgtcaggagggtgctcggaggccacaggagggggctcctggctggcctgaggctggccggaggggaaggggctagcaggtgtgtaaacagagggttccatcaggctggggcagggtggccgccttccgcacacttgaggaaccctcccctctccctcggtgacatcttgcccgcccctcagcaccctgccttgtctccaggaggtccgaagctctgtgggacctcttgggggcaaggtggggtgaggccggggagtagggaggtcaggcgggtctgagcccacagagcaggagagctgccaggtctgcccatcgaccaggttgcttgggccccggagcccacgggtctggtgatgccatagcagccaccaccgcggcgcctagggctgcggcagggactcggcctctgggaggtttacctcgcccccacttgtgcccccagctcagcccccctgcacgcagcccgactagcagtctagaggcctgaggcttctgggtcctggtgacggggctggcatgaccccgggggtcgtccatgccagtccgcctcagtcgcagagggtccctcggcaagcgccctgtgagtgggccattcggaacattggacagaagcccaaagagccaaattgtcacaattgtggaacccacattggcctgagatccaaaacgcttcgaggcaccccaaattacctgcccattcgtcaggacacccacccacccagtgttatattctgcctcgccggagtgggtgttcccgggggcacttgccgaccagccccttgcgtccccaggtttgcagctctcccctgggccactaaccatcctggcccgggctgcctgtctgacctccgtgcctagtcgtggctctccatcttgtctcctccccgtgtccccaatgtcttcagtggggggccccctcttgggtcccctcctctgccatcacctgaagacccccacgccaaacactgaatgtcacctgtgcctgccgcctcggtccaccttgcggcccgtgtttgactcaactcaactcctttaacgctaatatttccggcaaaatcccatgcttgggttttgtctttaaccttgtaacgcttgcaatcccaataaagcattaaaagtcatgatcttc

SEQ ID NO: 7719 - protein, 180 aa, Homo sapiens; identical to SEQ ID NO: 830

SEQ ID NO: 7720 - DNA, 4971 bp, Homo sapiens
cactgcagcttccccaaccccgcgcacagcgggcactggtttcgggcctctctgtctcctacgaagtccccagagcaactcggatttgggaaatttctctctagcgttgcccaaacacacttgggtcggccgcgcgccctcaggacgtggacagggagggcttccccgtgtccaggaaagcgaccgggcattgcccccagtctcccccaaatttgggcattgtccccgggtcttccaacggactgggcgttgctcccggacactgaggactggccccggggtctcgctcaccttcagcagcgtccaccgcctgccacagagcgttcgatcgctcgctgcctgagctcctggtgcgcccgcggacgcagcctccagcttcgcggagatggtttccccagacccccaaattatcgtggtggcccccgagaccgaactcgcgtctatgcaagtccaacgcactgaggacggggtaaccattatccagatattttgggtgggccgcaaaggcgagctacttagacgcaccccggtgagctcggccatgcagacaccaatgggaatcccaatggggaagtcgatgctggtgcttctcaccttcttggccttcgcctcgtgctgcattgctgcttaccgccccagtgagaccctgtgcggcggggagctggtggacaccctccagttcgtctgtggggaccgcggcttctacttcagcaggcccgcaagccgtgtgagccgtcgcagccgtggcatcgttgaggagtgctgtttccgcagctgtgacctggccctcctggagacgtactgtgctacccccgccaagtccgagagggacgtgtcgacccctccgaccgtgcttccggacaacttccccagataccccgtgggcaagttcttccaatatgacacctggaagcagtccacccagcgcctgcgcaggggcctgcctgccctcctgcgtgcccgccggggtcacgtgctcgccaaggagctcgaggcgttcagggaggccaaacgtcaccgtcccctgattgctctacccacccaagaccccgcccacgggggcgcccccccagagatggccagcaatcggaagtgagcaaaactgccgcaagtctgcagcccggcgccaccatcctgcagcctcctcctgaccacggacgtttccatcaggttccatcccgaaaatctctcggttccacgtccccctggggcttctcctgacccagtccccgtgccccgcctccccgaaacaggctactctcctcggccccctccatcgggctgaggaagcacagcagcatcttcaaacatgtacaaaatcgattggctttaaacacccttcacataccctccccccaaattatccccaattatccccacacataaaaaatcaaaacattaaactaacccccttcccccccccccacaacaaccctcttaaaactaattggctttttagaaacaccccacaaaagctcagaaattggctttaaaaaaaacaaccaccaaaaaaaatcaattggctaaaaaaaaaaagtattaaaaacgaattggctgagaaacaattggcaaaataaaggaatttggcactccccacccccctctttctcttctcccttggactttgagtcaaattggcctggacttgagtccctgaaccagcaaagagaaaagaaggaccccagaaatcacaggtgggcacgtcgctgctaccgccatctcccttctcacgggaattttcagggtaaactggccatccgaaaatagcaacaacccagactggctcctcactcccttttccatcactaaaaatcacagagcagtcagagggacccagtaagaccaaaggaggggaggacagagcatgaaaaccaaaatccatgcaaatgaaatgtaattggcacgaccctcacccccaaatcttacatctcaattcccatcctaaaaagcactcatactttatgcatccccgcagctacacacacacaacacacagcacacgcatgaacacagcacacacacgagcacagcacacacacaaacgcacagcacacacagcacacagatgagcacacagcacacacacaaacgcacagcacacacacgcacacacatgcacacacagcacacaaacgcacggcacacacacgcacacacatgcacacacagcacacacacaaacgcacagcacacacaaacgcacagcacacacgcacacacagcacacacacgagcacacagcacacaaacgcacagcacacgcacacacatgcacacacagcacacacactagcacacagcacacacacaaagacacagcacacacatgcacacacagcacacacacgcgaacacagcacacacgaacacagcacacacagcacacacacaaacacagcacacacatgcacacagcacacgcacacacagcacacacatgaacacagcacacagcacacacatgcacacacagcacacacgcatgcacagcacacatgaacacagcacacacacaaacacacagcacacacatgcacacacagcacacacactcatgcgcagcacatacatgaacacagctcacagcacacaaacacgcagcacacacgttgcacacgcaagcacccacctgcacacacacatgcgcacacacacgcacacccccacaaaattggatgaaaacaataagcatatctaagcaactacgatatctgtatggatcaggccaaagtcccgctaagattctccaatgttttcatggtctgagccccgctcctgttcccatctccactgcccctcggccctgtctgtgccctgcctctcagaggagggggctcagatggtgcggcctgagtgtgcggccggcggcatttgggatacacccgtagggtgggcggggtgtgtcccaggcctaattccatctttccaccatgacagagatgcccttgtgaggctggcctccttggcgcctgtccccacggcccccgcagcgtgagccacgatgctccccataccccacccattcccgatacaccttacttactgtgtgttggcccagccagagtgaggaaggagtttggccacattggagatggcggtagctgagcagacatgcccccacgagtagcctgactccctggtgtgctcctggaaggaagatcttggggacccccccaccggagcacacctagggatcatctttgcccgtctcctggggaccccccaagaaatgtggagtcctcgggggccgtgcactgatgcggggagtgtgggaagtctggcggttggaggggtgggtggggggcagtgggggctgggcggggggagttctggggtaggaagtggtcccgggagattttggatggaaaagtcaggaggattgacagcagacttgcagaattacatagagaaattaggaacccccaaatttcatgtcaattgatctattccccctctttgtttcttggggcatttttccttttttttttttttttgttttttttttacccctccttagctttatgcgctcagaaaccaaattaaaccccccccccatgtaacaggggggcagtgacaaaagcaagaacgcacgaagccagcctggagaccaccacgtcctgccccccgccatttatcgccctgattggattttgtttttcatctgtccctgttgcttgggttgagttgagggtggagcctcctggggggcactggccactgagcccccttggagaagtcagaggggagtggagaaggccactgtccggcctggcttctggggacagtggctggtccccagaagtcctgagggcggaggggggggttgggcagggtctcctcaggtgtcaggagggtgctcggaggccacaggagggggctcctggctggcctgaggctggccggaggggaaggggctagcaggtgtgtaaacagagggttccatcaggctggggcagggtggccgccttccgcacacttgaggaaccctcccctctccctcggtgacatcttgcccgcccctcagcaccctgccttgtctccaggaggtccgaagctctgtgggacctcttgggggcaaggtggggtgaggccggggagtagggaggtcaggcgggtctgagcccacagagcaggagagctgccaggtctgcccatcgaccaggttgcttgggccccggagcccacgggtctggtgatgccatagcagccaccaccgcggcgcctagggctgcggcagggactcggcctctgggaggtttacctcgcccccacttgtgcccccagctcagcccccctgcacgcagcccgactagcagtctagaggcctgaggcttctgggtcctggtgacggggctggcatgaccccgggggtcgtccatgccagtccgcctcagtcgcagagggtccctcggcaagcgccctgtgagtgggccattcggaacattggacagaagcccaaagagccaaattgtcacaattgtggaacccacattggcctgagatccaaaacgcttcgaggcaccccaaattacctgcccattcgtcaggacacccacccacccagtgttatattctgcctcgccggagtgggtgttcccgggggcacttgccgaccagccccttgcgtccccaggtttgcagctctcccctgggccactaaccatcctggcccgggctgcctgtctgacctccgtgcctagtcgtggctctccatcttgtctcctccccgtgtccccaatgtcttcagtggggggccccctcttgggtcccctcctctgccatcacctgaagacccccacgccaaacactgaatgtcacctgtgcctgccgcctcggtccaccttgcggcccgtgtttgactcaactcaactcctttaacgctaatatttccggcaaaatcccatgcttgggttttgtctttaaccttgtaacgcttgcaatcccaataaagcattaaaagtcatgatcttc

SEQ ID NO: 7721 - protein, 236 aa, Homo sapiens
MVSPDPQIIVVAPETELASMQVQRTEDGVTIIQIFWVGRKGELLRRTPVSSAMQTPMGIPMGKSMLVLLTFLAFASCCIAAYRPSETLCGGELVDTLQFVCGDRGFYFSRPASRVSRRSRGIVEECCFRSCDLALLETYCATPAKSERDVSTPPTVLPDNFPRYPVGKFFQYDTWKQSTQRLRRGLPALLRARRGHVLAKELEAFREAKRHRPLIALPTQDPAHGGAPPEMASNRK

SEQ ID NO: 7722 - DNA, 1324 bp, Homo sapiens
tcatgacttttaatgctttattgggattgcaagcgttacaaggttaaagacaaaacccaagcatgggattttgccggaaatattagcgttaaaggagttgagttgagtcaaacacgggccgcaaggtggaccgaggcggcaggcacaggtgacattcagtgtttggcctctttgggcttctgtccaatgttccgaatggcccactcacagggcgcttgccgagggaccctctgcgactgaggcggactggcatggacgacccccggggtcatgccagccccgtcaccaggacccagaagcctcaggcctctagactgctagtcgggctgcgtgcaggggggctgagctgggggcacaagtgggggcgaggtaaacctcccagaggccgagtccctgccgcagccctaggcgccgcggtggtggctgctatggcatcaccagacccgtgggctccggggcccaagcaacctggtcgatgggcagacctggcagctctcctgctctgtgggctcagacccgcctgacctccctactccccggcctcaccccaccttgcccccaagaggtcccacagagcttcggacctcctggagacaaggcagggtgctgaggggcgggcaagatgtcaccgagggagaggggagggttcctcaagtgtgcggaaggcggccaccctgccccagcctgatggaaccctctgtttacacacctgctagccccttcccctccggccagcctcaggccagccaggagccccctcctgtggcctccgagcaccctcctgacacctgaggagaccctgcccaacccccccctccgccctcaggacttctggggaccagccactgtccccagaagccaggccggacagtggccttctccactcccctctgacttctccaagggggctcagtggccagtgccccccaggaggctccaccctcaactcaacccaagcaacagggacagatgaaaaacaaaatccaatcagggcgataaatggcggggggcaggacgtggtggtctccaggctggcttcgtgcgttcttgcttttgtcactgcccccctgttacatggggggggggtttaatttggtttctgagcgcataaagctaaggaggggtaaaaaaaaaacaaaaaaaaaaaaaaaaggaaaaatgccccaagaaacaaagagggggaatagatcaattgacatgaaatttgggggttcctaatttctctatgtaattctgcaagtctgctgtcaatcctcctgacttttccatccaaaatctcccgggaccacttcctaccccagaactccccccgcccagcccccac

SEQ ID NO: 7723 - protein, 75 aa, Homo sapiens
MLYWDCKRYKVKDKTQAWDFAGNISVKGVELSQTRAARWTEAAGTGDIQCLASLGFCPMFRMAHSQGACRGTLCD

SEQ ID NO: 7724 - DNA, 965 bp, Homo sapiens
tcatgacttttaatgctttattgggattgcaagcgttacaaggttaaagacaaaacccaagcatgggattttgccggaaatattagcgttaaaggagttgagttgagtcaaacacgggccgcaaggtggaccgaggcggcaggcacaggtgacattcagtgtttggcgtgggggtcttcaggtgatggcagaggaggggacccaagagggggccccccactgaagacattggggacacggggaggagacaagatggagagccacgactaggcacggaggtcagacaggcagcccgggccaggatggttagtggcccaggggagagctgcaaacctggggacgcaaggggctggtcggcaagtgcccccgggaacacccactccggcgaggcagaatataacactgggtgggtgggtgtcctgacgaatgggcaggtaatttggggtgcctcgaagcgttttggatctcaggccaatgtgggttccacaattgtgacaatttggctctttgggcttctgtccaatgttccgaatggcccactcacagggcgcttgccgagggaccctctgcgactgaggcggactggcatggacgacccccggggtcatgccagccccgtcaccaggacccagaagcctcaggcctctagactgctagtcgggctgcgtgcaggggggttcgtgcgttcttgcttttgtcactgcccccctgttacatggggggggggtttaatttggtttctgagcgcataaagctaaggaggggtaaaaaaaaaacaaaaaaaaaaaaaaaaggaaaaatgccccaagaaacaaagagggggaatagatcaattgacatgaaatttgggggttcctaatttctctatgtaattctgcaagtctgctgtcaatcctcctgacttttccatccaaaatctcccgggaccacttcctaccccagaactccccccgcccagcccccac

SEQ ID NO: 7725 - protein, 149 aa, Homo sapiens
MVSGPGESCKPGDARGWSASAPGNTHSGEAEYNTGWVGVLTNGQVIWGASKRFGSQANVGSTIVTIWLFGLLSNVPNGPLTGRLPRDPLRLRRTGMDDPRGHASPVTRTQKPQASRLLVGLRAGGFVRSCFCHCPPVTWGGGLIWFLSA

SEQ ID NO: 7726 - DNA, 498 bp, Homo sapiens
tcatgacttttaatgctttattgggattgcaagcgttacaaggttaaagacaaaacccaagcatgggattttgccggaaatattagcgttaaaggagttgagttgagtcaaacacgggccgcaaggtggaccgaggcggcaggcacaggtgacattcagtgtttggcgtgggggtcttcaggtgatggcagaggaggggacccaagagggggccccccactgaagacattggagaatcttagcgggactttggcctgatccatacagatatcgtagttgcttagatatgcttattgttttcatccaattttgtgggggtgtgcgtgtgtgtgcgcatgtgtgtgtgcaggtgggtgcttgcgtgtgcaacgtgtgtgctgcgtgtttgtgtgctgtgagctgtgttcatgtatgtgctgcgcatgagtgtgtgtgctgtgtgtgcatgtgtgtgctgtgtgtttgtgtgtgtgctgtgttcatgtgtgctgtgcatgc

SEQ ID NO: 7727 - protein, 81 aa, Homo sapiens
MLYWDCKRYKVKDKTQAWDFAGNISVKGVELSQTRAARWTEAAGTGDIQCLAWGSSGDGRGGDPRGGPPLKTLENLSGTLA

SEQ ID NO: 7728 - DNA, 2619 bp, Homo sapiens
gcgaacacagcacacacgaacacagcacacacagcacacacacaaacacagcacacacatgcacacagcacacgcacacacagcacacacatgaacacagcacacagcacacacatgcacacacagcacacacgcatgcacagcacacatgaacacagcacacacacaaacacacagcacacacatgcacacacagcacacacactcatgcgcagcacatacatgaacacagctcacagcacacaaacacgcagcacacacgttgcacacgcaagcacccacctgcacacacacatgcgcacacacacgcacacccccacaaaattggatgaaaacaataagcatatctaagcaactacgatatctgtatggatcaggccaaagtcccgctaagattctccaatgttttcatggtctgagccccgctcctgttcccatctccactgcccctcggccctgtctgtgccctgcctctcagaggagggggctcagatggtgcggcctgagtgtgcggccggcggcatttgggatacacccgtagggtgggcggggtgtgtcccaggcctaattccatctttccaccatgacagagatgcccttgtgaggctggcctccttggcgcctgtccccacggcccccgcagcgtgagccacgatgctccccataccccacccattcccgatacaccttacttactgtgtgttggcccagccagagtgaggaaggagtttggccacattggagatggcggtagctgagcagacatgcccccacgagtagcctgactccctggtgtgctcctggaaggaagatcttggggacccccccaccggagcacacctagggatcatctttgcccgtctcctggggaccccccaagaaatgtggagtcctcgggggccgtgcactgatgcggggagtgtgggaagtctggcggttggaggggtgggtggggggcagtgggggctgggcggggggagttctggggtaggaagtggtcccgggagattttggatggaaaagtcaggaggattgacagcagacttgcagaattacatagagaaattaggaacccccaaatttcatgtcaattgatctattccccctctttgtttcttggggcatttttccttttttttttttttttgttttttttttacccctccttagctttatgcgctcagaaaccaaattaaaccccccccccatgtaacaggggggcagtgacaaaagcaagaacgcacgaagccagcctggagaccaccacgtcctgccccccgccatttatcgccctgattggattttgtttttcatctgtccctgttgcttgggttgagttgagggtggagcctcctggggggcactggccactgagcccccttggagaagtcagaggggagtggagaaggccactgtccggcctggcttctggggacagtggctggtccccagaagtcctgagggcggaggggggggttgggcagggtctcctcaggtgtcaggagggtgctcggaggccacaggagggggctcctggctggcctgaggctggccggaggggaaggggctagcaggtgtgtaaacagagggttccatcaggctggggcagggtggccgccttccgcacacttgaggaaccctcccctctccctcggtgacatcttgcccgcccctcagcaccctgccttgtctccaggaggtccgaagctctgtgggacctcttgggggcaaggtggggtgaggccggggagtagggaggtcaggcgggtctgagcccacagagcaggagagctgccaggtctgcccatcgaccaggttgcttgggccccggagcccacgggtctggtgatgccatagcagccaccaccgcggcgcctagggctgcggcagggactcggcctctgggaggtttacctcgcccccacttgtgcccccagctcagcccccctgcacgcagcccgactagcagtctagaggcctgaggcttctgggtcctggtgacggggctggcatgaccccgggggtcgtccatgccagtccgcctcagtcgcagagggtccctcggcaagcgccctgtgagtgggccattcggaacattggacagaagcccaaagagccaaattgtcacaattgtggaacccacattggcctgagatccaaaacgcttcgaggcaccccaaattacctgcccattcgtcaggacacccacccacccagtgttatattctgcctcgccggagtgggtgttcccgggggcacttgccgaccagccccttgcgtccccaggtttgcagctctcccctgggccactaaccatcctggcccgggctgcctgtctgacctccgtgcctagtcgtggctctccatcttgtctcctccccgtgtccccaatgtcttcagtggggggccccctcttgggtcccctcctctgccatcacctgaagacccccacgccaaacactgaatgtcacctgtgcctgccgcctcggtccaccttgcggcccgtgtttgactcaactcaactcctttaacgctaatatttccggcaaaatcccatgcttgggttttgtctttaaccttgtaacgcttgcaatcccaataaagcattaaaagtcatga

SEQ ID NO: 7729 - protein, 113 aa, Homo sapiens; identical to SEQ ID NO: 7683

SEQ ID NO: 7730 - DNA, 1050 bp, Homo sapiens
aatgtgggttccacaattgtgacaatttggctctttgggcttctgtccaatgttccgaatggcccactcacagggcgcttgccgagggaccctctgcgactgaggcggactggcatggacgacccccggggtcatgccagccccgtcaccaggacccagaagcctcaggcctctagactgctagtcgggctgcgtgcaggggggctgagctgggggcacaagtgggggcgaggtaaacctcccagaggccgagtccctgccgcagccctaggcgccgcggtggtggctgctatggcatcaccagacccgtgggctccggggcccaagcaacctggtcgatgggcagacctggcagctctcctgctctgtgggctcagacccgcctgacctccctactccccggcctcaccccaccttgcccccaagaggtcccacagagcttcggacctcctggagacaaggcagggtgctgaggggcgggcaagatgtcaccgagggagaggggagggttcctcaagtgtgcggaaggcggccaccctgccccagcctgatggaaccctctgtttacacacctgctagccccttcccctccggccagcctcaggccagccaggagccccctcctgtggcctccgagcaccctcctgacacctgaggaggctccaccctcaactcaacccaagcaacagggacagatgaaaaacaaaatccaatcagggcgataaatggcggggggcaggacgtggtggtctccaggctggcttcgtgcgttcttgcttttgtcactgcccccctgttacatggggggggggtttaatttggtttctgagcgcataaagctaaggaggggtaaaaaaaaaacaaaaaaaaaaaaaaaaggaaaaatgccccaagaaacaaagagggggaatagatcaattgacatgaaatttgggggttcctaatttctctatgtaattctgcaagtctgctgtcaatcctcctgacttttccatccaaaatctcccgggaccacttcctaccccagaactccccccgcccagcccccac

SEQ ID NO: 7731 - protein, 90 aa, Homo sapiens
MDDPRGHASPVTRTQKPQASRLLVGLRAGGLSWGHKWGRGKPPRGRVPAAALGAAVVAAMASPDPWAPGPKQPGRWADLAALLLCGLRPA

SEQ ID NO: 7732 - DNA, 1084 bp, Homo sapiens
aatgtgggttccacaattgtgacaatttggctctttgggcttctgtccaatgttccgaatggcccactcacagggcgcttgccgagggaccctctgcgactgaggcggactggcatggacgacccccggggtcatgccagccccgtcaccaggacccagaagcctcaggcctctagactgctagtcgggctgcgtgcaggggggctgagctgggggcacaagtgggggcgaggtaaacctcccagaggccgagtccctgccgcagccctaggcgccgcggtggtggctgctatggcatcaccagacccgtgggctccggggcccaagcaacctggtcgatgggcagacctggcagctctcctgctctgtgggctcagacccgcctgacctccctactccccggcctcaccccaccttgcccccaagaggtcccacagagcttcggacctcctggagacaaggcagggtgctgaggggcgggcaagatgtcaccgagggagaggggagggttcctcaagtgtgcggaaggcggccacccctcctgacacctgaggagaccctgcccaacccccccctccgccctcaggacttctggggaccagccactgtccccagaagccaggccggacagtggccttctccactcccctctgacttctccaagggggctcagtggccagtgccccccaggaggctccaccctcaactcaacccaagcaacagggacagatgaaaaacaaaatccaatcagggcgataaatggcggggggcaggacgtggtggtctccaggctggcttcgtgcgttcttgcttttgtcactgcccccctgttacatggggggggggtttaatttggtttctgagcgcataaagctaaggaggggtaaaaaaaaaacaaaaaaaaaaaaaaaaggaaaaatgccccaagaaacaaagagggggaatagatcaattgacatgaaatttgggggttcctaatttctctatgtaattctgcaagtctgctgtcaatcctcctgacttttccatccaaaatctcccgggaccacttcctaccccagaactccccccgcccagcccccac

SEQ ID NO: 7733 - protein, 90 aa, Homo sapiens; identical to SEQ ID NO: 7731

SEQ ID NO: 7734 - DNA, 462 bp, Homo sapiens
tggagacaaggcagggtgctgaggggcgggcaagatgtcaccgagggagaggggagggttcctcaagtgtgcggaaggcggccaccctgccccagcctgatggaaccctctgtttacacacctgctagccccttcccctccggccagcctcaggccagccaggagccccctcctgtggcctccgagcaccctcctgacacctgaggagaccctgcccaacccccccctccgccctcaggacttctggggaccagccactgtccccagaagccaggccggacagtggccttctccactcccctctgacttctccaagggggctcagtggccagtgccccccaggaggctccaccctcaactcaacccaagcaacagggacagatgaaaaacaaaatccaatcagggcgataaatggggggggggtttaatttggtttctgagcgcataaagctaaggaggggt

SEQ ID NO: 7735 - protein, 34 aa, Homo sapiens
MEPSVYTPASPFPSGQPQASQEPPPVASEHPPDT

SEQ ID NO: 7736 - DNA, 952 bp, Homo sapiens
actccacatttcttggggggtccccaggagacgggcaaagatgatccctaggtgtgctccggtgggggggtccccaagatcttccttccaggagcacaccagggagtcaggctactcgtgggggcatgtctgctcagctaccgccatctgtgatttctggggtccttcttttctctttgctggttcagggactcaagtccaggccaatttgactcaaagtccaagggagaagagaaagaggggggtggggagtgccaaattcctttattttgccaattgtttctcagccaattcgtttttaatactttttttttttagccaattgattttttttggtggttgttttttttaaagccaatttctgagcttttgtggggtgtttctaaaaagccaattagttttaagagggttgttgtgggggggggggaagggggttagtttaatgttttgattttttatgtgtggggataattggggataatttggggggagggtatgtgaagggtgtttaaagccaatcgattttgtacatgtttgaagatgctgctgtgcttcctcagcccgatggagggggccgaggagagtagcctgtttcggggaggcggggcacggggactgggtcaggagaagccccagggggacgtggaaccgagagattttcgggatggaacctgatggaaacgtccgtggtcaggaggaggctgcaggatggtggcgccgggctgcagacttgcggcagttttgctcacttccgattgctggccatctctgggggggcgcccccgtgggcggggtcttgggtgggtagagcaatcaggggacggtgacgtttggcctccctgaacgcctcgagctccttggcgagcacgtgaccccggcgggcacgcaggagggcaggcaggcccctgcgcaggcgctgggtggactgcttccaggtgtcatattggaagaa

SEQ ID NO: 7737 - protein, 103 aa, Homo sapiens
MIPRCAPVGGSPRSSFQEHTRESGYSWGHVCSATAICDFWGPSFLFAGSGTQVQANLTQSPREKRKRGVGSAKFLYFANCFSANSFLILFFFSQLIFFGGCFF

SEQ ID NO: 7738 - DNA, 450 bp, Homo sapiens
taccgccatctccaatgtggccaaactccttcctcactctggctgggccaacacacagtaagtaaggtgtatcgggaatgggtggggtatggggagcatcgtggctcacgctgcgggggccgtggggacaggcgccaaggaggccagcctcacaagggcatctctgtcatggtggaaagatggaattaggcctgggacacaccccgcccaccctacgggtgtatcccaaatgccgccggccgcacactcaggccgcaccatctgagccccctcctctgagaggcagggcacagacagggccgaggggcagtggagatgggaacaggagcggggtgtgcgtgtgtgtgcgcatgtgtgtgtgcaggtgggtgcttgcgtgtgcaacgtgtgtgctgcgtgtttgtgtgctgtgagctgtgttcatgtatgtgctgcgcatgagtgtgtgtg

SEQ ID NO: 7739 - protein, 111 aa, Homo sapiens
MGGVWGASWLTLRGPWGQAPRRPASQGHLCHGGKMELGLGHTPPTLRVYPKCRRPHTQAAPSEPPPLRGRAQTGPRGSGDGNRSGVCVCVRMCVCRWVLACATCVLRVCVL

SEQ ID NO: 7740 - DNA, 547 bp, Homo sapiens
gggccaacacacagtaagtaaggtgtatcgggaatgggtggggtatggggagcatcgtggctcacgcctacgggtgtatcccaaatgccgccggccgcacactcaggccgcaccatctgagccccctcctctgagaggcagggcacagacagggccgaggggcagtggagatgggaacaggagcggggctcagaccatgaaaacattggagaatcttagcgggactttggcctgatccatacagatatcgtagttgcttagatatgcttattgttttcatccaattttgtgggggtgtgcgtgtgtgtgcgcatgtgtgtgtgcaggtgggtgcttgcgtgtgcaacgtgtgtgctgcgtgtttgtgtgctgtgagctgtgttcatgtatgtgctgcgcatgagtgtgtgtgctgtgtgtgcatgtgtgtgctgtgtgtttgtgtgtgtgctgtgttcatgtgtgctgtgcatgcgtgtgtgctgtgtgtgcatgtgtgtgctgtgtgctgtgttcatgtgtgtgctgtgtgtgcgtgtgctgtgtg

SEQ ID NO: 7741 - protein, 93 aa, Homo sapiens
MLIVFIQFCGGVRVCAHVCVQVGACVCNVCAACLCAVSCVHVCAAHECVCCVCMCVLCVCVCAVFMCAVHACVLCVHVCAVCCVHVCAVCACA

SEQ ID NO: 7742 - DNA, 1029 bp, Homo sapiens
aactggacattagcttctcctgtgaaagagacttccagcttcctcctcctcctcttcctcctcctcctcctgccccagcgagccttctgctgagctacaccaatgggaatcccaatggggaagtcgatgctggtgcttctcaccttcttggccttcgcctcgtgctgcattgctgcttaccgccccagtgagaccctgtgcggcggggagctggtggacaccctccagttcgtctgtggggaccgcggcttctacttcagcaggcccgcaagccgtgtgagccgtcgcagccgtggcatcgttgaggagtgctgtttccgcagctgtgacctggccctcctggagacgtactgtgctacccccgacaacttccccagataccccgtgggcaagttcttccaatatgacacctggaagcagtccacccagcgcctgcgcaggggcctgcctgccctcctgcgtgcccgccggggtcacgtgctcgccaaggagctcgaggcgttcagggaggccaaacgtcaccgtcccctgattgctctacccacccaagaccccgcccacgggggcgcccccccagagatggccagcaatcggaagtgagcaaaactgccgcaagtctgcagcccggcgccaccatcctgcagcctcctcctgaccacggacgtttccatcaggttccatcccgaaaatctctcggttccacgtccccctggggcttctcctgacccagtccccgtgccccgcctccccgaaacaggctactctcctcggccccctccatcgggctgaggaagcacagcagcatcttcaaacatgtacaaaatcgattggctttaaacacccttcacataccctccccccaaattatccccaattatccccacacataaaaaatcaaaacattaaactaacccccttcccccccccccacaacaaccctcttaaaactaattggctttttagaaacaccccacaaaagctcagaaattggctttaaaaaaaacaaccaccaaaaaaaatcaattggct

SEQ ID NO: 7743 - protein, 165 aa, Homo sapiens; identical to SEQ ID NO: 7709

SEQ ID NO: 7744 - DNA, 1092 bp, Homo sapiens
ggcactgaccagcctgcaaactggacattagcttctcctgtgaaagagacttccagcttcctcctcctcctcttcctcctcctcctcctgccccagcgagccttctgctgagctacaccaatgggaatcccaatggggaagtcgatgctggtgcttctcaccttcttggccttcgcctcgtgctgcattgctgcttaccgccccagtgagaccctgtgcggcggggagctggtggacaccctccagttcgtctgtggggaccgcggcttctacttcagcaggcccgcaagccgtgtgagccgtcgcagccgtggcatcgttgaggagtgctgtttccgcagctgtgacctggccctcctggagacgtactgtgctacccccgccaagtccgagagggacgtgtcgacccctccgaccgtgcttccggacaacttccccagataccccgtgggcaagttcttccaatatgacacctggaagcagtccacccagcgcctgcgcaggggcctgcctgccctcctgcgtgcccgccggggtcacgtgctcgccaaggagctcgaggcgttcagggaggccaaacgtcaccgtcccctgattgctctacccacccaagaccccgcccacgggggcgcccccccagagatggccagcaatcggaagtgagcaaaactgccgcaagtctgcagcccggcgccaccatcctgcagcctcctcctgaccacggacgtttccatcaggttccatcccgaaaatctctcggttccacgtccccctggggcttctcctgacccagtccccgtgccccgcctccccgaaacaggctactctcctcggccccctccatcgggctgaggaagcacagcagcatcttcaaacatgtacaaaatcgattggctttaaacacccttcacataccctccccccaaattatccccaattatccccacacataaaaaatcaaaacattaaactaacccccttcccccccccccacaacaaccctcttaaaactaattggctttttagaaacaccccacaaaagctcagaaattggctttaaaaaaaacaaccaccaaaaaaaatcaattggct

SEQ ID NO: 7745 - protein, 180 aa, Homo sapiens; identical to SEQ ID NO: 830

SEQ ID NO: 7746 - DNA, 1081 bp, Homo sapiens
gagaggggctgctggtctgaggctaagaagggcagagccttcgacccggagagaggccgcggcccctgcccagtgggcagcgtggaagtttccatacaaggagacaccaatgggaatcccaatggggaagtcgatgctggtgcttctcaccttcttggccttcgcctcgtgctgcattgctgcttaccgccccagtgagaccctgtgcggcggggagctggtggacaccctccagttcgtctgtggggaccgcggcttctacttcagcaggcccgcaagccgtgtgagccgtcgcagccgtggcatcgttgaggagtgctgtttccgcagctgtgacctggccctcctggagacgtactgtgctacccccgccaagtccgagagggacgtgtcgacccctccgaccgtgcttccggacaacttccccagataccccgtgggcaagttcttccaatatgacacctggaagcagtccacccagcgcctgcgcaggggcctgcctgccctcctgcgtgcccgccggggtcacgtgctcgccaaggagctcgaggcgttcagggaggccaaacgtcaccgtcccctgattgctctacccacccaagaccccgcccacgggggcgcccccccagagatggccagcaatcggaagtgagcaaaactgccgcaagtctgcagcccggcgccaccatcctgcagcctcctcctgaccacggacgtttccatcaggttccatcccgaaaatctctcggttccacgtccccctggggcttctcctgacccagtccccgtgccccgcctccccgaaacaggctactctcctcggccccctccatcgggctgaggaagcacagcagcatcttcaaacatgtacaaaatcgattggctttaaacacccttcacataccctccccccaaattatccccaattatccccacacataaaaaatcaaaacattaaactaacccccttcccccccccccacaacaaccctcttaaaactaattggctttttagaaacaccccacaaaagctcagaaattggctttaaaaaaaacaaccaccaaaaaaaatcaattggct

SEQ ID NO: 7747 - protein, 180 aa, Homo sapiens; identical to SEQ ID NO: 830

SEQ ID NO: 7748 - DNA, 648 bp, Homo sapiens
ccccagtcaccgcctcccccggcccctcgacgtggcgcccttccctccgcttctctgtgctccccgcgcccctcttggcgtctggccccggcccccgctctttctcccgcaaccttcccttcgctccctcccgtcccccccagctcctagcctccgactccctccccccctcacgcccgccctctcgccttcgccgaaccaaagtggattaattacacgctttctgtttctctccgtgctgttctctcccgctgtgcgcctgcccgcctctcgctgtcctctctccccctcgccctctcttcggcccccccctttcacgttcactctgtctctcccactatctctgcccccctctatccttgatacaacagctgacctcatttcccgataccttttcccccccgaaaagtacaacatctggcccgccccagcccgaagacagcccgtcctccctggacaatcagacgaattcctccccccaaattatccccaattatccccacacataaaaaatcaaaacattaaactaacccccttcccccccccccacaacaaccctcttaaaactaattggctttttagaaacaccccacaaaagctcagaaattggctttaaaaaaaacaaccaccaaaaaaaatcaattggct

SEQ ID NO: 7749 - protein, 204 aa, Homo sapiens
PSHRLPRPLDVAPFPPLLCAPRAPLGVWPRPPLFLPQPSLRSLPSPPAPSLRLPPPLTPALSPSPNQSGLITRFLFLSVLFSPAVRLPASRCPLSPSPSLRPPPFTFTLSLPLSLPPSILDTTADLISRYLFPPEKYNIWPAPARRQPVLPGQSDEFLPPNYPQLSPHIKNQNIKLTPFPPPHNNPLKTNWLFRNTPQKLRNWL

SEQ ID NO: 7750 - DNA, 2015 bp, Homo sapiens
cctgtccccctcccgaggcccgggctcgcgacggcagagggctccgtcggcccaaaccgagctgggcgcccgcggtccgggtgcagcctccactccgccccccagtcaccgcctcccccggcccctcgacgtggcgcccttccctccgcttctctgtgctccccgcgcccctcttggcgtctggccccggcccccgctctttctcccgcaaccttcccttcgctccctcccgtcccccccagctcctagcctccgactccctccccccctcacgcccgccctctcgccttcgccgaaccaaagtggattaattacacgctttctgtttctctccgtgctgttctctcccgctgtgcgcctgcccgcctctcgctgtcctctctccccctcgccctctcttcggcccccccctttcacgttcactctgtctctcccactatctctgcccccctctatccttgatacaacagctgacctcatttcccgataccttttcccccccgaaaagtacaacatctggcccgccccagcccgaagacagcccgtcctccctggacaatcagacgaattctccccccccccccaaaaaaaagccatccccccgctctgccccgtcgcacattcggcccccgcgactcggccagagcggcgctggcagaggagtgtccggcaggagggccaacgcccgctgttcggtttgcgacacgcagcagggaggtgggcggcagcgtcgccggcttccagacaccaatgggaatcccaatggggaagtcgatgctggtgcttctcaccttcttggccttcgcctcgtgctgcattgctgcttaccgccccagtgagaccctgtgcggcggggagctggtggacaccctccagttcgtctgtggggaccgcggcttctacttcagcaggcccgcaagccgtgtgagccgtcgcagccgtggcatcgttgaggagtgctgtttccgcagctgtgacctggccctcctggagacgtactgtgctacccccgccaagtccgagagggacgtgtcgacccctccgaccgtgcttccggtgagggtcctgggcccctttcccactctctagagacagagaaatagggcttcgggcgcccagcgtttcctgtggcctctgggacctcttggccagggacaaggacccgtgacttccttgcttgctgtgtggcccgggagcagctcagacgctggctccttctgtccctctgcccgtggacattagctcaagtcactgatcagtcacaggggtggcctgtcaggtcaggcgggcggctcaggcggaagagcgtggagagcaggcacctgctgaccagccccttcccctcccaggacaacttccccagataccccgtgggcaagttcttccaatatgacacctggaagcagtccacccagcgcctgcgcaggggcctgcctgccctcctgcgtgcccgccggggtcacgtgctcgccaaggagctcgaggcgttcagggaggccaaacgtcaccgtcccctgattgctctacccacccaagaccccgcccacgggggcgcccccccagagatggccagcaatcggaagtgagcaaaactgccgcaagtctgcagcccggcgccaccatcctgcagcctcctcctgaccacggacgtttccatcaggttccatcccgaaaatctctcggttccacgtccccctggggcttctcctgacccagtccccgtgccccgcctccccgaaacaggctactctcctcggccccctccatcgggctgaggaagcacagcagcatcttcaaacatgtacaaaatcgattggctttaaacacccttcacataccctccccccaaattatccccaattatccccacacataaaaaatcaaaacattaaactaacccccttcccccccccccacaacaaccctcttaaaactaattggctttttagaaacaccccacaaaagctcagaaattggctttaaaaaaaacaaccaccaaaaaaaatcaattggct

SEQ ID NO: 7751 - protein, 112 aa, Homo sapiens; identical to SEQ ID NO: 7717

SEQ ID NO: 7752 - DNA, 2107 bp, Homo sapiens
gccggccccggccccccccttccggccgcccccgcctcctggcccacgcctgcccgcgctctgcccaccagcgcctccatcgggcaaggcggccccgcgtcgacgccgcccgctgcctcgctgctgactcccgtcccgggcgccgtccgcggggtcgcgctccgccgggcctgcggattccccgccgcctcctcttcatctacctcaactccccccatccccgcttcgcccgaggaggcggttccccccgcaggcagtccggctcgcaggccgccggcgttgtcacccccccccgcgctccccctccagccctccccccggcgcgcagcctcgggccgctcccctttccgcgctgcgtcccggagcggccccggtgccgccaccgcctgtccccctcccgaggcccgggctcgcgacggcagagggctccgtcggcccaaaccgagctgggcgcccgcggtccgggtgcagcctccactccgccccccagtcaccgcctcccccggcccctcgacgtggcgcccttccctccgcttctctgtgctccccgcgcccctcttggcgtctggccccggcccccgctctttctcccgcaaccttcccttcgctccctcccgtcccccccagctcctagcctccgactccctccccccctcacgcccgccctctcgccttcgccgaaccaaagtggattaattacacgctttctgtttctctccgtgctgttctctcccgctgtgcgcctgcccgcctctcgctgtcctctctccccctcgccctctcttcggcccccccctttcacgttcactctgtctctcccactatctctgcccccctctatccttgatacaacagctgacctcatttcccgataccttttcccccccgaaaagtacaacatctggcccgccccagcccgaagacagcccgtcctccctggacaatcagacgaattctccccccccccccaaaaaaaagccatccccccgctctgccccgtcgcacattcggcccccgcgactcggccagagcggcgctggcagaggagtgtccggcaggagggccaacgcccgctgttcggtttgcgacacgcagcagggaggtgggcggcagcgtcgccggcttccagacaccaatgggaatcccaatggggaagtcgatgctggtgcttctcaccttcttggccttcgcctcgtgctgcattgctgcttaccgccccagtgagaccctgtgcggcggggagctggtggacaccctccagttcgtctgtggggaccgcggcttctacttcagcaggcccgcaagccgtgtgagccgtcgcagccgtggcatcgttgaggagtgctgtttccgcagctgtgacctggccctcctggagacgtactgtgctacccccgccaagtccgagagggacgtgtcgacccctccgaccgtgcttccggacaacttccccagataccccgtgggcaagttcttccaatatgacacctggaagcagtccacccagcgcctgcgcaggggcctgcctgccctcctgcgtgcccgccggggtcacgtgctcgccaaggagctcgaggcgttcagggaggccaaacgtcaccgtcccctgattgctctacccacccaagaccccgcccacgggggcgcccccccagagatggccagcaatcggaagtgagcaaaactgccgcaagtctgcagcccggcgccaccatcctgcagcctcctcctgaccacggacgtttccatcaggttccatcccgaaaatctctcggttccacgtccccctggggcttctcctgacccagtccccgtgccccgcctccccgaaacaggctactctcctcggccccctccatcgggctgaggaagcacagcagcatcttcaaacatgtacaaaatcgattggctttaaacacccttcacataccctccccccaaattatccccaattatccccacacataaaaaatcaaaacattaaactaacccccttcccccccccccacaacaaccctcttaaaactaattggctttttagaaacaccccacaaaagctcagaaattggctttaaaaaaaacaaccaccaaaaaaaatcaattggct

SEQ ID NO: 7753 - protein, 180 aa, Homo sapiens; identical to SEQ ID NO: 830

SEQ ID NO: 7754 - DNA, 1525 bp, Homo sapiens
cactgcagcttccccaaccccgcgcacagcgggcactggtttcgggcctctctgtctcctacgaagtccccagagcaactcggatttgggaaatttctctctagcgttgcccaaacacacttgggtcggccgcgcgccctcaggacgtggacagggagggcttccccgtgtccaggaaagcgaccgggcattgcccccagtctcccccaaatttgggcattgtccccgggtcttccaacggactgggcgttgctcccggacactgaggactggccccggggtctcgctcaccttcagcagcgtccaccgcctgccacagagcgttcgatcgctcgctgcctgagctcctggtgcgcccgcggacgcagcctccagcttcgcggagatggtttccccagacccccaaattatcgtggtggcccccgagaccgaactcgcgtctatgcaagtccaacgcactgaggacggggtaaccattatccagatattttgggtgggccgcaaaggcgagctacttagacgcaccccggtgagctcggccatgcagacaccaatgggaatcccaatggggaagtcgatgctggtgcttctcaccttcttggccttcgcctcgtgctgcattgctgcttaccgccccagtgagaccctgtgcggcggggagctggtggacaccctccagttcgtctgtggggaccgcggcttctacttcagcaggcccgcaagccgtgtgagccgtcgcagccgtggcatcgttgaggagtgctgtttccgcagctgtgacctggccctcctggagacgtactgtgctacccccgccaagtccgagagggacgtgtcgacccctccgaccgtgcttccggacaacttccccagataccccgtgggcaagttcttccaatatgacacctggaagcagtccacccagcgcctgcgcaggggcctgcctgccctcctgcgtgcccgccggggtcacgtgctcgccaaggagctcgaggcgttcagggaggccaaacgtcaccgtcccctgattgctctacccacccaagaccccgcccacgggggcgcccccccagagatggccagcaatcggaagtgagcaaaactgccgcaagtctgcagcccggcgccaccatcctgcagcctcctcctgaccacggacgtttccatcaggttccatcccgaaaatctctcggttccacgtccccctggggcttctcctgacccagtccccgtgccccgcctccccgaaacaggctactctcctcggccccctccatcgggctgaggaagcacagcagcatcttcaaacatgtacaaaatcgattggctttaaacacccttcacataccctccccccaaattatccccaattatccccacacataaaaaatcaaaacattaaactaacccccttcccccccccccacaacaaccctcttaaaactaattggctttttagaaacaccccacaaaagctcagaaattggctttaaaaaaaacaaccaccaaaaaaaatcaattggct

SEQ ID NO: 7755 - protein, 236 aa, Homo sapiens; identical to SEQ ID NO: 7721

SEQ ID NO: 7756 - DNA, 1966 bp, Homo sapiens
gccggccccggccccccccttccggccgcccccgcctcctggcccacgcctgcccgcgctctgcccaccagcgcctccatcgggcaaggcggccccgcgtcgacgccgcccgctgcctcgctgctgactcccgtcccgggcgccgtccgcggggtcgcgctccgccgggcctgcggattccccgccgcctcctcttcatctacctcaactccccccatccccgcttcgcccgaggaggcggttccccccgcaggcagtccggctcgcaggccgccggcgttgtcacccccccccgcgctccccctccagccctccccccggcgcgcagcctcgggccgctcccctttccgcgctgcgtcccggagcggccccggtgccgccaccgcctgtccccctcccgaggcccgggctcgcgacggcagagggctccgtcggcccaaaccgagctgggcgcccgcggtccgggtgcagcctccactccgccccccagtcaccgcctcccccggcccctcgacgtggcgcccttccctccgcttctctgtgctccccgcgcccctcttggcgtctggccccggcccccgctctttctcccgcaaccttcccttcgctccctcccgtcccccccagctcctagcctccgactccctccccccctcacgcccgccctctcgccttcgccgaaccaaagtggattaattacacgctttctgtttctctccgtgctgttctctcccgctgtgcgcctgcccgcctctcgctgtcctctctccccctcgccctctcttcggcccccccctttcacgttcactctgtctctcccactatctctgcccccctctatccttgatacaacagctgacctcatttcccgataccttttcccccccgaaaagtacaacatctggcccgccccagcccgaagacagcccgtcctccctggacaatcagacgaattctccccccccccccaaaaaaaagccatccccccgctctgccccgtcgcacattcggcccccgcgactcggccagagcggcgctggcagaggagtgtccggcaggagggccaacgcccgctgttcggtttgcgacacgcagcagggaggtgggcggcagcgtcgccggcttccagacaccaatgggaatcccaatggggaagtcgatgctggtgcttctcaccttcttggccttcgcctcgtgctgcattgctgcttaccgccccagtgagaccctgtgcggcggggagctggtggacaccctccagttcgtctgtggggaccgcggcttctacttcagcaggcccgcaagccgtgtgagccgtcgcagccgtggcatcgttgaggagtgctgtttccgcagctgtgacctggccctcctggagacgtactgtgctacccccgccaagtccgagagggacgtgtcgacccctccgaccgtgcttccggacaacttccccagataccccgtgggcaagttcttccaatatgacacctggaagcagtccacccagcgcctgcgcaggggcctgcctgccctcctgcgtgcccgccggggtcacgtgctcgccaaggagctcgaggcgttcagggaggccaaacgtcaccgtcccctgattgctctacccacccaagaccccgcccacgggggcgcccccccagagatggccagcaatcggaagtgagcaaaactgccgcaagtctgcagcccggcgccaccatcctgcagcctcctcctgaccacggacgtttccatcaggttccatcccgaaaatctctcggttccacgtccccctggggcttctcctgacccagtccccgtgccccgcctccccgaaacaggctactctcctcggccccctccatcgggctgaggaagcacagcagcatcttcaaacatgtacaaaatcgattggctttaaacacccttcacataccctccccccaaattatccccaattatccccacacat

SEQ ID NO: 7757 - protein, 180 aa, Homo sapiens; identical to SEQ ID NO: 830

SEQ ID NO: 7758 - DNA, 1966 bp, Homo sapiens
tcccggcggagtcctaggcccgcgggctagaggcactttaccgcccggcgggagcgcctctcctccgcgtccctcgccccagccccctgcccgccccactttgggaccctccagccgctttccccacaaatgagatctttgcaatgagcaaacgaaagtggcgcggatttcggggcgcccagcaggagcgagcgcagccgccagccgcaagtccgcagccgtgtcccgcgccccacgccggcctccccggcggcagccggagacgagcgccagcaccggcgggacagcagcagatgcgggccgagagccggtcaggggcgcagaggcggaggggatcggcgcggcggggagctcaccgcgaagctggaggctgcgtccgcgggcgcaccaggagctcaggcagcgagcgatcgaacgctctgtggcaggcggtggacgctgctgaagggcgccgcagacgaggcgctgaccttgcgctcactcccctcgctggggaaggacacactcgctggcgtcagcccggccggcctgggaagtaggactaaggacccgaactgcaaccctccacaccagacagcacagaccaccccaaggctgctcaatctgcccaaagccaaaagagctcccctgccaggacctcggtgccgtggagactgcggggaacctgctctgcccacacctgctctggcccctagacggaagcacctggagccaaccacggaactccagatcccagctgtgtgactgaatccacgccagcctctctgagccaaagctgcttgcagaagggggagatcccagttcgaagactcccgcgcagagcctgtggccctctctgccaggcctcagggtgcctgagacactcacctctctgcctcgcagttggggctgaggctggggctggctgccagcctcagttctgggagcgctggggtcgcctgggccacaggccacagcagctcacctcaggactgggctctctggcctgctggggctcaggctgtggggcaggctgggcagggggctgagctggcagcgattcagagccctggggctgggggctggaatccacctcctcccacacaagctcggtggtgactcttcggcccctggggaaaaacaaaaagatattgctgagatgacctcttttaaaagcaaagcccccctccccatacaccccaagcctgagccctgtcccatccccctccccgggttccttcaggtcaccttgtcaggatctgggcagcggcttccccctctagcccctcccctgcctagagctccctctttcaaagtataagggagggaagaagtggtgagaagtttgcctagaaagggcttcccggtgctgatggagaggccgagacccttctgttggacaggctgccctgttcctgggtgaggatgggcttctgcctggcactgggggtggagggtgcacacgaatggcccgccttgaggggtcatggcacggaatatgaaagcctcctccacctccaaacacccccaccttggaaggagataaggagggggccccagcaaaagccactggacacacagctctgcttgacgaggccagtgagggacggcgtggctgtgcttcctggggaaatgaaccccctccccacagacaccaccctgggtggatcgaggagtctgggtccagggtgcaacagagaaaaacttcatgcatgaatgagcattcccagggaaactgccttggccccagggcgcctctctgtgccagggaggctgggagagcagcaagggggaccaggtgcgccatcaggaggagagaagctaaacctaggggggacatggagggcggttgttgcctctcccggcatttctcctcagtctcctgtccaatttcttgctggtggtcaggaggcatagggaggcaggagggaaggaagctttacctgtaaaatggtgtatatatgtataaataaaatctctgcgccag

SEQ ID NO: 7759 - protein, 131 aa, Homo sapiens
MSKRKWRGFRGAQQERAQPPAASPQPCPAPHAGLPGGSRRRAPAPAGQQQMRAESRSGAQRRRGSARRGAHREAGGCVRGRTRSSGSERSNALWQAVDAAEGRRRRGADLALTPLAGEGHTRWRQPGRPGK

SEQ ID NO: 7760 - DNA, 2061 bp, Homo sapiens
ggcccgcgggctagaggcactttaccgcccggcgggagcgcctctcctccgcgtccctcgccccagccccctgcccgccccactttgggaccctccagccgctttccccacaaatgagatctttgcaatgagcaaacgaaagtggcgcggatttcggggcgcccagcaggagcgagcgcagccgccagccgcaagtccgcagccgtgtcccgcgccccacgccggcctccccggcggcagccggagacgagcgccagcaccggcgggacagcagcagatgcgggccgagagccggtcaggggcgcagaggcggaggggatcggcgcggcggggagctcaccgcgaagctggaggctgcgtccgcgggcgcaccaggagctcaggcagcgagcgatcgaacgctctgtggcaggcggtggacgctgctgaagctctggctctgagctcaccgctccgccgtccgtgggaccaagcccagcattttacaaacccagctcctttctccaagggtcctcagagcgcccctccgtcaccccctgcagggcgccgcagacgaggcgctgaccttgcgctcactcccctcgctggggaaggacacactcgctggcgtcagcccggccggcctgggaagtaggactaaggacccgaactgcaaccctccacaccagacagcacagaccaccccaaggctgctcaatctgcccaaagccaaaagagctcccctgccaggacctcggtgccgtggagactgcggggaacctgctctgcccacacctgctctggcccctagacggaagcacctggagccaaccacggaactccagatcccagctgtgtgactgaatccacgccagcctctctgagccaaagctgcttgcagaagggggagatcccagttcgaagactcccgcgcagagcctgtggccctctctgccaggcctcagggtgcctgagacactcacctctctgcctcgcagttggggctgaggctggggctggctgccagcctcagttctgggagcgctggggtcgcctgggccacaggccacagcagctcacctcaggactgggctctctggcctgctggggctcaggctgtggggcaggctgggcagggggctgagctggcagcgattcagagccctggggctgggggctggaatccacctcctcccacacaagctcggtggtgactcttcggcccctggggaaaaacaaaaagatattgctgagatgacctcttttaaaagcaaagcccccctccccatacaccccaagcctgagccctgtcccatccccctccccgggttccttcaggtcaccttgtcaggatctgggcagcggcttccccctctagcccctcccctgcctagagctccctctttcaaagtataagggagggaagaagtggtgagaagtttgcctagaaagggcttcccggtgctgatggagaggccgagacccttctgttggacaggctgccctgttcctgggtgaggatgggcttctgcctggcactgggggtggagggtgcacacgaatggcccgccttgaggggtcatggcacggaatatgaaagcctcctccacctccaaacacccccaccttggaaggagataaggagggggccccagcaaaagccactggacacacagctctgcttgacgaggccagtgagggacggcgtggctgtgcttcctggggaaatgaaccccctccccacagacaccaccctgggtggatcgaggagtctgggtccagggtgcaacagagaaaaacttcatgcatgaatgagcattcccagggaaactgccttggccccagggcgcctctctgtgccagggaggctgggagagcagcaagggggaccaggtgcgccatcaggaggagagaagctaaacctaggggggacatggagggcggttgttgcctctcccggcatttctcctcagtctcctgtccaatttcttgctggtggtcaggaggcatagggaggcaggagggaaggaagctttacctgtaaaatggtgtatatatgtataaataaaatctctgcgccag

SEQ ID NO: 7761 - protein, 168 aa, Homo sapiens; identical to SEQ ID NO: 834

SEQ ID NO: 7762 - DNA, 2826 bp, Homo sapiens
cgcccggcgggagcgcctctcctccgcgtccctcgccccagccccctgcccgccccactttgggaccctccagccgctttccccacaaatgagatctttgcaatgagcaaacgaaagtggcgcggatttcggggcgcccagcaggagcgagcgcagccgccagccgcaagtccgcagccgtgtcccgcgccccacgccggcctccccggcggcagccggagacgagcgccagcaccggcgggacagcagcagatgcgggccgagagccggtcaggggcgcagaggcggaggggatcggcgcggcggggagctcaccgcgaagctggaggctgcgtccgcgggcgcaccaggagctcaggcagcgagcgatcgaacgctctgtggcaggcggtggacgctgctgaagctctggctctgagctcaccgctccgccgtccgtgggaccaagcccagcattttacaaacccagctcctttctccaagggtcctcagagcgcccctccgtcaccccctgcagggcgccgcagacgaggcgctgaccttgcgctcactcccctcgctggggaaggacacactcgctggcgtcagcccggccggcctgggaagtaggactaaggacccgaactgcaaccctccacaccagacagcacagaccaccccaaggctgctcaatctgcccaaagccaaaagtacgtgggggatatgggtccaggttggggtgcttgggagagggccctgggagaggggttcagacggtgcacactccaaaggactgaggcggcgccactgtgttaccattttattgagtgtctaaggtaaagacacctttgaaagaacactcccggcttctatctgggatgggcaaatcagcctgaagagtcacctgctggatccctccctgcaggccctgtcgtggggcaggtacagggactccaatccatgtgcctccagctccaacgctccccaagtcctggagcctcccctgtcaccccagtgcctgaccagtgaatgggtgctgcccccactacagagctccctctggctgaggcagaggccactggctgggcctttctagccacctttcacccctcttgcacacgggaagccccgcaggctcctgaccacaatgggatcctgacgccggagccccttaggccctttgctcagaaggcctctggttattacctcaattctgaacagccaggaggcctgagactgtcacccactttgataaatacagaccgacagaaaggtcaggccattggtgcaagaccccatggccagcagcctggggcggggagaacccgggggtctcacagcccccagcagagcccagctttccttgggtttttaggttcttccccaatgatattttccctttttccctctctacccactttctgccccccatcttctcccctttggctgcccgctctctccctgcccctctccccttctttgccctctttcgtctcccaggagctcccctgccaggacctcggtgccgtggagactgcggggaacctgctctgcccacacctgctctggcccctagacggaagcacctggagccaaccacggaactccagatcccagctgtgtgactgaatccacgccagcctctctgagccaaagctgcttgcagaagggggagatcccagttcgaagactcccgcgcagagcctgtggccctctctgccaggcctcagggtgcctgagacactcacctctctgcctcgcagttggggctgaggctggggctggctgccagcctcagttctgggagcgctggggtcgcctgggccacaggccacagcagctcacctcaggactgggctctctggcctgctggggctcaggctgtggggcaggctgggcagggggctgagctggcagcgattcagagccctggggctgggggctggaatccacctcctcccacacaagctcggtggtgactcttcggcccctggggaaaaacaaaaagatattgctgagatgacctcttttaaaagcaaagcccccctccccatacaccccaagcctgagccctgtcccatccccctccccgggttccttcaggtcaccttgtcaggatctgggcagcggcttccccctctagcccctcccctgcctagagctccctctttcaaagtataagggagggaagaagtggtgagaagtttgcctagaaagggcttcccggtgctgatggagaggccgagacccttctgttggacaggctgccctgttcctgggtgaggatgggcttctgcctggcactgggggtggagggtgcacacgaatggcccgccttgaggggtcatggcacggaatatgaaagcctcctccacctccaaacacccccaccttggaaggagataaggagggggccccagcaaaagccactggacacacagctctgcttgacgaggccagtgagggacggcgtggctgtgcttcctggggaaatgaaccccctccccacagacaccaccctgggtggatcgaggagtctgggtccagggtgcaacagagaaaaacttcatgcatgaatgagcattcccagggaaactgccttggccccagggcgcctctctgtgccagggaggctgggagagcagcaagggggaccaggtgcgccatcaggaggagagaagctaaacctaggggggacatggagggcggttgttgcctctcccggcatttctcctcagtctcctgtccaatttcttgctggtggtcaggaggcatagggaggcaggagggaaggaagctttacctgtaaaatggtgtatatatgtataaataaaatctctgcgccag

SEQ ID NO: 7763 - protein, 168 aa, Homo sapiens; identical to SEQ ID NO: 834

SEQ ID NO: 7764 - DNA, 482 bp, Homo sapiens
gccgtccatgggaacacccagccggccccactcgcacgggtagagacaggggcgccctgctggagctgagcctcagctttgtccctctcctcctccacgtcaacctggccagagggtctggacgccacagccagggcaccccctgctttggtggtgactgctaatattggccaggccggcggatcatcgtccaggcagtttcggcagagagccttgggcaccagtgactccccggtcctctttatccactgtccaggagctgcggggactgcgcagggactagagtacaggtaactgggctcccatcccttgagtgtgagagaaaagctgcactttaagtgttcaggcgtgggtgggccgggagcttggggcagctgccaggatcctggtttctgaaggaggggaagaacttctgctgctggagggtgcagggaagcctcctgagagcagcctcaacttcagggatggggtgtgcaggaaag

SEQ ID NO: 7765 - protein, 74 aa, Homo sapiens
ASALSLSSSTSTWPEGLDATARAPPALVVTANIGQAGGSSSRQFRQRALGTSDSPVLFIHCPGAAGTAQGLEYR

SEQ ID NO: 7766 - DNA, 505 bp, Homo sapiens
agcagccctcagccctccaggacaggctgcatcagaagaggccatcaagcaggtctgttccaagggcctttgcgtcagatcactgtccttctgccatggccctgtggatgcgcctcctgcccctgctggcgctgctggccctctggggacctgacccagccgcagcctttgtgaaccaacacctgtgcggctcacacctggtggaagctctctacctagtgtgcggggaacgaggcttcttctacacacccaagacccgccgggaggcagaggacctgcaggtggggcaggtggagctgggcgggggccctggtgcaggcagcctgcagcccttggccctggaggggtccctgcagaagcgtggcattgtggaacaatgctgtaccagcatctgctccctctaccagctggagaactactgcaactagacgcagcccgcaggcagccccacacccgccgcctcctgcaccgagagagatggaataaagcccttgaaccagccctg

SEQ ID NO: 7767 - protein, 110 aa, Homo sapiens; identical to SEQ ID NO: 836

SEQ ID NO: 7768 - DNA, 358 bp, Homo sapiens
aggacaggctgcatcagaagaggccatcaagcaggtctgttccaagggcctttgcgtcagatcactgtccttctgccatggccctgtggatgcgcctcctgcccctgctggcgctgctggccctctggggacctgacccagccgcagcctttgtgaaccaacacctgtgcggctcacacctggtggaagctctctacctagtgtgcggggaacgaggcttcttctacacacccaagacccgccgggaggcagaggacctgcaggctggagaactactgcaactagacgcagcccgcaggcagccccacacccgccgcctcctgcaccgagagagatggaataaagcccttgaaccagc

SEQ ID NO: 7769 - protein, 92 aa, Homo sapiens
MALWMRLLPLLALLALWGPDPAAAFVNQHLCGSHLVEALYLVCGERGFFYTPKTRREAEDLQAGELLQLDAARRQPHTRRLLHRERWNKALE

SEQ ID NO: 7770 - DNA, 644 bp, Homo sapiens
agccctccaggacaggctgcatcagaagaggccatcaagcaggtctgttccaagggcctttgcgtcaggtgggctcaggattccagggtggctggaccccaggccccagctctgcagcagggaggacgtggctgggctcgtgaagcatgtgggggtgagcccaggggccccaaggcagggcacctggccttcagcctgcctcagccctgcctgtctcccagatcactgtccttctgccatggccctgtggatgcgcctcctgcccctgctggcgctgctggccctctggggacctgacccagccgcagcctttgtgaaccaacacctgtgcggctcacacctggtggaagctctctacctagtgtgcggggaacgaggcttcttctacacacccaagacccgccgggaggcagaggacctgcaggtggggcaggtggagctgggcgggggccctggtgcaggcagcctgcagcccttggccctggaggggtccctgcagaagcgtggcattgtggaacaatgctgtaccagcatctgctccctctaccagctggagaactactgcaactagacgcagcccgcaggcagccccacacccgccgcctcctgcaccgagagagatggaataaagcccttgaaccagc

SEQ ID NO: 7771 - protein, 110 aa, Homo sapiens; identical to SEQ ID NO: 836

SEQ ID NO: 7772 - DNA, 483 bp, Homo sapiens
catcaagcaggtctgttccaagggcctttgcgtcaggtgggctcaggattccagggtggctggaccccaggccccagctctgcagcagggaggacgtggctgggctcgtgaagcatgtgggggtgagcccaggggccccaaggcagggcacctggccttcagcctgcctcagccctgcctgtctcccagatcactgtccttctgccatggccctgtggatgcgcctcctgcccctgctggcgctgctggccctctggggacctgacccagccgcagcctttgtgaaccaacacctgtgcggctcacacctggtggaagctctctacctagtgtgcggggaacgaggcttcttctacacacccaagacccgccgggaggcagaggacctgcaggctggagaactactgcaactagacgcagcccgcaggcagccccacacccgccgcctcctgcaccgagagagatggaataaagcccttgaac

SEQ ID NO: 7773 - protein, 91 aa, Homo sapiens
MALWMRLLPLLALLALWGPDPAAAFVNQHLCGSHLVEALYLVCGERGFFYTPKTRREAEDLQAGELLQLDAARRQPHTRRLLHRERWNKAL

SEQ ID NO: 7774 - DNA, 2154 bp, Homo sapiens
tgggctgccagaaagcccctccctgtgtgctctcttgagggctgtggggccaaggggaccctggctgtctcagccccccgcagagcacgagcccctggtccccgcaagcccgcgggctgaggatgattcagacagggctggggagtgaaggcaattagattccacggacgagccctttctcctgcgcctccctccttcctcacccacccccgcctccatcaggcacagcaggcaggggtgggggatgtaaggaggggaaggtgggggacccagagggggctttgacgtcagctcagcttataagaggctgctgggccagggctgtggagacggagcccggacctccacactgagccatgcccacccccgacgccaccacgccacaggccaagggcttccgcagggccgtgtctgagctggacgccaagcaggcagaggccatcatgtccccgcggttcattgggcgcaggcagagcctcatcgaggacgcccgcaaggagcgggaggcggcggtggcagcagcggccgctgcagtcccctcggagcccggggaccccctggaggctgtggcctttgaggagaaggaggggaaggccgtgctaaacctgctcttctccccgagggccaccaagccctcggcgctgtcccgagctgtgaaggtgtttgagacgtttgaagccaaaatccaccatctagagacccggcccgcccagaggccgcgagctgggggcccccacctggagtacttcgtgcgcctcgaggtgcgccgaggggacctggccgccctgctcagtggtgtgcgccaggtgtcagaggacgtgcgcagccccgcggggcccaaggtcccctggttcccaagaaaagtgtcagagctggacaagtgtcatcacctggtcaccaagttcgaccctgacctggacttggaccacccgggcttctcggaccaggtgtaccgccagcgcaggaagctgattgctgagatcgccttccagtacaggcacggcgacccgattccccgtgtggagtacaccgccgaggagattgccacctggaaggaggtctacaccacgctgaagggcctctacgccacgcacgcctgcggggagcacctggaggcctttgctttgctggagcgcttcagcggctaccgggaagacaatatcccccagctggaggacgtctcccgcttcctgaaggagcgcacgggcttccagctgcggcctgtggccggcctgctgtccgcccgggacttcctggccagcctggccttccgcgtgttccagtgcacccagtatatccgccacgcgtcctcgcccatgcactcccctgagccggactgctgccacgagctgctggggcacgtgcccatgctggccgaccgcaccttcgcgcagttctcgcaggacattggcctggcgtccctgggggcctcggatgaggaaattgagaagctgtccacgctgtactggttcacggtggagttcgggctgtgtaagcagaacggggaggtgaaggcctatggtgccgggctgctgtcctcctacggggagctcctgcactgcctgtctgaggagcctgagattcgggccttcgaccctgaggctgcggccgtgcagccctaccaagaccagacgtaccagtcagtctacttcgtgtctgagagcttcagtgacgccaaggacaagctcaggagctatgcctcacgcatccagcgccccttctccgtgaagttcgacccgtacacgctggccatcgacgtgctggacagcccccaggccgtgcggcgctccctggagggtgtccaggatgagctggacacccttgcccatgcgctgagtgccattggctaggtgcacggcgtccctgagggcccttcccaacctcccctggtcctgcactgtcccggagctcaggccctggtgaggggctgggtcccgggtgccccccatgccctccctgctgccaggctcccactgcccctgcacctgcttctcagcgcaacagctgtgtgtgcccgtggtgaggttgtgctgcctgtggtgaggtcctgtcctggctcccagggtcctgggggctgctgcactgccctccgcccttccctgacactgtctgctgccccaatcaccgtcacaataaaagaaactgtggtctcta

SEQ ID NO: 7775 - protein, 497 aa, Homo sapiens; identical to SEQ ID NO: 838

SEQ ID NO: 7776 - DNA, 2235 bp, Homo sapiens
tgggctgccagaaagcccctccctgtgtgctctcttgagggctgtggggccaaggggaccctggctgtctcagccccccgcagagcacgagcccctggtccccgcaagcccgcgggctgaggatgattcagacagggctggggagtgaaggcaattagattccacggacgagccctttctcctgcgcctccctccttcctcacccacccccgcctccatcaggcacagcaggcaggggtgggggatgtaaggaggggaaggtgggggacccagagggggctttgacgtcagctcagcttataagaggctgctgggccagggctgtggagacggagcccggacctccacactgagccatgcccacccccgacgccaccacgccacaggccaagggcttccgcagggccgtgtctgagctggacgccaagcaggcagaggccatcatgggcgccccggggcccagcctcacaggctctccgtggcctggaactgcagccccagctgcatcctacacccccaccccaaggtccccgcggttcattgggcgcaggcagagcctcatcgaggacgcccgcaaggagcgggaggcggcggtggcagcagcggccgctgcagtcccctcggagcccggggaccccctggaggctgtggcctttgaggagaaggaggggaaggccgtgctaaacctgctcttctccccgagggccaccaagccctcggcgctgtcccgagctgtgaaggtgtttgagacgtttgaagccaaaatccaccatctagagacccggcccgcccagaggccgcgagctgggggcccccacctggagtacttcgtgcgcctcgaggtgcgccgaggggacctggccgccctgctcagtggtgtgcgccaggtgtcagaggacgtgcgcagccccgcggggcccaaggtcccctggttcccaagaaaagtgtcagagctggacaagtgtcatcacctggtcaccaagttcgaccctgacctggacttggaccacccgggcttctcggaccaggtgtaccgccagcgcaggaagctgattgctgagatcgccttccagtacaggcacggcgacccgattccccgtgtggagtacaccgccgaggagattgccacctggaaggaggtctacaccacgctgaagggcctctacgccacgcacgcctgcggggagcacctggaggcctttgctttgctggagcgcttcagcggctaccgggaagacaatatcccccagctggaggacgtctcccgcttcctgaaggagcgcacgggcttccagctgcggcctgtggccggcctgctgtccgcccgggacttcctggccagcctggccttccgcgtgttccagtgcacccagtatatccgccacgcgtcctcgcccatgcactcccctgagccggactgctgccacgagctgctggggcacgtgcccatgctggccgaccgcaccttcgcgcagttctcgcaggacattggcctggcgtccctgggggcctcggatgaggaaattgagaagctgtccacgctgtactggttcacggtggagttcgggctgtgtaagcagaacggggaggtgaaggcctatggtgccgggctgctgtcctcctacggggagctcctgcactgcctgtctgaggagcctgagattcgggccttcgaccctgaggctgcggccgtgcagccctaccaagaccagacgtaccagtcagtctacttcgtgtctgagagcttcagtgacgccaaggacaagctcaggagctatgcctcacgcatccagcgccccttctccgtgaagttcgacccgtacacgctggccatcgacgtgctggacagcccccaggccgtgcggcgctccctggagggtgtccaggatgagctggacacccttgcccatgcgctgagtgccattggctaggtgcacggcgtccctgagggcccttcccaacctcccctggtcctgcactgtcccggagctcaggccctggtgaggggctgggtcccgggtgccccccatgccctccctgctgccaggctcccactgcccctgcacctgcttctcagcgcaacagctgtgtgtgcccgtggtgaggttgtgctgcctgtggtgaggtcctgtcctggctcccagggtcctgggggctgctgcactgccctccgcccttccctgacactgtctgctgccccaatcaccgtcacaataaaagaaactgtggtctcta

SEQ ID NO: 7777 - protein, 524 aa, Homo sapiens; identical to SEQ ID NO: 842

SEQ ID NO: 7778 - DNA, 938 bp, Homo sapiens
tgccattccagtaggatgtgacttgcttctcctggccatggttgtgaggcctccccagctatgtggaactatgttgagaaggaacaacatgatctaagtctttagaaaccaagagccacgactagctgaggacacaagaattttcacaaaacaaagtagagtgattccatagatcactattatagctgcattaccagtcctaggacagaatatggatgctgaaaaatgattctttcaaagtgctgagttgttgcctcacgcccagttgtctggcatctcttcactgaaactattacagttagatctcatctctatgggtggaagatttttctctgttgcccaggctagagtgcagtggtgcgatctcagctcactgcgacctcctccaccagggttcaggggattctcatgcctcagcctccagagtagctgggattatgatcatgtgccaccacacctggcttatttttgtaattatagtagtgatggtgttttgccatgttggcccagctggtctcgaactcctgaactcaagtgatccaccctcctcggcctcccaaagtgctgggattataggcatgagccaccgtgcccagctgttttttactcactttttgtctcacagtcattaggcattcatttctgccattatgttgaaattgtcaatattaccaaagacctagttgccccaaacaatcaacacctctatgtttatattaattgataattctatatttttcactattaacctaccatagtatccactcctataaacttcccttttcattgtttttttgtaaatacagatcaactttgctatcctcttacatctgtgcctgcttctttgtctatctcctttgagatctttctttttactgagagcaaaatttgtcctagtttcccaatgtttctctccaaaccttttttttttttttttt

SEQ ID NO: 7779 - protein, 74 aa, Homo sapiens
MGGRFFSVAQARVQWCDLSSLRPPPPGFRGFSCLSLQSSWDYDHVPPHLAYFCNYSSDGVLPCWPSWSRTPELK

SEQ ID NO: 7780 - DNA, 1159 bp, Homo sapiens
ctctttttgcctgctgccattccagtaggatgtgacttgcttctcctggccatggttgtgaggcctccccagctatgtggaactatgttgagaaggaacaacatgatctaagtctttagaaaccaagagccacgactagctgaggacacaagaattttcacaaaacaaagtagagtgattccatagatcactattatagctgcattaccagtcctaggacagaatatggatgctgaaaaatgattctttcaaagtgctgagttgttgcctcacgcccagttgtctggcatctcttcactgaaactattacagttagatctcatctctatgggtggaaggttgttgttctcaactcagcaggaaatgtcttatgaagaaaatggcccctgctccttaggtagcaggccataggcaaatactgaccctcttgccttctgaagctaagctccagcttcagtatgcacttgcttacctccttcccctgtccacactgcttttacttgctccctgtctcctgagagcattcattaataaattgcacacatttgaatccctatctcaggtattgctcatagagagtccaacttaagaaaaactgcaatccttatttatattctgtttcattaagagatgtaattgtgaaagaactgaacatataaaaaaatcagctttatcatgttttttatccttgtcacgccatgtcacctgagcaacacagtctgaatactaaattgtgagtgtgagtgcatatatgtgatggtaggtttttgtcctgttttcaatcattcataaaaccaaacatgtgtcccttaattatgctctactacatccacaacttattttattcataaaaatattgtggggtagatattatcactgttttcttgatggggaaatttaatataaaaaagttaaatattccctccaagggcataacatttttaattggtatagtcatgattcaaatttatatcttctaactataaggccagtgtgaatggtactccactacagtagactatccttagtggcttctactttttgccttgtattccgtcatgcttgtagtacctactttctttttctgaaaatttctcctccttctactccaaaaatattgttccctatgaaaactgatattttgcattgtatctccaaa

SEQ ID NO: 7781 - protein, 53 aa, Homo sapiens
MVLHYSRLSLVASTFCLVFRHACSTYFLFLKISPPSTPKILFPMKTDILHCIS

SEQ ID NO: 7782 - DNA, 1026 bp, Homo sapiens
ctctttttgcctgctgccattccagtaggatgtgacttgcttctcctggccatggttgtgaggcctccccagctatgtggaactatgttgagaaggaacaacatgatctaagtctttagaaaccaagagccacgactagctgaggacacaagaattttcacaaaacaaagtagagtgattccatagatcactattatagctgcattaccagtcctaggacagaatatggatgctgaaaaatgattctttcaaagtgctgagttgttgcctcacgcccagttgtctggcatctcttcactgaaactattacagttagatctcatctctatgggtggaaggaaaaaattctgagaatgatatagtcgaagtgataccttgaaggtagaactgtgcactgtggtaataacagaaacagaaagacatttcttctatataaacccaggatgtcgtccagcggcagctcccatcccttcctattgactggttttccaggcttggaggaagctcatcactggatttccgtatttttcttgttcatgtatatatccatcctttttggcaatggcaccctccttcttctcattaaggaagatcacaatcttcatgagcccatgtacttctttctggccatgctggctgccacagacctggggctggccctgaccacaatgcccacggtgctgggagtcctctggctggatcacagggagattggaagtgcggcctgcttttcccaggcctactttatacactcactttcctttctcgagtctggcattctgcttgccatggcctatgaccgttttattgccatctgcaaccctcttagatatacctctgtacttactaatactcgagtagtgaagattgggctgggagttctgatgaggggatttgtatccgttgttcccccaatcaggcccctctatttttttctgtattgtcactcccatgttctttcacatgcattctgccttcaccaggatgtcattaaactcgcctgtgctgataccaccttcaaccgac

SEQ ID NO: 7783 - protein, 193 aa, Homo sapiens
MSSSGSSHPFLLTGFPGLEEAHHWISVFFLFMYISILFGNGTLLLLIKEDHNLHEPMYFFLAMLAATDLGLALTTMPTVLGVLWLDHREIGSAACFSQAYFIHSLSFLESGILLAMAYDRFIAICNPLRYTSVLTNTRVVKIGLGVLMRGFVSVVPPIRPLYFFLYCHSHVLSHAFCLHQDVIKLACADTTFN

SEQ ID NO: 7784 - DNA, 2413 bp, Homo sapiens
cagaaggcctcaggggtggctgtgtagcaagatgagggaggtttggagccctgcataaagagaaggacgggaccacagctgactggatgatcttggtctccaatccccatgcccctagctgtgtccccacagatctgggcctcctgctgccaccatggccaaaggtggagaagccctgccacagggcagcccagcaccagtccaggatccccacctcatcaaggtgacagtgaagacgcccaaagacaaggaggatttctcagttacagacacatgcactatccagcagctgaaggaagagatatctcagcgctttaaggcccaccccgatcagcttgttctaatctttgctggcaaaatcctcaaggatcctgactcactggcacagtgtggagtgcgagatggcctcactgtccacctggtcatcaagaggcagcaccgtgccatgggcaatgagtgcccagctgcctctgtccctacccagggcccaagtcctggatcactccctcagccaagctccatttacccagcagatgggccccctgcctttagcttaggtctcctcacaggcctcagtaggctgggcttggcctatcgtggcttccctgaccagccaagctccctgatgcggcagcatgtgtctgtgcctgagtttgtgactcagctcattgatgaccccttcatcccgggtctgctgtccaacacaggcctagtacgccagctggttcttgacaacccccatatgcagcagctgatccagcacaaccctgagattgggcatattcttaacaacccggaaattatgcggcagacactggagtttttacgtaaccctgccatgatgcaggagatgatacgtagccaggaccgggtgctcagtaacttggagagcattcctggtggctacaatgtgctttgcactatgtacacagatattatggacccaatgcttaacgcagtccaggagcagtttggcggcaatccctttgccactgccactactgataatgccaccaccaccaccagccaaccttcaaggatggagaattgtgaccctctccccaacccctggacttccacacatggaggctcaggtagcaggcaaggaaggcaggatggggatcaggatgcacctgacattagaaataggtttccaaactttctgggtattataaggctctatgactatctccagcaattacacgagaacccccagtccctaggaacttatctacaggggactgcatctgccctcagccaaagccaggaaccaccaccatcagtaaacagagttcccccatcgtcaccctcatctcaggagcctgggtcaggccagcctctccccgaggagtcagtagcaatcaagggaaggtcctcctgcccagctttcctgagataccccacagagaacagtactggacaaggtggagaccaagatggtgcagggaaaagctctactggacatagcacaaacttgcctgatcttgtctcggggctgggagattctgccaacagggttccatttgctcccttatctttttcccccacggcagccattcctggaatccctgagcctccctggctgccatccccggcttatccaagatctctgaggccagatggcatgaatccagctccacagttacaggatgagatacaaccacagctgccactgctgatgcaccttcaggcagccatggcaaacccccgtgccctgcaagccctgcggcagattgagcagggtctacaggtcctagctactgaagcacctcgcctcctactctggttcatgccttgcctagcagggacgggtagtgtggcaggaggtatagagtctagagaagatccccttatgtctgaggatcctctcccaaatccacctcctgaggtgttcccagcactggactctgcagagctgggcttcctttcccctccctttctccatatgctgcaagatttagttagtacaaatccccagcagctgcagcctgaggctcactttcaggtgcagctggagcaactgcggtccatgggctttctgaatcgtgaagccaatcttcaggccctcattgctacggggggcgacgtggatgctgctgtggagaagctgagacagtcgtaggagccttattcattcaaaccatacgttttcctctgtgcctttttcccatatcctagttccctagctctcccatttttgaatacagctgcattataaaccaaatttactatgaagtcctttgctgtggaggcaatgttgttccagagtcaacgaggaagactaatggccaaaacatagtggaggtgctgtgtgtgagtcaaccacttgtaccactataccactggggggccccagtctaagctctgcttatgcctatcttgagatgcaattacacccaatttccaatgtgaa

SEQ ID NO: 7785 - protein, 655 aa, Homo sapiens; identical to SEQ ID NO: 844

SEQ ID NO: 7786 - DNA, 2407 bp, Homo sapiens
agggacctgatagtgcgggttctggcccagaaggcctcaggggtggctgtgtagcaagatgagggaggtttggagccctgcataaagagaaggacgggaccacagctgactgctgtgtccccacagatctgggcctcctgctgccaccatggccaaaggtggagaagccctgccacagggcagcccagcaccagtccaggatccccacctcatcaaggtgacagtgaagacgcccaaagacaaggaggatttctcagttacagacacatgcactatccagcagctgaaggaagagatatctcagcgctttaaggcccaccccgatcagcttgttctaatctttgctggcaaaatcctcaaggatcctgactcactggcacagtgtggagtgcgagatggcctcactgtccacctggtcatcaagaggcagcaccgtgccatgggcaatgagtgcccagctgcctctgtccctacccagggcccaagtcctggatcactccctcagccaagctccatttacccagcagatgggccccctgcctttagcttaggtctcctcacaggcctcagtaggctgggcttggcctatcgtggcttccctgaccagccaagctccctgatgcggcagcatgtgtctgtgcctgagtttgtgactcagctcattgatgaccccttcatcccgggtctgctgtccaacacaggcctagtacgccagctggttcttgacaacccccatatgcagcagctgatccagcacaaccctgagattgggcatattcttaacaacccggaaattatgcggcagacactggagtttttacgtaaccctgccatgatgcaggagatgatacgtagccaggaccgggtgctcagtaacttggagagcattcctggtggctacaatgtgctttgcactatgtacacagatattatggacccaatgcttaacgcagtccaggagcagtttggcggcaatccctttgccactgccactactgataatgccaccaccaccaccagccaaccttcaaggatggagaattgtgaccctctccccaacccctggacttccacacatggaggctcaggtagcaggcaaggaaggcaggatggggatcaggatgcacctgacattagaaataggtttccaaactttctgggtattataaggctctatgactatctccagcaattacacgagaacccccagtccctaggaacttatctacaggggactgcatctgccctcagccaaagccaggaaccaccaccatcagtaaacagagttcccccatcgtcaccctcatctcaggagcctgggtcaggccagcctctccccgaggagtcagtagcaatcaagggaaggtcctcctgcccagctttcctgagataccccacagagaacagtactggacaaggtggagaccaagatggtgcagggaaaagctctactggacatagcacaaacttgcctgatcttgtctcggggctgggagattctgccaacagggttccatttgctcccttatctttttcccccacggcagccattcctggaatccctgagcctccctggctgccatccccggcttatccaagatctctgaggccagatggcatgaatccagctccacagttacaggatgagatacaaccacagctgccactgctgatgcaccttcaggcagccatggcaaacccccgtgccctgcaagccctgcggcagattgagcagggtctacaggtcctagctactgaagcacctcgcctcctactctggttcatgccttgcctagcagggacgggtagtgtggcaggaggtatagagtctagagaagatccccttatgtctgaggatcctctcccaaatccacctcctgaggtgttcccagcactggactctgcagagctgggcttcctttcccctccctttctccatatgctgcaagatttagttagtacaaatccccagcagctgcagcctgaggctcactttcaggtgcagctggagcaactgcggtccatgggctttctgaatcgtgaagccaatcttcaggccctcattgctacggggggcgacgtggatgctgctgtggagaagctgagacagtcgtaggagccttattcattcaaaccatacgttttcctctgtgcctttttcccatatcctagttccctagctctcccatttttgaatacagctgcattataaaccaaatttactatgaagtcctttgctgtggaggcaatgttgttccagagtcaacgaggaagactaatggccaaaacatagtggaggtgctgtgtgtgagtcaaccacttgtaccactataccactggggggccccagtctaagctctgcttatgcctatcttgagatgcaattacacccaatttccaatgtgaa

SEQ ID NO: 7787 - protein, 655 aa, Homo sapiens; identical to SEQ ID NO: 844

SEQ ID NO: 7788 - DNA, 2312 bp, Homo sapiens
cactttgtccaccatgggtgaattatgaatcagtagctatgccaggcctcagctgggccacatctggagaactggggtgagggcacaacatcacaaaatatctggccccagtctggtcactcatcccttttagggcaacaaggaaactatcctgtggcctgagagcacaatacctgagacaaaggccagcagaaacatttgtctgccctcaccctttctgccccagcttccacctgctccccatctgcccacccactaaagcccatgtggcatgccatctctcgaacatccaggatgtcccagagtggatgtccatcaggtctgctggcagacaaaaatatctcttcaagtgccactcgagtgatagtgaagactgcaggcaaccagaaagactttatggtagctgatgacatctcggtaaggcagttcaaggagatgctattggctcacttccaatgccagatggaccaactagtgctggtcttcatgggttgccttctcaaagaccatgacacactgagccagaggggcatcatggatggccacaccatctacttggtcatcaagtccaagcagggctccagatctctagcccattccttccgggacctgccaacgaatgatccctgccaccgggacagaaacaccaaaggaaacagcagcagagtgcaccaaccaactggtatgaatcaagctccagtggaactggcccactttgtggggtctgatgcacccaaagtgcatacccaaaacttggaagtgagccacccagagtgcaaagcacagatgctggagaatcctagcatccagcggcttctgtccaacatggagttcatgtggcagttcatttcagaacatctagacacgcaacaattgatgcagcagaacccagaagtttcccgccttcttcttgataattctgagatcctattgcagactctggagctggccaggaaccttgctatgatccaagagataatgcagatccaacaaccttcacaaaaccttgagtatccactgaacccacagccatatctgggcttagagacaatgccaggtgggaataatgccctgggtcagaactatgctgatatcaatgatcaaatgctgaacagcatgcaagatccttttggaggaaaccctttcacagctctcctggcaggacaagtgctagaacaagtccagtcttcacccccacctccaccaccatcacaggaacaacaagaccagctcacacagcatcctgcaacccgagtcatctataatagctctggtggtttctcttcaaacacctcagccaatgacacccttaacaaggtcaaccacacttccaaagccaacactgctatgatttccaccaagggccagagccatatctgtgccactcggcagccagcttggataccagccttacctagcatagagcttacccagcagcttcaagaagaatacaaggatgccactgtttctctaagtagctccagacagacattaaagggtgatctccagctgtcagatgagcagagcagctcccagatcacaggaggcatgatgcagttgcttatgaacaacccctacctggcagctcagattatgttgttcacaagtatgccccagctgagtgaacagtggaggcagcagctgcccacattcctgcagcagacacagatttctgatctgcttagtgcttaggcaaccctaaagcattccaagcaatattgcagattgagcaggccctccagctgctggccacagaggctcctgttcttctgccttgggttgcaccctacctatggggcctgggttggcttcctgcccccagctgcagctatcctgacacagtgccctgttcctggaatgtttcagatacagctgagcccaagggacctgagtgctgccacaagcctggaacagtcctgcagaggctacaatccccggatggggacccttcccaccctctgcaagctcctgagatttgttttagcaaacagatggattctctccaggccatgggatttgggaaccaccatgccaatctacaggcactcattgctactgaaggggacaccaatgctgctatccgcaagctcaagagatcccagagattctaaccaccatgcctacttgtttgcttgctacctgcctgctgacccacctgaccatctcatttgccttttgcacctttcctgatgcttccagccaggagaagtcctggaataagagttatcaaccaatgtgtcttgtactgaataatagatcattggtcgtggctgaaacatctgtcaataaaatggctacactcacttgctgcg

SEQ ID NO: 7789 - protein, 475 aa, Homo sapiens; identical to SEQ ID NO: 846

SEQ ID NO: 7790 - DNA, 1824 bp, Homo sapiens
ttattgtagagccctggacccctaaatatgtcctccttccccagctggcccagggtgactgcgaggatagagttgacatcacaatatcccttttctgaggattcatgcccctggtgggtggggtaggaggaggggtagccctaggagaagtcatcaccactttgtccaccatgggtgaattatgaatcagtagctatgccaggcctcagctgggccacatctggagaactggggtgagggcacaacatcacaaaatatctggccccagtctggtcactcatcccttttagggcaacaaggaaactatcctgtggcctgagagcacaatacctgagacaaaggccagcagaaacatttgtctgccctcaccctttctgccccagcttccacctgctccccatctgcccacccactaaagcccatgtggcatgccatctctcgaacatccaggatgtcccagagtggatgtccatcaggtctgctggcagacaaaaatatctcttcaagtgccactcgagtgatagtgaagactgcaggcaaccagaaagactttatggtagctgatgacatctcggtaaggcagttcaaggagatgctattggctcacttccaatgccagatggaccaactagtgctggtcttcatgggttgccttctcaaagaccatgacacactgagccagaggggcatcatggatggccacaccatctacttggtcatcaagtccaagcagggctccagatctctagcccattccttccgggacctgccaacgaatgatccctgccaccgggacagaaacaacctcagccaatgacacccttaacaaggtcaaccacacttccaaagccaacactgctatgatttccaccaagggccagagccatatctgtgccactcggcagccagcttggataccagccttacctagcatagagcttacccagcagcttcaagaagaatacaaggatgccactgtttctctaagtagctccagacagacattaaagggtgatctccagctgtcagatgagcagagcagctcccagatcacaggaggcatgatgcagttgcttatgaacaacccctacctggcagctcagattatgttgttcacaagtatgccccagctgagtgaacagtggaggcagcagctgcccacattcctgcagcagacacagatttctgatctgcttagtgcttaggcaaccctaaagcattccaagcaatattgcagattgagcaggccctccagctgctggccacagaggctcctgttcttctgccttgggttgcaccctacctatggggcctgggttggcttcctgcccccagctgcagctatcctgacacagtgccctgttcctggaatgtttcagatacagctgagcccaagggacctgagtgctgccacaagcctggaacagtcctgcagaggctacaatccccggatggggacccttcccaccctctgcaagctcctgagatttgttttagcaaacagatggattctctccaggccatgggatttgggaaccaccatgccaatctacaggcactcattgctactgaaggggacaccaatgctgctatccgcaagctcaagagatcccagagattctaaccaccatgcctacttgtttgcttgctacctgcctgctgacccacctgaccatctcatttgccttttgcacctttcctgatgcttccagccaggagaagtcctggaataagagttatcaaccaatgtgtcttgtactgaataatagatcattggtcgtggctgaaacatctgtcaataaaatggctacactcacttgctgc

SEQ ID NO: 7791 - protein, 142 aa, Homo sapiens
MIPATGTETTSANDTLNKVNHTSKANTAMISTKGQSHICATRQPAWIPALPSIELTQQLQEEYKDATVSLSSSRQTLKGDLQLSDEQSSSQITGGMMQLLMNNPYLAAQIMLFTSMPQLSEQWRQQLPTFLQQTQISDLLSA

SEQ ID NO: 7792 - DNA, 963 bp, Homo sapiens; identical to SEQ ID NO: 848

SEQ ID NO: 7793 - protein, 320 aa, Homo sapiens; identical to SEQ ID NO: 849

SEQ ID NO: 7794 - DNA, 471 bp, Homo sapiens
aggaagagaaaaggggaaggagcgtctaggtgaaatgagctgtgtagtcctttagagcctctggacagaaggtctgatgaatacatgtaaagcttattgagcctcagaactctaactacagggtttcaatagcacagaaactctgagaagaaaaagaatgtcaaagttcctccctaaggagactgattagatgcaagtgtgtccggaattggtgggttcttggtctgacttcaagaatgaagccgcggaccctcacggtgctgctgttttactaagaggtatatgaataatggaaatgcctcctgtaatcctagcactttgggaggccgaggcgggcggatcacctgaggttgggagttcgagaccagcctgaccaacatggggaaaccccctctctactaaaaatacaaaattagctgggcgtggtggtccatgcctgtaatcccagctacttgggaggctgaggcagga

SEQ ID NO: 7795 - protein, 31 aa, Homo sapiens
MQVCPELVGSWSDFKNEAADPHGAAVLLRGI

SEQ ID NO: 7796 - DNA, 1008 bp, Homo sapiens; identical to SEQ ID NO: 851

SEQ ID NO: 7797 - protein, 335 aa, Homo sapiens; identical to SEQ ID NO: 852

SEQ ID NO: 7798 - DNA, 2263 bp, Homo sapiens
cttcccccctgagtctttcggcctgggtggaggacgcggctgcttcaagtccttggctctgatccaggccacagattccaggattctacaggcaggaaacatcttagaaatcagggttgggcaggcaggagccaggagagtagctacaatgacttcaccagtactggtggacatacgagaagaggtgacctgccctatctgcctggagctcctaacagaacccctgagcatagactgtggccacagcttctgccaagcctgcatcacaccaaatggcagggaatcagtgattggtcaagaaggggaaagaagctgccctgtgtgccagaccagctaccagccagggaacctgcggcctaatcggcatctggccaacatagtgaggcggctcagagaggtagtgttgggccctgggaagcagctgaaagcagttctttgtgcagaccatggagaaaaactgcagctcttctgtcaggaggatgggaaggtcatttgctggctttgtgagcggtctcaggagcaccgtggtcaccacacgttcctcgtggaggaggttgcccaggagtaccaggagaagtttcaggagtctctaaagaagctgaagaacgaggagcaggaagctgagaagctaacagcttttatcagagagaagaaaacatcctggaagaatcagatggagcctgagagatgcaggatccagacagagtttaatcagctgcgaaatatcctagacagagtggagcaacgggagctgaaaaagctggaacaggaagagaagaaggggctacgaattatagaagaggctgagaatgatctggtccaccagacccagtcgctgcgagagctcatctcggatctggagcgtcgatgtcaggggtcaacaatggagctgctgcaggatgtgagtgatgtcacagaaaggagtgagttctggaccctgaggaagccagaagctctccctacaaagctgagaagtatgttccgagccccagatctgaaaaggatgctgcgagtgtgtagagagctgacagatgtccaaagctactgggttgacgtgaccctgaatccacacacagctaatttaaatcttgtcctggctaaaaaccggagacaagtgaggtttgtgggagctaaagtatctggaccttcctgtctggaaaagcattatgactgtagtgtcctgggctcccagcacttctcctctggtaagcattactgggaggtagatgtggccaagaagactgcctggatcctgggggtatgcagcaattcactgggacctacattctctttcaaccattttgctcaaaatcacagtgcttactccaggtatcagcctcagagtggatactgggtgattgggttacagcataaccatgaatatagggcctatgaggattcttccccttccctgcttctctccatgacagtgccccctcgccgtgttggggttttcttagattatgaggctggtactgtctccttttataatgtcacaaaccatggcttccccatctacactttctctaaatattactttcccactactctttgtccatattttaatccttgcaactgtgtaattcctatgaccctgcgtcgtccaagctcttgaatattcttctgttcccacccacttctgataagtaccctgaggcttatcagcatgtgattctcccttctgatcttctgtttttctgtgttctcaaacagttctttcgttttaaacagttactcagtactaggatgcacccataaaatgcaataataagcaaataaattactttgtttttgtataagtatgtataggattgagctctaaaaccaaaccattataatgataatttgggtagcttcaaactcaaattgaagagagtcttcactacaatcttcactacaacctttggccttcctctctacatttaagagtagcaatagaacaataaaaaaaaatacgtctttcaaattaattgcagtaaaaacaaaagagtagtggggagagaaaaacaatccaatacatatttttctctcagaatagaaagaaaacacaaagagaaaatatgaacaatataaagcacttaaaggaagaggatgatttcttccagcttttccacactctctttatgcgcaggaacaaacagctgttgagtgagctgctatgactttggtagagaggtgcaatatgttttttgaaccagctataaaagaaattaagaggtacatgtgagggtagaaacaaatatcaaggatgagaatggcactg

SEQ ID NO: 7799 - protein, 488 aa, Homo sapiens; identical to SEQ ID NO: 856

SEQ ID NO: 7800 - DNA, 2488 bp, Homo sapiens
cttcccccctgagtctttcggcctgggtggaggacgcggctgcttcaagtccttggctctgatccaggccacagattccaggattctacaggcaggaaacatcttagaaatcagggttgggcaggcaggagccaggagagtagctacaatgacttcaccagtactggtggacatacgagaagaggtgacctgccctatctgcctggagctcctaacagaacccctgagcatagactgtggccacagcttctgccaagcctgcatcacaccaaatggcagggaatcagtgattggtcaagaaggggaaagaagctgccctgtgtgccagaccagctaccagccagggaacctgcggcctaatcggcatctggccaacatagtgaggcggctcagagaggtagtgttgggccctgggaagcagctgaaagcagttctttgtgcagaccatggagaaaaactgcagctcttctgtcaggaggatgggaaggtcatttgctggctttgtgagcggtctcaggagcaccgtggtcaccacacgttcctcgtggaggaggttgcccaggagtaccaggagaagtttcaggagtctctaaagaagctgaagaacgaggagcaggaagctgagaagctaacagcttttatcagagagaagaaaacatcctggaagaatcagatggagcctgagagatgcaggatccagacagagtttaatcagctgcgaaatatcctagacagagtggagcaacgggagctgaaaaagctggaacaggaagagaagaaggggctacgaattatagaagaggctgagaatgatctggtccaccagacccagtcgctgcgagagctcatctcggatctggagcgtcgatgtcaggggtcaacaatggagctgctgcaggatgtgagtgatgtcacagaaaggagtgagttctggaccctgaggaagccagaagctctccctacaaagctgagaagtatgttccgagccccagatctgaaaaggatgctgcgagtgtgtagagagctgacagatgtccaaagctactgggttgacgtgaccctgaatccacacacagctaatttaaatcttgtcctggctaaaaaccggagacaagtgaggtttgtgggagctaaagtatctggaccttcctgtctggaaaagcattatgactgtagtgtcctgggctcccagcacttctcctctggtaagcattactgggaggtagatgtggccaagaagactgcctggatcctgggggtatgcagcaattcactgggacctacattctctttcaaccattttgctcaaaatcacagtgcttactccaggtatcagcctcagagtggatactgggtgattgggttacagcataaccatgaatatagggcctatgaggattcttccccttccctgcttctctccatgacagtgccccctcgccgtgttggggttttcttagattatgaggctggtactgtctccttttataatgtcacaaaccatggcttccccatctacactttctctaaatattactttcccactactctttgtccatattttaatccttgcaactgtgtaattcctatgaccctgcgtcgtccaagctcttgaatattcttctgttcccacccacttctgataagtaccctgaggcttatcagcatgtgattctcccttctgatcttctgtttttctgtgttctcaaacagttctttcgttttaaacagttactcagtactaggatgcacccataaaatgcaataataagcaaataaattactttgtttttgtataagtatgtataggattgagctctaaaaccaaaccattataatgataatttgggtagcttcaaactcaaattgaagagagtcttcactacaatcttcactacaacctttggccttcctctctacatttaagagtagcaatagaacaataaaaaaaaatacgtctttcaaattaattgcagtaaaaacaaaagagtagtggggagagaaaaacaatccaatacatatttttctctcagaatagaaagaaaacacaaagagaaaatatgaacaatataaagcacttaaaggaagaggatgatttcttccagcttttccacactctctttatgcgcaggaacaaacagctgttgagtgagctgctatgactttggtagagaggtgcaatatgttttttgaaccagctataaaagaaattaagaggtacatgtgagggtagaaacaaatatcaaggatgagaatggcactggctgtcccatatggtatccaggagccaccaatgtctgttgagtacttcatacatgcctagtctgaattgagatgtgctcaatgtataaaatatataccagatttcaaatacctacttcaaaaaataatgtaaaatatctcactaataacttttcctttgtgtattgcaatgataatatgttggctctattggattaaataaagtatgttattcattttacctgtt

SEQ ID NO: 7801 - protein, 488 aa, Homo sapiens; identical to SEQ ID NO: 856

SEQ ID NO: 7802 - DNA, 2382 bp, Homo sapiens
ggaggacgcggctgcttcaagtccttggctctgatccaggccacagattccaggattctacaggcaggaaacatcttagaaatcagggttgggcaggcaggagccaggagagtagctacaatgacttcaccagtactggtggacatacgagaagaggtgacctgccctatctgcctggagctcctaacagaacccctgagcatagactgtggccacagcttctgccaagcctgcatcacaccaaatggcagggaatcagtgattggtcaagaaggggaaagaagctgccctgtgtgccagaccagctaccagccagggaacctgcggcctaatcggcatctggccaacatagtgaggcggctcagagaggaggatgggaaggtcatttgctggctttgtgagcggtctcaggagcaccgtggtcaccacacgttcctcgtggaggaggttgcccaggagtaccaggagaagtttcaggagtctctaaagaagctgaagaacgaggagcaggaagctgagaagctaacagcttttatcagagagaagaaaacatcctggaagaatcagatggagcctgagagatgcaggatccagacagagtttaatcagctgcgaaatatcctagacagagtggagcaacgggagctgaaaaagctggaacaggaagagaagaaggggctacgaattatagaagaggctgagaatgatctggtccaccagacccagtcgctgcgagagctcatctcggatctggagcgtcgatgtcaggggtcaacaatggagctgctgcaggatgtgagtgatgtcacagaaaggagtgagttctggaccctgaggaagccagaagctctccctacaaagctgagaagtatgttccgagccccagatctgaaaaggatgctgcgagtgtgtagagagctgacagatgtccaaagctactgggttgacgtgaccctgaatccacacacagctaatttaaatcttgtcctggctaaaaaccggagacaagtgaggtttgtgggagctaaagtatctggaccttcctgtctggaaaagcattatgactgtagtgtcctgggctcccagcacttctcctctggtaagcattactgggaggtagatgtggccaagaagactgcctggatcctgggggtatgcagcaattcactgggacctacattctctttcaaccattttgctcaaaatcacagtgcttactccaggtatcagcctcagagtggatactgggtgattgggttacagcataaccatgaatatagggcctatgaggattcttccccttccctgcttctctccatgacagtgccccctcgccgtgttggggttttcttagattatgaggctggtactgtctccttttataatgtcacaaaccatggcttccccatctacactttctctaaatattactttcccactactctttgtccatattttaatccttgcaactgtgtaattcctatgaccctgcgtcgtccaagctcttgaatattcttctgttcccacccacttctgataagtaccctgaggcttatcagcatgtgattctcccttctgatcttctgtttttctgtgttctcaaacagttctttcgttttaaacagttactcagtactaggatgcacccataaaatgcaataataagcaaataaattactttgtttttgtataagtatgtataggattgagctctaaaaccaaaccattataatgataatttgggtagcttcaaactcaaattgaagagagtcttcactacaatcttcactacaacctttggccttcctctctacatttaagagtagcaatagaacaataaaaaaaaatacgtctttcaaattaattgcagtaaaaacaaaagagtagtggggagagaaaaacaatccaatacatatttttctctcagaatagaaagaaaacacaaagagaaaatatgaacaatataaagcacttaaaggaagaggatgatttcttccagcttttccacactctctttatgcgcaggaacaaacagctgttgagtgagctgctatgactttggtagagaggtgcaatatgttttttgaaccagctataaaagaaattaagaggtacatgtgagggtagaaacaaatatcaaggatgagaatggcactggctgtcccatatggtatccaggagccaccaatgtctgttgagtacttcatacatgcctagtctgaattgagatgtgctcaatgtataaaatatataccagatttcaaatacctacttcaaaaaataatgtaaaatatctcactaataacttttcctttgtgtattgcaatgataatatgttggctctattggattaaataaagtatgttattcattttacctgtt

SEQ ID NO: 7803 - protein, 462 aa, Homo sapiens
MTSPVLVDIREEVTCPICLELLTEPLSIDCGHSFCQACITPNGRESVIGQEGERSCPVCQTSYQPGNLRPNRHLANIVRRLREEDGKVICWLCERSQEHRGHHTFLVEEVAQEYQEKFQESLKKLKNEEQEAEKLTAFIREKKTSWKNQMEPERCRIQTEFNQLRNILDRVEQRELKKLEQEEKKGLRIIEEAENDLVHQTQSLRELISDLERRCQGSTMELLQDVSDVTERSEFWTLRKPEALPTKLRSMFRAPDLKRMLRVCRELTDVQSYWVDVTLNPHTANLNLVLAKNRRQVRFVGAKVSGPSCLEKHYDCSVLGSQHFSSGKHYWEVDVAKKTAWILGVCSNSLGPTFSFNHFAQNHSAYSRYQPQSGYWVIGLQHNHEYRAYEDSSPSLLLSMTVPPRRVGVFLDYEAGTVSFYNVTNHGFPIYTFSKYYFPTTLCPYFNPCNCVIPMTLRRPSS

SEQ ID NO: 7804 - DNA, 591 bp, Homo sapiens
ccagaaggagttgggagatgagccttccgcaaactcctgacctgtgggtccgtccgttcaacggccaaaggctggcggaggagggatcccctgcctttctcggaacggaacggagcagagtcgtgcgtggttgagtttagataaaagccgagtgagcgcgctctgttccttaagattagtttaaggtgccttggattgctctgaagagctttgaccacctgatattgcttacatctggaacttcttggcttctcattccccagatgtgcgggtcagagaggattctacaggcaggaaacatcttagaaatcagggttgggcaggcaggagccaggagagtagctacaatgacttcaccagtactggtggacatacgagaagaggtgacctgccctatctgcctggagctcctaacagaacccctgagcatagactgtggccacagcttctgccaagcctgcatcacaccaaatggcagggaatcagtgattggtcaagaaggggaaagaagctgccctgtgtgccagaccagctaccagccagggaacctgcggcctaatcggcatctggccaacatagtgaggcggctca

SEQ ID NO: 7805 - protein, 108 aa, Homo sapiens
MCGSERILQAGNILEIRVGQAGARRVATMTSPVLVDIREEVTCPICLELLTEPLSIDCGHSFCQACITPNGRESVIGQEGERSCPVCQTSYQPGNLRPNRHLANIVRR

SEQ ID NO: 7806 - DNA, 2594 bp, Homo sapiens
gagccttccgcaaactcctgacctgtgggtccgtccgttcaacggccaaaggctggcggaggagggatcccctgcctttctcggaacggaacggagcagagtcgtgcgtggttgagtttagataaaagccgagtgagcgcgctctgttccttaagattagtttaaggtgccttggattgctctgaagagctttgaccacctgatattgcttacatctggaacttcttggcttctcattccccagatgtgcgggtcagagaggatgtgagtgatgtcacagaaaggagtgagttctggaccctgaggaagccagaagctctccctacaaagctgagaagtatgttccgagccccagatctgaaaaggatgctgcgagtgtgtagagagctgacagatgtccaaagctactgggttgacgtgaccctgaatccacacacagctaatttaaatcttgtcctggctaaaaaccggagacaagtgaggtttgtgggagctaaagtatctggaccttcctgtctggaaaagcattatgactgtagtgtcctgggctcccagcacttctcctctggtaagcattactgggaggtagatgtggccaagaagactgcctggatcctgggggtatgcagcaattcactgggacctacattctctttcaaccattttgctcaaaatcacagtgcttactccaggtatcagcctcagagtggatactgggtgattgggttacagcataaccatgaatatagggcctatgaggattcttccccttccctgcttctctccatgacagtgccccctcgccgtgttggggttttcttagattatgaggctggtactgtctccttttataatgtcacaaaccatggcttccccatctacactttctctaaatattactttcccactactctttgtccatattttaatccttgcaactgtgtaattcctatgaccctgcgtcgtccaagctcttgaatattcttctgttcccacccacttctgataagtaccctgaggcttatcagcatgtgattctcccttctgatcttctgtttttctgtgttctcaattcttttgttgttttttggtttttgaatcttttttgagatggaatctcgctctgtcgcccaggctggagtgcactggcgcaatctcggctcactgcaacctctgcctcctgggttcaagcgaacctcctgcctcagcatcccaagtagctgggattacaggcacccaccaccatgcccaactaatttttgtatttttatagagatagggtttcaccgtgttggccaggctgatctcgaactcctgaccgcaagtgatccacccgcctcggtctcccaaagtgctgggattacagatgtgagccgccgcgcccagacagttctttcgttttaaacagttactcagtactaggatgcacccagtggtgagagtaagcatctttgactgatgacaggtcttgaggtggatagggggcgctttcagtattttgccattaagcatagtatttgatgcaggttttttttgattgatgcaggggatcaaatttaggaagttctgatctgttaatttactacaagtttttgtataaaatgaaaactcgtattctacctatgtcttttctgtaaattattgagacaattgtgtatcatttttgttctgttaatgtggcttagtacattgatttacttcaatttgttaccacaacttgctgaaatacaccattattatttgttgtatgcaatactggatttattttgataacgtattgtttagattttgttctcatctatgttaatgaaagaaattggcctgtatttttacattcttgtaatatctttgccaggttctataaaatgcaataataagcaaataaattactttgtttttgtataagtatgtataggattgagctctaaaaccaaaccattataatgataatttgggtagcttcaaactcaaattgaagagagtcttcactacaatcttcactacaacctttggccttcctctctacatttaagagtagcaatagaacaataaaaaaaaatacgtctttcaaattaattgcagtaaaaacaaaagagtagtggggagagaaaaacaatccaatacatatttttctctcagaatagaaagaaaacacaaagagaaaatatgaacaatataaagcacttaaaggaagaggatgatttcttccagcttttccacactctctttatgcgcaggaacaaacagctgttgagtgagctgctatgactttggtagagaggtgcaatatgttttttgaaccagctataaaagaaattaagaggtacatgtgagggtagaaacaaatatcaaggatgagaatggcactggctgtcccatatggtatccaggagccaccaatgtctgttgagtacttcatacatgcctagtctgaattgagatgtgctcaatgtataaaatatataccagatttcaaatacctacttcaaaaaataatgtaaaatatctcactaataacttttcctttgtgtattgcaatgataatatgttggctctattggattaaataaagtatgttattcattttacctgtt

SEQ ID NO: 7807 - protein, 212 aa, Homo sapiens
MFRAPDLKRMLRVCRELTDVQSYWVDVTLNPHTANLNLVLAKNRRQVRFVGAKVSGPSCLEKHYDCSVLGSQHFSSGKHYWEVDVAKKTAWILGVCSNSLGPTFSFNHFAQNHSAYSRYQPQSGYWVIGLQHNHEYRAYEDSSPSLLLSMTVPPRRVGVFLDYEAGTVSFYNVTNHGFPIYTFSKYYFPTTLCPYFNPCNCVIPMTLRRPSS

SEQ ID NO: 7808 - DNA, 2441 bp, Homo sapiens
gccttccgcaaactcctgacctgtgggtccgtccgttcaacggccaaaggctggcggaggagggatcccctgcctttctcggaacggaacggagcagagtcgtgcgtggttgagtttagataaaagccgagtgagcgcgctctgttccttaagattagtttaaggtgccttggattgctctgaagagctttgaccacctgatattgcttacatctggaacttcttggcttctcattccccagatgtgcgggtcagagaggattctacaggcaggaaacatcttagaaatcagggttgggcaggcaggagccaggagagtagctacaatgacttcaccagtactggtggacatacgagaagaggtgacctgccctatctgcctggagctcctaacagaacccctgagcatagactgtggccacagcttctgccaagcctgcatcacaccaaatggcagggaatcagtgattggtcaagaaggggaaagaagctgccctgtgtgccagaccagctaccagccagggaacctgcggcctaatcggcatctggccaacatagtgaggcggctcagagaggtagtgttgggccctgggaagcagctgaaagcagttctttgtgcagaccatggagaaaaactgcagctcttctgtcaggaggatgggaaggtcatttgctggctttgtgagcggtctcaggagcaccgtggtcaccacacgttcctcgtggaggaggttgcccaggagtaccaggagaagtttcaggagtctctaaagaagctgaagaacgaggagcaggaagctgagaagctaacagcttttatcagagagaagaaaacatcctggaagaatcagatggagcctgagagatgcaggatccagacagagtttaatcagctgcgaaatatcctagacagagtggagcaacgggagctgaaaaagctggaacaggaagagaagaaggggctacgaattatagaagaggctgagaatgatctggtccaccagacccagtcgctgcgagagctcatctcggatctggagcgtcgatgtcaggggtcaacaatggagctgctgcaggatgtgagtgatgtcacagaaaggagtgagttctggaccctgaggaagccagaagctctccctacaaagctgagaagtatgttccgagccccagatctgaaaaggatgctgcgagtgtgtagagagctgacagatgtccaaagctactgggttgacgtgaccctgaatccacacacagctaatttaaatcttgtcctggctaaaaaccggagacaagtgaggtttgtgggagctaaagtatctggaccttcctgtctggaaaagcattatgactgtagtgtcctgggctcccagcacttctcctctggtaagcattactgggaggtagatgtggccaagaagactgcctggatcctgggggtatgcagcaattcactgggacctacattctctttcaaccattttgctcaaaatcacagtgcttactccaggtatcagcctcagagtggatactgggtgattgggttacagcataaccatgaatatagggcctatgaggattcttccccttccctgcttctctccatgacagtgccccctcgccgtgttggggttttcttagattatgaggctggtactgtctccttttataatgtcacaaaccatggcttccccatctacactttctctaaatattactttcccactactctttgtccatattttaatccttgcaactgtgtaattcctatgaccctgcgtcgtccaagctcttgaatattcttctgttcccacccacttctgataagtaccctgaggcttatcagcatgtgattctcccttctgatcttctgtttttctgtgttctcaaacagttctttcgttttaaacagttactcagtactaggatgcacccataaaatgcaataataagcaaataaattactttgtttttgtataagtatgtataggattgagctctaaaaccaaaccattataatgataatttgggtagcttcaaactcaaattgaagagagtcttcactacaatcttcactacaacctttggccttcctctctacatttaagagtagcaatagaacaataaaaaaaaatacgtctttcaaattaattgcagtaaaaacaaaagagtagtggggagagaaaaacaatccaatacatatttttctctcagaatagaaagaaaacacaaagagaaaatatgaacaatataaagcacttaaaggaagaggatgatttcttccagcttttccacactctctttatgcgcaggaacaaacagctgttgagtgagctgctatgactttggtagagaggtgcaatatgttttttgaaccagctataaaagaaattaagaggtacatgtgagggtagaaacaaatatcaaggatgagaatggcactg

SEQ ID NO: 7809 - protein, 516 aa, Homo sapiens; identical to SEQ ID NO: 854

SEQ ID NO: 7810 - DNA, 2666 bp, Homo sapiens
gccttccgcaaactcctgacctgtgggtccgtccgttcaacggccaaaggctggcggaggagggatcccctgcctttctcggaacggaacggagcagagtcgtgcgtggttgagtttagataaaagccgagtgagcgcgctctgttccttaagattagtttaaggtgccttggattgctctgaagagctttgaccacctgatattgcttacatctggaacttcttggcttctcattccccagatgtgcgggtcagagaggattctacaggcaggaaacatcttagaaatcagggttgggcaggcaggagccaggagagtagctacaatgacttcaccagtactggtggacatacgagaagaggtgacctgccctatctgcctggagctcctaacagaacccctgagcatagactgtggccacagcttctgccaagcctgcatcacaccaaatggcagggaatcagtgattggtcaagaaggggaaagaagctgccctgtgtgccagaccagctaccagccagggaacctgcggcctaatcggcatctggccaacatagtgaggcggctcagagaggtagtgttgggccctgggaagcagctgaaagcagttctttgtgcagaccatggagaaaaactgcagctcttctgtcaggaggatgggaaggtcatttgctggctttgtgagcggtctcaggagcaccgtggtcaccacacgttcctcgtggaggaggttgcccaggagtaccaggagaagtttcaggagtctctaaagaagctgaagaacgaggagcaggaagctgagaagctaacagcttttatcagagagaagaaaacatcctggaagaatcagatggagcctgagagatgcaggatccagacagagtttaatcagctgcgaaatatcctagacagagtggagcaacgggagctgaaaaagctggaacaggaagagaagaaggggctacgaattatagaagaggctgagaatgatctggtccaccagacccagtcgctgcgagagctcatctcggatctggagcgtcgatgtcaggggtcaacaatggagctgctgcaggatgtgagtgatgtcacagaaaggagtgagttctggaccctgaggaagccagaagctctccctacaaagctgagaagtatgttccgagccccagatctgaaaaggatgctgcgagtgtgtagagagctgacagatgtccaaagctactgggttgacgtgaccctgaatccacacacagctaatttaaatcttgtcctggctaaaaaccggagacaagtgaggtttgtgggagctaaagtatctggaccttcctgtctggaaaagcattatgactgtagtgtcctgggctcccagcacttctcctctggtaagcattactgggaggtagatgtggccaagaagactgcctggatcctgggggtatgcagcaattcactgggacctacattctctttcaaccattttgctcaaaatcacagtgcttactccaggtatcagcctcagagtggatactgggtgattgggttacagcataaccatgaatatagggcctatgaggattcttccccttccctgcttctctccatgacagtgccccctcgccgtgttggggttttcttagattatgaggctggtactgtctccttttataatgtcacaaaccatggcttccccatctacactttctctaaatattactttcccactactctttgtccatattttaatccttgcaactgtgtaattcctatgaccctgcgtcgtccaagctcttgaatattcttctgttcccacccacttctgataagtaccctgaggcttatcagcatgtgattctcccttctgatcttctgtttttctgtgttctcaaacagttctttcgttttaaacagttactcagtactaggatgcacccataaaatgcaataataagcaaataaattactttgtttttgtataagtatgtataggattgagctctaaaaccaaaccattataatgataatttgggtagcttcaaactcaaattgaagagagtcttcactacaatcttcactacaacctttggccttcctctctacatttaagagtagcaatagaacaataaaaaaaaatacgtctttcaaattaattgcagtaaaaacaaaagagtagtggggagagaaaaacaatccaatacatatttttctctcagaatagaaagaaaacacaaagagaaaatatgaacaatataaagcacttaaaggaagaggatgatttcttccagcttttccacactctctttatgcgcaggaacaaacagctgttgagtgagctgctatgactttggtagagaggtgcaatatgttttttgaaccagctataaaagaaattaagaggtacatgtgagggtagaaacaaatatcaaggatgagaatggcactggctgtcccatatggtatccaggagccaccaatgtctgttgagtacttcatacatgcctagtctgaattgagatgtgctcaatgtataaaatatataccagatttcaaatacctacttcaaaaaataatgtaaaatatctcactaataacttttcctttgtgtattgcaatgataatatgttggctctattggattaaataaagtatgttattcattttacctgtt

SEQ ID NO: 7811 - protein, 516 aa, Homo sapiens; identical to SEQ ID NO: 854

SEQ ID NO: 7812 - DNA, 3235 bp, Homo sapiens
gccttccgcaaactcctgacctgtgggtccgtccgttcaacggccaaaggctggcggaggagggatcccctgcctttctcggaacggaacggagcagagtcgtgcgtggttgagtttagataaaagccgagtgagcgcgctctgttccttaagattagtttaaggtgccttggattgctctgaagagctttgaccacctgatattgcttacatctggaacttcttggcttctcattccccagatgtgcgggtcagagaggattctacaggcaggaaacatcttagaaatcagggttgggcaggcaggagccaggagagtagctacaatgacttcaccagtactggtggacatacgagaagaggtgacctgccctatctgcctggagctcctaacagaacccctgagcatagactgtggccacagcttctgccaagcctgcatcacaccaaatggcagggaatcagtgattggtcaagaaggggaaagaagctgccctgtgtgccagaccagctaccagccagggaacctgcggcctaatcggcatctggccaacatagtgaggcggctcagagaggtagtgttgggccctgggaagcagctgaaagcagttctttgtgcagaccatggagaaaaactgcagctcttctgtcaggaggatgggaaggtcatttgctggctttgtgagcggtctcaggagcaccgtggtcaccacacgttcctcgtggaggaggttgcccaggagtaccaggagaagtttcaggagtctctaaagaagctgaagaacgaggagcaggaagctgagaagctaacagcttttatcagagagaagaaaacatcctggaagaatcagatggagcctgagagatgcaggatccagacagagtttaatcagctgcgaaatatcctagacagagtggagcaacgggagctgaaaaagctggaacaggaagagaagaaggggctacgaattatagaagaggctgagaatgatctggtccaccagacccagtcgctgcgagagctcatctcggatctggagcgtcgatgtcaggggtcaacaatggagctgctgcaggatgtgagtgatgtcacagaaaggagtgagttctggaccctgaggaagccagaagctctccctacaaagctgagaagtatgttccgagccccagatctgaaaaggatgctgcgagtgtgtagagagctgacagatgtccaaagctactgggccatccaggggtctttaaccagaagagagaggagagcctcaggagttaggaccagaagaagccagggaagcagtgcaatggcttcaaaaatcttgcttaacgtacaagaggaggtgacctgtcccatctgcctggagctgttgacagaacccttgagtctagactgtggccacagcctctgccgagcctgcatcactgtgagcaacaaggaggcagtgaccagcatgggaggaaaaagcagctgtcctgtgtgtggtatcagttactcatttgaacatctacaggctaatcagcatctggccaacatagtggagagactcaaggaggtcaagttgagcccagacaatgggaagaagagagatctctgtgatcatcatggagagaaactcctactcttctgtaaggaggataggaaagtcatttgctggctttgtgagcggtctcaggagcaccgtggtcaccacacagtcctcacggaggaagtattcaaggaatgtcaggagaaactccaggcagtcctcaagaggctgaagaaggaagaggaggaagctgagaagctggaagctgacatcagagaagagaaaacttcctggaagtatcaggtacaaactgagagacaaaggatacaaacagaatttgatcagcttagaagcatcctaaataatgaggagcagagagagctgcaaagattggaagaagaagaaaagaagacgctggataagtttgcagaggctgaggatgagctagttcagcagaagcagttggtgagagagctcatctcagatgtggagtgtcggagtcagtggtcaacaatggagctgctgcaggacatgagtggaatcatgaaatggagtgagatctggaggctgaaaaagccaaaaatggtttccaagaaactgaagactgtattccatgctccagatctgagtaggatgctgcaaatgtttagagaactgacagctgtccggtgctactgggtggatgtcacactgaattcagtcaacctaaatttgaatcttgtcctttcagaagatcagagacaagtgatatctgtgccaatttggccttttcagtgttataattatggtgtcttgggatcccaatatttctcctctgggaaacattactgggaagtggacgtgtccaagaaaactgcctggatcctgggggtatactgtagaacatattcccgccatatgaagtatgttgttagaagatgtgcaaatcgtcaaaatctttacaccaaatacagacctctatttggctactgggttatagggttacagaataaatgtaagtatggtgtctttgaagagtctttgtcctctgatcccgaggttttgactctctccatggctgtgcctccctgccgtgttggggttttcctcgactatgaagcaggcattgtctcatttttcaatgtcacaagccatggctccctcatttacaagttctctaaatgttgcttttctcagcctgtttatccatatttcaatccttggaactgtccagctcccatgactctatgcccaccaagctcttgaattttctcatttcttcacctacaaccctttgtcttgacttatctcctgcaactgactcatctgcaacattcacaccattgcttccttgtggtttcccttctttagaacttttactcatccttgagatgtatggtgtatttggcttgagttatgagagatgcttatttattcatttactctttttcatattttcagagaaagttacctaatccctcctaaagacacagcagtatgggtataacatccttgccttcccatttatccatgtttcactttatcactgatatgaagaggcccaaagcctgttagccaccatccatgctacctaggtagtccataggaaccacccccatgaccaccaccaacatcaactaaaggttcttggagggtatgtcagtgtgttgctcaggataccccaggtacatcaaggaatcaaggagaggaaaatatgagcaatatgtgta

SEQ ID NO: 7813 - protein, 842 aa, Homo sapiens; identical to SEQ ID NO: 858

SEQ ID NO: 7814 - DNA, 1989 bp, Homo sapiens
ggagcagagtcgtgcgtggttgagtttagataaaagccgagtgagcgcgctctgttccttaagattagtttaaggtgccttggattgctctgaagagctttgaccacctgatattgcttacatctggaacttcttggcttctcattccccagatgtgcgggtcagagagaccatggagaaaaactgcagctcttctgtcaggaggatgggaaggtcatttgctggctttgtgagcggtctcaggagcaccgtggtcaccacacgttcctcgtggaggaggttgcccaggagtaccaggagaagtttcaggagtctctaaagaagctgaagaacgaggagcaggaagctgagaagctaacagcttttatcagagagaagaaaacatcctggaagaatcagatggagcctgagagatgcaggatccagacagagtttaatcagctgcgaaatatcctagacagagtggagcaacgggagctgaaaaagctggaacaggaagagaagaaggggctacgaattatagaagaggctgagaatgatctggtccaccagacccagtcgctgcgagagctcatctcggatctggagcgtcgatgtcaggggtcaacaatggagctgctgcaggatgtgagtgatgtcacagaaaggagtgagttctggaccctgaggaagccagaagctctccctacaaagctgagaagtatgttccgagccccagatctgaaaaggatgctgcgagtgtgtagagagctgacagatgtccaaagctactgggttgacgtgaccctgaatccacacacagctaatttaaatcttgtcctggctaaaaaccggagacaagtgaggtttgtgggagctaaagtatctggaccttcctgtctggaaaagcattatgactgtagtgtcctgggctcccagcacttctcctctggtaagcattactgggaggtagatgtggccaagaagactgcctggatcctgggggtatgcagcaattcactgggacctacattctctttcaaccattttgctcaaaatcacagtgcttactccaggtatcagcctcagagtggatactgggtgattgggttacagcataaccatgaatatagggcctatgaggattcttccccttccctgcttctctccatgacagtgccccctcgccgtgttggggttttcttagattatgaggctggtactgtctccttttataatgtcacaaaccatggcttccccatctacactttctctaaatattactttcccactactctttgtccatattttaatccttgcaactgtgtaattcctatgaccctgcgtcgtccaagctcttgaatattcttctgttcccacccacttctgataagtaccctgaggcttatcagcatgtgattctcccttctgatcttctgtttttctgtgttctcaaacagttctttcgttttaaacagttactcagtactaggatgcacccataaaatgcaataataagcaaataaattactttgtttttgtataagtatgtataggattgagctctaaaaccaaaccattataatgataatttgggtagcttcaaactcaaattgaagagagtcttcactacaatcttcactacaacctttggccttcctctctacatttaagagtagcaatagaacaataaaaaaaaatacgtctttcaaattaattgcagtaaaaacaaaagagtagtggggagagaaaaacaatccaatacatatttttctctcagaatagaaagaaaacacaaagagaaaatatgaacaatataaagcacttaaaggaagaggatgatttcttccagcttttccacactctctttatgcgcaggaacaaacagctgttgagtgagctgctatgactttggtagagaggtgcaatatgttttttgaaccagctataaaagaaattaagaggtacatgtgagggtagaaacaaatatcaaggatgagaatggcactg

SEQ ID NO: 7815 - protein, 313 aa, Homo sapiens
MEPERCRIQTEFNQLRNILDRVEQRELKKLEQEEKKGLRIIEEAENDLVHQTQSLRELISDLERRCQGSTMELLQDVSDVTERSEFWTLRKPEALPTKLRSMFRAPDLKRMLRVCRELTDVQSYWVDVTLNPHTANLNLVLAKNRRQVRFVGAKVSGPSCLEKHYDCSVLGSQHFSSGKHYWEVDVAKKTAWILGVCSNSLGPTFSFNHFAQNHSAYSRYQPQSGYWVIGLQHNHEYRAYEDSSPSLLLSMTVPPRRVGVFLDYEAGTVSFYNVTNHGFPIYTFSKYYFPTTLCPYFNPCNCVIPMTLRRPSS

SEQ ID NO: 7816 - DNA, 2729 bp, Homo sapiens
aaggaaagaacaggctacaaaggctttctcctgcagcatttaccctccctctccctgggaggcttggcccaggaaagcagtcctgagcccaacttccccgcttttaatagaggagaccctcagtgtgaccgactagcagcctctttttcttccctgttcctgaagaatcagatggagcctgagagatgcaggatccagacagagtttaatcagctgcgaaatatcctagacagagtggagcaacgggagctgaaaaagctggaacaggaagagaagaaggggctacgaattatagaagaggctgagaatgatctggtccaccagacccagtcgctgcgagagctcatctcggatctggagcgtcgatgtcaggggtcaacaatggagctgctgcaggatgtgagtgatgtcacagaaaggagtgagttctggaccctgaggaagccagaagctctccctacaaagctgagaagtatgttccgagccccagatctgaaaaggatgctgcgagtgtgtagagagctgacagatgtccaaagctactgggttgacgtgaccctgaatccacacacagctaatttaaatcttgtcctggctaaaaaccggagacaagtgaggtttgtgggagctaaagtatctggaccttcctgtctggaaaagcattatgactgtagtgtcctgggctcccagcacttctcctctggtaagcattactgggaggtagatgtggccaagaagactgcctggatcctgggggtatgcagcaattcactgggacctacattctctttcaaccattttgctcaaaatcacagtgcttactccaggtatcagcctcagagtggatactgggtgattgggttacagcataaccatgaatatagggcctatgaggattcttccccttccctgcttctctccatgacagtgccccctcgccgtgttggggttttcttagattatgaggctggtactgtctccttttataatgtcacaaaccatggcttccccatctacactttctctaaatattactttcccactactctttgtccatattttaatccttgcaactgtgtaattcctatgaccctgcgtcgtccaagctcttgaatattcttctgttcccacccacttctgataagtaccctgaggcttatcagcatgtgattctcccttctgatcttctgtttttctgtgttctcaattcttttgttgttttttggtttttgaatcttttttgagatggaatctcgctctgtcgcccaggctggagtgcactggcgcaatctcggctcactgcaacctctgcctcctgggttcaagcgaacctcctgcctcagcatcccaagtagctgggattacaggcacccaccaccatgcccaactaatttttgtatttttatagagatagggtttcaccgtgttggccaggctgatctcgaactcctgaccgcaagtgatccacccgcctcggtctcccaaagtgctgggattacagatgtgagccgccgcgcccagacagttctttcgttttaaacagttactcagtactaggatgcacccagtggtgagagtaagcatctttgactgatgacaggtcttgaggtggatagggggcgctttcagtattttgccattaagcatagtatttgatgcaggttttttttgattgatgcaggggatcaaatttaggaagttctgatctgttaatttactacaagtttttgtataaaatgaaaactcgtattctacctatgtcttttctgtaaattattgagacaattgtgtatcatttttgttctgttaatgtggcttagtacattgatttacttcaatttgttaccacaacttgctgaaatacaccattattatttgttgtatgcaatactggatttattttgataacgtattgtttagattttgttctcatctatgttaatgaaagaaattggcctgtatttttacattcttgtaatatctttgccaggttctataaaatgcaataataagcaaataaattactttgtttttgtataagtatgtataggattgagctctaaaaccaaaccattataatgataatttgggtagcttcaaactcaaattgaagagagtcttcactacaatcttcactacaacctttggccttcctctctacatttaagagtagcaatagaacaataaaaaaaaatacgtctttcaaattaattgcagtaaaaacaaaagagtagtggggagagaaaaacaatccaatacatatttttctctcagaatagaaagaaaacacaaagagaaaatatgaacaatataaagcacttaaaggaagaggatgatttcttccagcttttccacactctctttatgcgcaggaacaaacagctgttgagtgagctgctatgactttggtagagaggtgcaatatgttttttgaaccagctataaaagaaattaagaggtacatgtgagggtagaaacaaatatcaaggatgagaatggcactggctgtcccatatggtatccaggagccaccaatgtctgttgagtacttcatacatgcctagtctgaattgagatgtgctcaatgtataaaatatataccagatttcaaatacctacttcaaaaaataatgtaaaatatctcactaataacttttcctttgtgtattgcaatgataatatgttggctctattggattaaataaagtatgttattcattttacctgtt

SEQ ID NO: 7817 - protein, 313 aa, Homo sapiens; identical to SEQ ID NO: 7815

SEQ ID NO: 7818 - DNA, 1200 bp, Homo sapiens
tgcaacctctgtctcctgggttcaagcgatcctcctgtctcagcctcccgagtaactgggattacaggcgcccaccaccatgcccggctaatttttgtatttttgtagacagggtttcgacatgttggccaggctggtctcaaactcctgacctcaagtgatccacccgcctcagcctcccaaagtgctgggattacaggtgtgagccactgcgcccgtcctgactcatgcaacttctgcttcagccatccaggggtctttaaccagaagagagaggagagcctcaggagttaggaccagaagaagccagggaagcagtgcaatggcttcaaaaatcttgcttaacgtacaagaggaggtgacctgtcccatctgcctggagctgttgacagaacccttgagtctagactgtggccacagcctctgccgagcctgcatcactgtgagcaacaaggaggcagtgaccagcatgggaggaaaaagcagctgtcctgtgtgtggtatcagttactcatttgaacatctacaggctaatcagcatctggccaacatagtggagagactcaaggaggtcaagttgagcccagacaatgggaagaagagagatctctgtgatcatcatggagagaaactcctactcttctgtaaggaggataggaaagtcatttgctggctttgtgagcggtctcaggagcaccgtggtcaccacacagtcctcacggaggaagtattcaaggaatgtcaggagaaactccaggcagtcctcaagaggctgaagaaggaagaggaggaagctgagaagctggaagctgacatcagagaagagaaaacttcctggaagtatcaggtacaaactgagagacaaaggatacaaacagaatttgatcagcttagaagcatcctaaataatgaggagcagagagagctgcaaagattggaagaagaagaaaagaagacgctggataagtttgcagaggctgaggatgagctagttcagcagaagcagttggtgagagagctcatctcagatgtggagtgtcggagtcagtggtcaacaatggagctgctgcaggacatgagtggaatcatgaaatggtgcgtatgggtggccaggagtggtgcttgtgagttataaagaagtgtttgtagctattagagttatttggtggtcaattggaataaaaaatctcccagagtagt

SEQ ID NO: 7819 - protein, 270 aa, Homo sapiens; identical to SEQ ID NO: 866

SEQ ID NO: 7820 - DNA, 967 bp, Homo sapiens
atttgttgaatgaatcctgaccacacccaccctggcttttcttcacctcttcaaccaggagccgagatttctgttgctctgaagccatccaggggtctttaaccagaagagagaggagagcctcaggagttaggaccagaagaagccagggaagcagtgcaatggcttcaaaaatcttgcttaacgtacaagaggaggtgacctgtcccatctgcctggagctgttgacagaacccttgagtctagactgtggccacagcctctgccgagcctgcatcactgtgagcaacaaggaggcagtgaccagcatgggaggaaaaagcagctgtcctgtgtgtggtatcagttactcatttgaacatctacaggctaatcagcatctggccaacatagtggagagactcaaggaggtcaagttgagcccagacaatgggaagaagagagatctctgtgatcatcatggagagaaactcctactcttctgtaaggaggataggaaagtcatttgctggctttgtgagcggtctcaggagcaccgtggtcaccacacagtcctcacggaggaagtattcaaggaatgtcaggagaaactccaggcagtcctcaagaggctgaagaaggaagaggaggaagctgagaagctggaagctgacatcagagaagagaaaacttcctggaaggcaagaggagattctgaaggttttctgagacaggaatcttgacaggaccttaatccaaggaggcctcgtcctttttattccttgacattgcatgagtcctgaagccatttgattagttctcttctctgtcctgtccctgttgggggtggaggctagaaagtggacatgttacaattacacatacatacctggaactgagcacaaagatagactctatgatgaggaaggctagcaaatactgtgttccattgctcttttccaacggggctctactacttctggtggaa

SEQ ID NO: 7821 - protein, 186 aa, Homo sapiens
MASKILLNVQEEVTCPICLELLTEPLSLDCGHSLCRACITVSNKEAVTSMGGKSSCPVCGISYSFEHLQANQHLANIVERLKEVKLSPDNGKKRDLCDHHGEKLLLFCKEDRKVICWLCERSQEHRGHHTVLTEEVFKECQEKLQAVLKRLKKEEEEAEKLEADIREEKTSWKARGDSEGFLRQES

SEQ ID NO: 7822 - DNA, 1039 bp, Homo sapiens
atttgttgaatgaatcctgaccacacccaccctggcttttcttcacctcttcaaccaggagccgagatttctgttgctctgaagccatccaggggtctttaaccagaagagagaggagagcctcaggagttaggaccagaagaagccagggaagcagtgcaatggcttcaaaaatcttgcttaacgtacaagaggaggtgacctgtcccatctgcctggagctgttgacagaacccttgagtctagactgtggccacagcctctgccgagcctgcatcactgtgagcaacaaggaggcagtgaccagcatgggaggaaaaagcagctgtcctgtgtgtggtatcagttactcatttgaacatctacaggctaatcagcatctggccaacatagtggagagactcaaggaggtcaagttgagcccagacaatgggaagaagagagatctctgtgatcatcatggagagaaactcctactcttctgtaaggaggataggaaagtcatttgctggctttgtgagcggtctcaggagcaccgtggtcaccacacagtcctcacggaggaagtattcaaggaatgtcaggagaaactccaggcagtcctcaagaggctgaagaaggaagaggaggaagctgagaagctggaagctgacatcagagaagagaaaacttcctggaagtatcaggtacaaactgagagacaaaggatacaaacagaatttgatcagcttagaagcatcctaaataatgaggagcagagagagctgcaaagattggaagaagaagaaaagaagacgctggataagtttgcagaggctgaggatgagctagttcagcagaagcagttggtgagagagctcatctcagatgtggagtgtcggagtcagtggtcaacaatggagctgctgcaggacatgagtggaatcatgaaatggtgcgtatgggtggccaggagtggtgcttgtgagttataaagaagtgtttgtagctattagagttatttggtggtcaattggaataaaaaatctcccagagtagt

SEQ ID NO: 7823 - protein, 270 aa, Homo sapiens; identical to SEQ ID NO: 866

SEQ ID NO: 7824 - DNA, 2314 bp, Homo sapiens
atttgttgaatgaatcctgaccacacccaccctggcttttcttcacctcttcaaccaggagccgagatttctgttgctctgaagccatccaggggtctttaaccagaagagagaggagagcctcaggagttaggaccagaagaagccagggaagcagtgcaatggcttcaaaaatcttgcttaacgtacaagaggaggtgacctgtcccatctgcctggagctgttgacagaacccttgagtctagactgtggccacagcctctgccgagcctgcatcactgtgagcaacaaggaggcagtgaccagcatgggaggaaaaagcagctgtcctgtgtgtggtatcagttactcatttgaacatctacaggctaatcagcatctggccaacatagtggagagactcaaggaggtcaagttgagcccagacaatgggaagaagagagatctctgtgatcatcatggagagaaactcctactcttctgtaaggaggataggaaagtcatttgctggctttgtgagcggtctcaggagcaccgtggtcaccacacagtcctcacggaggaagtattcaaggaatgtcaggagaaactccaggcagtcctcaagaggctgaagaaggaagaggaggaagctgagaagctggaagctgacatcagagaagagaaaacttcctggaagtatcaggtacaaactgagagacaaaggatacaaacagaatttgatcagcttagaagcatcctaaataatgaggagcagagagagctgcaaagattggaagaagaagaaaagaagacgctggataagtttgcagaggctgaggatgagctagttcagcagaagcagttggtgagagagctcatctcagatgtggagtgtcggagtcagtggtcaacaatggagctgctgcaggacatgagtggaatcatgaaatggagtgagatctggaggctgaaaaagccaaaaatggtttccaagaaactgaagactgtattccatgctccagatctgagtaggatgctgcaaatgtttagagaactgacagctgtccggtgctactgggtggatgtcacactgaattcagtcaacctaaatttgaatcttgtcctttcagaagatcagagacaagtgatatctgtgccaatttggccttttcagtgttataattatggtgtcttgggatcccaatatttctcctctgggaaacattactgggaagtggacgtgtccaagaaaactgcctggatcctgggggtatactgtagaacatattcccgccatatgaagtatgttgttagaagatgtgcaaatcgtcaaaatctttacaccaaatacagacctctatttggctactgggttatagggttacagaataaatgtaagtatggtgtctttgaagagtctttgtcctctgatcccgaggttttgactctctccatggctgtgcctccctgccgtgttggggttttcctcgactatgaagcaggcattgtctcatttttcaatgtcacaagccatggctccctcatttacaagttctctaaatgttgcttttctcagcctgtttatccatatttcaatccttggaactgtccagctcccatgactctatgcccaccaagctcttgaattttctcatttcttcacctacaaccctttgtcttgacttatctcctgcaactgactcatctgcaacattcacaccattgcttccttgtggtttcccttctttagaacttttactcatccttgagatgtatggtgtatttggcttgagttatgagagatgcttatttattcatttactctttttcatattttcagagaaagttacctaatccctcctaaagacacagcagtatgggtataacatccttgccttcccatttatccatgtttcactttatcactgatatgaagaggcccaaagcctgttagccaccatccatgctacctaggtagtccataggaaccacccccatgaccaccaccaacatcaactaaaggttcttggagggtatgtcagtgtgttgctcaggataccccaggtacatcaaggaatcaaggagaggaaaatatgagcaatatgtgtattcagagtgaagattttatgtccagagtatttgagctcaaaccttgcctgttgttttctaatcatgatgaatactttctcagtttctttttcctgaaatataaattgggatttaagactgtacctaactattaagatcactgtgtaaaactaagtgtctctaaatgtaatgcatcgatttagtgtctggaacataataaatatttgctctcatgattgctaa

SEQ ID NO: 7825 - protein, 488 aa, Homo sapiens; identical to SEQ ID NO: 860

SEQ ID NO: 7826 - DNA, 2219 bp, Homo sapiens
accctggcttttcttcacctcttcaaccaggagccgagatttctgttgctctgaagccatccaggggtctttaaccagaagagagaggagagcctcaggagttaggaccagaagaagccagggaagcagtgcaatggcttcaaaaatcttgcttaacgtacaagaggaggtgacctgtcccatctgcctggagctgttgacagaacccttgagtctagactgtggccacagcctctgccgagcctgcatcactgtgagcaacaaggaggcagtgaccagcatgggaggaaaaagcagctgtcctgtgtgtggtatcagttactcatttgaacatctacaggctaatcagcatctggccaacatagtggagagactcaaggaggtcaagttgagcccagacaatgggaagaagagagatctctgtgatcatcatggagagaaactcctactcttctgtaaggaggataggaaatattcaaggaatgtcaggagaaactccaggcagtcctcaagaggctgaagaaggaagaggaggaagctgagaagctggaagctgacatcagagaagagaaaacttcctggaagtatcaggtacaaactgagagacaaaggatacaaacagaatttgatcagcttagaagcatcctaaataatgaggagcagagagagctgcaaagattggaagaagaagaaaagaagacgctggataagtttgcagaggctgaggatgagctagttcagcagaagcagttggtgagagagctcatctcagatgtggagtgtcggagtcagtggtcaacaatggagctgctgcaggacatgagtggaatcatgaaatggagtgagatctggaggctgaaaaagccaaaaatggtttccaagaaactgaagactgtattccatgctccagatctgagtaggatgctgcaaatgtttagagaactgacagctgtccggtgctactgggtggatgtcacactgaattcagtcaacctaaatttgaatcttgtcctttcagaagatcagagacaagtgatatctgtgccaatttggccttttcagtgttataattatggtgtcttgggatcccaatatttctcctctgggaaacattactgggaagtggacgtgtccaagaaaactgcctggatcctgggggtatactgtagaacatattcccgccatatgaagtatgttgttagaagatgtgcaaatcgtcaaaatctttacaccaaatacagacctctatttggctactgggttatagggttacagaataaatgtaagtatggtgtctttgaagagtctttgtcctctgatcccgaggttttgactctctccatggctgtgcctccctgccgtgttggggttttcctcgactatgaagcaggcattgtctcatttttcaatgtcacaagccatggctccctcatttacaagttctctaaatgttgcttttctcagcctgtttatccatatttcaatccttggaactgtccagctcccatgactctatgcccaccaagctcttgaattttctcatttcttcacctacaaccctttgtcttgacttatctcctgcaactgactcatctgcaacattcacaccattgcttccttgtggtttcccttctttagaacttttactcatccttgagatgtatggtgtatttggcttgagttatgagagatgcttatttattcatttactctttttcatattttcagagaaagttacctaatccctcctaaagacacagcagtatgggtataacatccttgccttcccatttatccatgtttcactttatcactgatatgaagaggcccaaagcctgttagccaccatccatgctacctaggtagtccataggaaccacccccatgaccaccaccaacatcaactaaaggttcttggagggtatgtcagtgtgttgctcaggataccccaggtacatcaaggaatcaaggagaggaaaatatgagcaatatgtgtattcagagtgaagattttatgtccagagtatttgagctcaaaccttgcctgttgttttctaatcatgatgaatactttctcagtttctttttcctgaaatataaattgggatttaagactgtacctaactattaagatcactgtgtaaaactaagtgtctctaaatgtaatgcatcgatttagtgtctggaacataataaatatttgctctcatgattgctaa

SEQ ID NO: 7827 - protein, 243 aa, Homo sapiens; identical to SEQ ID NO: 864

SEQ ID NO: 7828 - DNA, 1985 bp, Homo sapiens
cttcacctcttcaaccaggagccgagatttctgttgctctgaagccatccaggggtctttaaccagaagagagaggagagcctcaggagttaggaccagaagaagccagggaagcagtgcaatggcttcaaaaatcttgcttaacgtacaagaggaggtgacctgtcccatctgcctggagctgttgacagaacccttgagtctagactgtggccacagcctctgccgagcctgcatcactgtgagcaacaaggaggcagtgaccagcatgggaggaaaaagcagctgtcctgtgtgtggtatcagttactcatttgaacatctacaggctaatcagcatctggccaacatagtggagagactcaaggaggtcaagttgagcccagacaatgggaagaagagagatctctgtgatcatcatggagagaaactcctactcttctgtaaggaggataggaaatattcaaggaatgtcaggagaaactccaggcagtcctcaagaggctgaagaaggaagaggaggaagctgagaagctggaagctgacatcagagaagagaaaacttcctggaagtatcaggtacaaactgagagacaaaggatacaaacagaatttgatcagcttagaagcatcctaaataatgaggagcagagagagctgcaaagattggaagaagaagaaaagaagacgctggataagtttgcagaggctgaggatgagctagttcagcagaagcagttggtgagagagctcatctcagatgtggagtgtcggagtcagtggtcaacaatggagctgctgcaggacatgagtggaatcatgaaatggagtgagatctggaggctgaaaaagccaaaaatggtttccaagaaactgaagactgtattccatgctccagatctgagtaggatgctgcaaatgtttagagaactgacagctgtccggtgctactgggtggatgtcacactgaattcagtcaacctaaatttgaatcttgtcctttcagaagatcagagacaagtgatatctgtgccaatttggccttttcagtgttataattatggtgtcttgggatcccaatatttctcctctgggaaacattactgggaagtggacgtgtccaagaaaactgcctggatcctgggggtatactgtagaacatattcccgccatatgaagtatgttgttagaagatgtgcaaatcgtcaaaatctttacaccaaatacagacctctatttggctactgggttatagggttacagaataaatgtaagtatggtgtctttgaagagtctttgtcctctgatcccgaggttttgactctctccatggctgtgcctccctgccgtgttggggttttcctcgactatgaagcaggcattgtctcatttttcaatgtcacaagccatggctccctcatttacaagttctctaaatgttgcttttctcagcctgtttatccatatttcaatccttggaactgtccagctcccatgactctatgcccaccaagctcttgaattttctcatttcttcacctacaaccctttgtcttgacttatctcctgcaactgactcatctgcaacattcacaccattgcttccttgtggtttcccttctttagaacttttactcatccttgagatgtatggtgtatttggcttgagttatgagagatgcttatttattcatttactctttttcatattttcagagaaagttacctaatccctcctaaagacacagcagtatgggtataacatccttgccttcccatttatccatgtttcactttatcactgatatgaagaggcccaaagcctgttagccaccatccatgctacctaggtagtccataggaaccacccccatgaccaccaccaacatcaactaaaggttcttggagggtatgtcagtgtgttgctcaggataccccaggtacatcaaggaatcaaggagaggaaaatatgagcaatatgtgta

SEQ ID NO: 7829 - protein, 243 aa, Homo sapiens; identical to SEQ ID NO: 864

SEQ ID NO: 7830 - DNA, 1044 bp, Homo sapiens
ctcttcaaccaggagccgagatttctgttgctctgaaggagaacagtgtggaagattaagatgggagtgtgcctggagaggcataaaagccatccaggggtctttaaccagaagagagaggagagcctcaggagttaggaccagaagaagccagggaagcagtgcaatggcttcaaaaatcttgcttaacgtacaagaggaggtgacctgtcccatctgcctggagctgttgacagaacccttgagtctagactgtggccacagcctctgccgagcctgcatcactgtgagcaacaaggaggcagtgaccagcatgggaggaaaaagcagctgtcctgtgtgtggtatcagttactcatttgaacatctacaggctaatcagcatctggccaacatagtggagagactcaaggaggtcaagttgagcccagacaatgggaagaagagagatctctgtgatcatcatggagagaaactcctactcttctgtaaggaggataggaaagtcatttgctggctttgtgagcggtctcaggagcaccgtggtcaccacacagtcctcacggaggaagtattcaaggaatgtcaggagaaactccaggcagtcctcaagaggctgaagaaggaagaggaggaagctgagaagctggaagctgacatcagagaagagaaaacttcctggaagtatcaggtacaaactgagagacaaaggatacaaacagaatttgatcagcttagaagcatcctaaataatgaggagcagagagagctgcaaagattggaagaagaagaaaagaagacgctggataagtttgcagaggctgaggatgagctagttcagcagaagcagttggtgagagagctcatctcagatgtggagtgtcggagtcagtggtcaacaatggagctgctgcaggacatgagtggaatcatgaaatggtgcgtatgggtggccaggagtggtgcttgtgagttataaagaagtgtttgtagctattagagttatttggtggtcaattggaataaaaaatctcccagagtagt

SEQ ID NO: 7831 - protein, 270 aa, Homo sapiens; identical to SEQ ID NO: 866

SEQ ID NO: 7832 - DNA, 2305 bp, Homo sapiens
cctgcctcggcctcccaaagtgctgagattacaggggtgagccaccgcgcccggcctcactttcaatcttctcagccatccaggggtctttaaccagaagagagaggagagcctcaggagttaggaccagaagaagccagggaagcagtgcaatggcttcaaaaatcttgcttaacgtacaagaggaggtgacctgtcccatctgcctggagctgttgacagaacccttgagtctagactgtggccacagcctctgccgagcctgcatcactgtgagcaacaaggaggcagtgaccagcatgggaggaaaaagcagctgtcctgtgtgtggtatcagttactcatttgaacatctacaggctaatcagcatctggccaacatagtggagagactcaaggaggtcaagttgagcccagacaatgggaagaagagagatctctgtgatcatcatggagagaaactcctactcttctgtaaggaggataggaaagtcatttgctggctttgtgagcggtctcaggagcaccgtggtcaccacacagtcctcacggaggaagtattcaaggaatgtcaggagaaactccaggcagtcctcaagaggctgaagaaggaagaggaggaagctgagaagctggaagctgacatcagagaagagaaaacttcctggaagtatcaggtacaaactgagagacaaaggatacaaacagaatttgatcagcttagaagcatcctaaataatgaggagcagagagagctgcaaagattggaagaagaagaaaagaagacgctggataagtttgcagaggctgaggatgagctagttcagcagaagcagttggtgagagagctcatctcagatgtggagtgtcggagtcagtggtcaacaatggagctgctgcaggacatgagtggaatcatgaaatggagtgagatctggaggctgaaaaagccaaaaatggtttccaagaaactgaagactgtattccatgctccagatctgagtaggatgctgcaaatgtttagagaactgacagctgtccggtgctactgggtggatgtcacactgaattcagtcaacctaaatttgaatcttgtcctttcagaagatcagagacaagtgatatctgtgccaatttggccttttcagtgttataattatggtgtcttgggatcccaatatttctcctctgggaaacattactgggaagtggacgtgtccaagaaaactgcctggatcctgggggtatactgtagaacatattcccgccatatgaagtatgttgttagaagatgtgcaaatcgtcaaaatctttacaccaaatacagacctctatttggctactgggttatagggttacagaataaatgtaagtatggtgtctttgaagagtctttgtcctctgatcccgaggttttgactctctccatggctgtgcctccctgccgtgttggggttttcctcgactatgaagcaggcattgtctcatttttcaatgtcacaagccatggctccctcatttacaagttctctaaatgttgcttttctcagcctgtttatccatatttcaatccttggaactgtccagctcccatgactctatgcccaccaagctcttgaattttctcatttcttcacctacaaccctttgtcttgacttatctcctgcaactgactcatctgcaacattcacaccattgcttccttgtggtttcccttctttagaacttttactcatccttgagatgtatggtgtatttggcttgagttatgagagatgcttatttattcatttactctttttcatattttcagagaaagttacctaatccctcctaaagacacagcagtatgggtataacatccttgccttcccatttatccatgtttcactttatcactgatatgaagaggcccaaagcctgttagccaccatccatgctacctaggtagtccataggaaccacccccatgaccaccaccaacatcaactaaaggttcttggagggtatgtcagtgtgttgctcaggataccccaggtacatcaaggaatcaaggagaggaaaatatgagcaatatgtgtattcagagtgaagattttatgtccagagtatttgagctcaaaccttgcctgttgttttctaatcatgatgaatactttctcagtttctttttcctgaaatataaattgggatttaagactgtacctaactattaagatcactgtgtaaaactaagtgtctctaaatgtaatgcatcgatttagtgtctggaacataataaatatttgctctcatgattgctaa

SEQ ID NO: 7833 - protein, 488 aa, Homo sapiens; identical to SEQ ID NO: 860

SEQ ID NO: 7834 - DNA, 979 bp, Homo sapiens
gggtccggctctcccttctccccctcctcaggctcagggagaagggttcaagtgcatcagtgatgtgaaggagatgaaaccagtgatgtgggagggatggacacaggatgagagatgtgggggtcaaaaaatttttttcatccctaggagtgagatctggaggctgaaaaagccaaaaatggtttccaagaaactgaagactgtattccatgctccagatctgagtaggatgctgcaaatgtttagaggtgaggagaagcagacaaagactgtggatgtgggattgttgtggtgtcaggtaataaactgtctaggtgggataacttaaaattgaggacagaagagaggagggaggtcagagaataaggaatattctgtggtgaagaggatgcatttatatgtaaggaaaaatggctaggtctctggtttatctttttaattcactagctcacagcttcatggtattcccttcccctgtccctactctaaagaatatataggtatcagtgcttactcctttgtttctaatcagcatcactgaatcttttattatttcagaactgacagctgtccggtgctactggggtaagaaaaagttagtctttaaataactgttttccaattacctttcagaagtttatggtttcaatgatatcttctgatcttagcctcatgcattctcagcacctcccaaaacatttgctaaatacatttctccagtgttttacccctccaattcatcagtgcaagtttttcagtcacttcccaagttcgttcatcaccatgtcactagataaacctactccatatctgtcactaatcatgatgaatactttctcagtttctttttcctgaaatataaattgggatttaagactgtacctaactattaagatcactgtgtaaaactaagtgtctctaaatgtaatgcatcgatttagtgtctggaacataataaatatttgctctcatgattgct

SEQ ID NO: 7835 - protein, 71 aa, Homo sapiens
MVSMISSDLSLMHSQHLPKHLLNTFLQCFTPPIHQCKFFSHFPSSFITMSLDKPTPYLSLIMMNTFSVSFS

SEQ ID NO: 7836 - DNA, 1264 bp, Homo sapiens
cttgtcctttcagaagatcagagacaagtgatatctgtgccaatttggccttttcagtgttataattatggtgtcttgggatcccaatatttctcccagtaatgtttccctgatgtgatactttgagagcccaggatgccagtacaataattgaaattcacaaatgtctggtatcttgtccctcgtgccccatatattatctgtggtttcggagagctcacttgtctcttatcttcagaaatgacagcacatgaaatgttgtttggagccactgtcacatcaactgtagaaaaattaacaggtcagctaagggatataatgtaactttatttgtgatatgagagaaatcttgataaagacttgagagaaaactgggaggaaccttgtttagaagttataaggaggggtaagttatgtgtgtcttggaaggagaatcataaatcttaaaacatgagcctaatagagaacataaaattctaaaagataaagataataataatgataagccgcagggtggcttatgataatgtgacttctccttaccccagtagcgtcggacatctgtcagctctgaaatgataaaaatgcacaatattgaatacaaacaaaggagtcagcactgaaattcattttctctccagattagggaaagagtaggtatgccctatggtagggcagtaaattgctgaatgatgagatgaaacagccacctagccatttcccattaaatataatcccatcagcagcagacaatatctatcctcccctatcccctctatccatatttggaaactgcaccctcttccctatttagcaccctaacaccacttgaattccataaccctgttgttgatctagctctcctcacctctaaacacttctagcattcctttcagatcaggagctcgaaacactctcctttgattttttggaaaagtttctggcttcttcaaggtcacgttctccgtcctaagaattaaaaaaaaaaaaaaaaacttccaaacctttgaccttgtgtccgtggaacacccctgacttcctatcatttcaacccattgaggcacttgaactctcttcttggggatcctgagaagggagagtgcaaactcttgaccctggaggcaaacaaaatgttctcatgtttgccttcccacttactttctgtgagaacgtgggaagatcttaacctctcagaagcacagtttcttccttctaaaatgaaataattaacctctccctgtctacattcttaaactcataggac

SEQ ID NO: 7837 - protein, 38 aa, Homo sapiens
MKQPPSHFPLNIIPSAADNIYPPLSPLSIFGNCTLFPI

SEQ ID NO: 7838 - DNA, 1482 bp, Homo sapiens
cggctagtatcgcgagatcaggaaggtggccgagtgtgtcgccgcggccatcaggcacttctccttcctgcccttgtatgaagaaggatgtgtttgcttccccttgtgccatgattgtaaatttcctgaggcctcctcagccctgcagaactggggttatagccatgtgactgatcttcgtccaagaatatgtaaagaaaaagtgttgagttggcttttagggctagagcaatgtatcttaggctcacttaaggaagctgtagagatgagcccaaggagggaaaccagaagagccccccaggctcaccagttgtttgttggctccctacaaacatgtcattcaagtggctaatcttacaacagcacaaattcatctaaccagaaagagaagaggaggctccaaaggcacttgactactgagcatcaccctggacgtgtacaagtctgcgtccttattgttttcttcattgggccgaactttctggtcctcatccaacagctcttctatcacgtgttcgaaagtgtcagccaatgatgtcaagcctcttgaacctgccttgggcccattcacgctctccagagtcccatgggtccgcacacctggagatactctattatagcaaagaagaaagataatttcattgagccatcctgttttacaggaaattctgcaagtggcaacgtgggtccattccgtgtgtgtcactagagctggcgcaagcccatggccatggtgaggcagcgtttccactggaactaatctgatacctgcaccagctcttgcaactgtgcagtgttcccactgcaaactacggatggggtaaaagactgctcacctcctatttctcatctaatctcacacactctgtttgatgaggctatggagaaacaggtcttctcatacactaaaggtgggagtacaaacaattcaagccctgtgcaggacaattaggcaatacctatcaaaattatacatgatttttcctgctgacccagcaattccacttctgggaataattgacagatataggtgcatatgtacaaaatgatggaaagctctctggtatatattagtaagtgataaaacaaggtgtaaaatagtgtatatatggctactaccttttgttttaaaaatgggggaaaatggtggagcttgcggtgagccgagatcgtgccactgcactccagcctgggcgacagagcgagactccgtctcaaaaaaaaaacagggtggggtgggggggaaataatagtacatactcatatttacctgtatctatataaaacacactatcaaggattcacaagaaactaatacaaatgatcaccttatagatggtatgtattgggggatactgaggtgagcagggtataagtggggcaagacttttcagtgtaaacttcttttaaattttattttgatttttgaataatgtaaattaactgtcaaataattaaattaaaaataaccaatttattaac

SEQ ID NO: 7839 - protein, 40 aa, Homo sapiens
MGPHTWRYSIIAKKKDNFIEPSCFTGNSASGNVGPFRVCH

SEQ ID NO: 7840 - DNA, 2326 bp, Homo sapiens
cggctagtatcgcgagatcaggaaggtggccgagtgtgtcgccgcggccatcaggcacttctccttcctgcccttgtatgaagaaggatgtgtttgcttccccttgtgccatgattgtaaatttcctgaggcctcctcagccctgcagaactggggttatagccatgtgactgatcttcgtccaagaatatgtaaagaaaaagtgttgagttggcttttagggctagagcaatgtatcttaggctcacttaaggaagctgtagagatgagcccaaggagggaaaccagaagagccccccaggctcaccagttgtttgttggctccctacaaacatgtcattcaagtggctaatcttacaacagcacaaattcatctaaccagaaagagaagaggaggctccaaaggcacttgactactgagcatcaccctggacgtgtacaagtctgcgtccttattgttttcttcattgggccgaactttctggtcctcatccaacagctcttctatcacgtgttcgaaagtgtcagccaatgatgtcaagcctcttgaacctgccttgggcccattcacgctctccagagtcccatgggtccgcacacctggagatactctattatagcaaagaagaaagataatttcattgagccatcctgttttacagtattgaattattaccacaaggtaccaaccatatatgcatacttaatagggtattttgtcaaaactatgcatgaaggtcatttgtttgagatgtcagaacattttcccgtgagaagatctcattgggcattgaaacagaaccacatgctcttcagaccagcaaccgcgactaccaaatactcctctgtcaactctacttgagtaagaacgctttcaattaaggcctaagtgtcaacatgcctttaaaaaaaatcgtggtgacacaaaatctttctttttagcacccaacagaatcccttcaaagcctcgtggtctgacaccctatgctacgtgacttgtgacccatccatttgtcatgttcttcgggaatgtggctaaggggctaagatgtgacttgaaaagaaaggtagaacaagatcatctcaaatttattatcaaggaatagttcagaaaacgacttcagaccacagagacagcagaacagatggtccggcatggatagagcatcagacactcacagactgtgccaacaagagccatcgagtcaaaacagccaaaggaaggagggtcatggaatgggttctctcacaccaaactgatgcccagaggccctcagcatgaataacaaaggcaaccagacccacaagccatactgagtggatacaaaacctatacctaggctgacatcccaaatgtgtgtggcaagttagatgatgatggcacaaaagacagaacaccttgcttctggccattgtcagctcttggaagagagcacacttttagaggagcagctgcaaggagcctgagaacaaaactggaaatgtctgttatgaaagccttcacaggaaattctgcaagtggcaacgtgggtccattccgtgtgtgtcactagagctggcgcaagcccatggccatggtgaggcagcgtttccactggaactaatctgatacctgcaccagctcttgcaactgtgcagtgttcccactgcaaactacggatggggtaaaagactgctcacctcctatttctcatctaatctcacacactctgtttgatgaggctatggagaaacaggtcttctcatacactaaaggtgggagtacaaacaattcaagccctgtgcaggacaattaggcaatacctatcaaaattatacatgatttttcctgctgacccagcaattccacttctgggaataattgacagatataggtgcatatgtacaaaatgatggaaagctctctggtatatattagtaagtgataaaacaaggtgtaaaatagtgtatatatggctactaccttttgttttaaaaatgggggaaaatggtggagcttgcggtgagccgagatcgtgccactgcactccagcctgggcgacagagcgagactccgtctcaaaaaaaaaacagggtggggtgggggggaaataatagtacatactcatatttacctgtatctatataaaacacactatcaaggattcacaagaaactaatacaaatgatcaccttatagatggtatgtattgggggatactgaggtgagcagggtataagtggggcaagacttttcagtgtaaacttcttttaaattttattttgatttttgaataatgtaaattaactgtcaaataattaaattaaaaataaccaatttattaac

SEQ ID NO: 7841 - protein, 91 aa, Homo sapiens
MGPHTWRYSIIAKKKDNFIEPSCFTVLNYYHKVPTIYAYLIGYFVKTMHEGHLFEMSEHFPVRRSHWALKQNHMLFRPATATTKYSSVNST

SEQ ID NO: 7842 - DNA, 1440 bp, Homo sapiens
ctagtatcgcgagatcaggaaggtggccgagtgtgtcgccgcggccatcaggcacttctccttcctgcccttgtatgaagaaggatgtgtttgcttccccttgtgccatgattgtaaatttcctgaggcctcctcagccctgcagaactggctagagcaatgtatcttaggctcacttaaggaagctgtagagatgagcccaaggagggaaaccagaagagccccccaggctcaccagttgtttgttggctccctacaaacatgtcattcaagtggctaatcttacaacagcacaaattcatctaaccagaaagagaagaggaggctccaaaggcacttgactactgagcatcaccctggacgtgtacaagtctgcgtccttattgttttcttcattgggccgaactttctggtcctcatccaacagctcttctatcacgtgttcgaaagtgtcagccaatgatgtcaagcctcttgaacctgccttgggcccattcacgctctccagagtcccatgggtccgcacacctggagatactctattatagcaaagaagaaagataatttcattgagccatcctgttttacaggaaattctgcaagtggcaacgtgggtccattccgtgtgtgtcactagagctggcgcaagcccatggccatggtgaggcagcgtttccactggaactaatctgatacctgcaccagctcttgcaactgtgcagtgttcccactgcaaactacggatggggattttccctcctggtgagtcaaaatgaacaagaaataccccaggacctcccttccctccttggccattaatgagatgaaggcaattaactcacatagtataaatgaatcatttgaggtgatgactgcattttaggcaaatgatgactttcttggttccattggtttgcaagtaaaagttacacacattgaaaagacactgaaacagatttcctaaatgcttcattttctggatgcaccaatgttgacctactatacatgttaaatggttttaaaatatcaccttaaaataaaggaaacttccagctactaactcagctctgaatgggctatgaaaggctccaaaggtatgtgaaaaattactgttattttgctttaaaaaatgtgatgtctaagagtgtctgcaatgttctaatgcttcaaaacatgtacgtaagccttgtttatctggaaatcatttctttctgcttatatcatttataaatagaaaatgttctgtaataacttaaaatagttccacatacataatgcttttagtgtcataatacttactactggtctatatttaccaacatttatcacattttacaaaatgaagtagaagaaaaaaaagacaacgactttatggccctggaattccagtaatggtgaccaacatgttttaaattccagtaaaggttatggttacatttc

SEQ ID NO: 7843 - protein, 40 aa, Homo sapiens; identical to SEQ ID NO: 7839

SEQ ID NO: 7844 - DNA, 1282 bp, Homo sapiens
ctagtatcgcgagatcaggaaggtggccgagtgtgtcgccgcggccatcaggcacttctccttcctgcccttgtatgaagaaggatgtgtttgcttccccttgtgccatgattgtaaatttcctgaggcctcctcagccctgcagaactggctagagcaatgtatcttaggctcacttaaggaagctgtagagatgagcccaaggagggaaaccagaagagccccccaggctcaccagttgtttgttggctccctacaaacatgtcattcaagtggctaatcttacaacagcacaaattcatctaaccagaaagagaagaggaggctccaaaggcacttgactactgagcatcaccctggacgtgtacaagtctgcgtccttattgttttcttcattgggccgaactttctggtcctcatccaacagctcttctatcacgtgttcgaaagtgtcagccaatgatgtcaagcctcttgaacctgccttgggcccattcacgctctccagagtcccatgggtccgcacacctggagatactctattatagcaaagaagaaagataatttcattgagccatcctgttttacaggattttccctcctggtgagtcaaaatgaacaagaaataccccaggacctcccttccctccttggccattaatgagatgaaggcaattaactcacatagtataaatgaatcatttgaggtgatgactgcattttaggcaaatgatgactttcttggttccattggtttgcaagtaaaagttacacacattgaaaagacactgaaacagatttcctaaatgcttcattttctggatgcaccaatgttgacctactatacatgttaaatggttttaaaatatcaccttaaaataaaggaaacttccagctactaactcagctctgaatgggctatgaaaggctccaaaggtatgtgaaaaattactgttattttgctttaaaaaatgtgatgtctaagagtgtctgcaatgttctaatgcttcaaaacatgtacgtaagccttgtttatctggaaatcatttctttctgcttatatcatttataaatagaaaatgttctgtaataacttaaaatagttccacatacataatgcttttagtgtcataatacttactactggtctatatttaccaacatttatcacattttacaaaatgaagtagaagaaaaaaaagacaacgactttatggccctggaattccagtaatggtgaccaacatgttttaaattccagtaaaggttatggttacatttc

SEQ ID NO: 7845 - protein, 48 aa, Homo sapiens
MGPHTWRYSIIAKKKDNFIEPSCFTGFSLLVSQNEQEIPQDLPSLLGH

SEQ ID NO: 7846 - DNA, 2039 bp, Homo sapiens
ctagtatcgcgagatcaggaaggtggccgagtgtgtcgccgcggccatcaggcacttctccttcctgcccttgtatgaagaaggatgtgtttgcttccccttgtgccatgattgtaaatttcctgaggcctcctcagccctgcagaactggctagagcaatgtatcttaggctcacttaaggaagctgtagagatgagcccaaggagggaaaccagaagagccccccaggctcaccagttgtttgttggctccctacaaacatgtcattcaagtggctaatcttacaacagcacaaattcatctaaccagaaagagaagaggaggctccaaaggcacttgactactgagcatcaccctggacgtgtacaagtctgcgtccttattgttttcttcattgggccgaactttctggtcctcatccaacagctcttctatcacgtgttcgaaagtgtcagccaatgatgtcaagcctcttgaacctgccttgggcccattcacgctctccagagtcccatgggtccgcacacctggagatactctattatagcaaagaagaaagataatttcattgagccatcctgttttacagcacccaacagaatcccttcaaagcctcgtggtctgacaccctatgctacgtgacttgtgacccatccatttgtcatgttcttcgggaatgtggctaaggggctaagatgtgacttgaaaagaaaggtagaacaagatcatctcaaatttattatcaaggaatagttcagaaaacgacttcagaccacagagacagcagaacagatggtccggcatggatagagcatcagacactcacagactgtgccaacaagagccatcgagtcaaaacagccaaaggaaggagggtcatggaatgggttctctcacaccaaactgatgcccagaggccctcagcatgaataacaaaggcaaccagacccacaagccatactgagtggatacaaaacctatacctaggctgacatcccaaatgtgtgtggcaagttagatgatgatggcacaaaagacagaacaccttgcttctggccattgtcagctcttggaagagagcacacttttagaggagcagctgcaaggagcctgagaacaaaactggaaatgtctgttatgaaagccttcacaggaaattctgcaagtggcaacgtgggtccattccgtgtgtgtcactagagctggcgcaagcccatggccatggtgaggcagcgtttccactggaactaatctgatacctgcaccagctcttgcaactgtgcagtgttcccactgcaaactacggatgggagaggataaagaacttcaatctttaaaaaagagaggattttccctcctggtgagtcaaaatgaacaagaaataccccaggacctcccttccctccttggccattaatgagatgaaggcaattaactcacatagtataaatgaatcatttgaggtgatgactgcattttaggcaaatgatgactttcttggttccattggtttgcaagtaaaagttacacacattgaaaagacactgaaacagatttcctaaatgcttcattttctggatgcaccaatgttgacctactatacatgttaaatggttttaaaatatcaccttaaaataaaggaaacttccagctactaactcagctctgaatgggctatgaaaggctccaaaggtatgtgaaaaattactgttattttgctttaaaaaatgtgatgtctaagagtgtctgcaatgttctaatgcttcaaaacatgtacgtaagccttgtttatctggaaatcatttctttctgcttatatcatttataaatagaaaatgttctgtaataacttaaaatagttccacatacataatgcttttagtgtcataatacttactactggtctatatttaccaacatttatcacattttacaaaatgaagtagaagaaaaaaaagacaacgactttatggccctggaattccagtaatggtgaccaacatgttttaaattccagtaaaggttatggttacatttc

SEQ ID NO: 7847 - protein, 42 aa, Homo sapiens
MGPHTWRYSIIAKKKDNFIEPSCFTAPNRIPSKPRGLTPYAT

SEQ ID NO: 7848 - DNA, 3941 bp, Homo sapiens
agtggacttacaagtccgaagccaatgtagcttggaaaacttgggaggcggaattcctaccgctgggaactgaaagggtctgcgacactctcgggcaggccgaacccacatctctacccatcctgcgcccctcttctgaagcgccctccagggaagttaagagttttgactttcggggagtggttgggatgtacgtgggggattcttgactcgggttagtctctggggatgcagagccgggaagaggaatggttccaccaggtgagaagagtgatgaccatccttttccttactatggttatttcatactttggttgcatgaaggctgcccccatgaaagaagcaaacatccgaggacaaggtggcttggcctacccaggtgtgcggacccatgggactctggagagcgtgaatgggcccaaggcaggttcaagaggcttgacatcattggctgacactttcgaacacgtgatagaagagctgttggatgaggaccagaaagttcggcccaatgaagaaaacaataaggacgcagacttgtacacgtccagggtgatgctcagtagtcaagtgcctttggagcctcctcttctctttctgctggaggaatacaaaaattacctagatgctgcaaacatgtccatgagggtccggcgccactctgaccctgcccgccgaggggagctgagcgtgtgtgacagtattagtgagtgggtaacggcagcagacaaaaagactgcagtggacatgtcgggcgggacggtcacagtccttgaaaaggtccctgtatcaaaaggccaactgaagcaatacttctacgagaccaagtgcaatcccatgggttacacaaaagaaggctgcaggggcatagacaaaaggcattggaactcccagtgccgaactacccagtcgtacgtgcgggcccttaccatggatagcaaaaagagaattggctggcgattcataaggatagacacttcttgtgtatgtacattgaccattaaaaggggaagatagtggatttatgttgtatagattagattatattgagacaaaaattatctatttgtatatatacataacagggtaaattattcagttaagaaaaaaataattttatgaactgcatgtataaatgaagtttatacagtacagtggttctacaatctatttattggacatgtccatgaccagaagggaaacagtcatttgcgcacaacttaaaaagtctgcattacattccttgataatgttgtggtttgttgccgttgccaagaactgaaaacataaaaagttaaaaaaaataataaattgcatgctgctttaattgtgaattgataataaactgtcctctttcagaaaacagaaaaaaaacacacacacacacaacaaaaatttgaaccaaaacattccgtttacattttagacagtaagtatcttcgttcttgttagtactatatctgttttactgcttttaacttctgatagcgttggaattaaaacaatgtcaaggtgctgttgtcattgctttactggcttaggggatgggggatggggggtatatttttgtttgttttgtgtttttttttcgtttgtttgttttgttttttagttcccacagggagtagagatggggaaagaattcctacaatatatattctggctgataaaagatacatttgtatgttgtgaagatgtttgcaatatcgatcagatgactagaaagtgaataaaaattaaggcaactgaacaaaaaaatgctcacactccacatcccgtgatgcacctcccaggccccgctcattctttgggcgttggtcagagtaagctgcttttgacggaaggacctatgtttgctcagaacacattctttccccccctccccctctggtctcctctttgttttgttttaaggaagaaaaatcagttgcgcgttctgaaatattttaccactgctgtgaacaagtgaacacattgtgtcacatcatgacactcgtataagcatggagaacagtgatttttttttagaacagaaaacaacaaaaaataaccccaaaatgaagattattttttatgaggagtgaacatttgggtaaatcatggctaagcttaaaaaaaactcatggtgaggcttaacaatgtcttgtaagcaaaaggtagagccctgtatcaacccagaaacacctagatcagaacaggaatccacattgccagtgacatgagactgaacagccaaatggaggctatgtggagttggcattgcatttaccggcagtgcgggaggaatttctgagtggccatcccaaggtctaggtggaggtggggcatggtatttgagacattccaaaacgaaggcctctgaaggacccttcagaggtggctctggaatgacatgtgtcaagctgcttggacctcgtgctttaagtgcctacattatctaactgtgctcaagaggttctcgactggaggaccacactcaagccgacttatgcccaccatcccacctctggataattttgcataaaattggattagcctggagcaggttgggagccaaatgtggcatttgtgatcatgagattgatgcaatgagatagaagatgtttgctacctgaacacttattgctttgaaactagacttgaggaaaccagggtttatcttttgagaacttttggtaagggaaaagggaacaggaaaagaaaccccaaactcaggccgaatgatcaaggggacccataggaaatcttgtccagagacaagacttcgggaaggtgtctggacattcagaacaccaagacttgaaggtgccttgctcaatggaagaggccaggacagagctgacaaaattttgctccccagtgaaggccacagcaaccttctgcccatcctgtctgttcatggagagggtccctgcctcacctctgccattttgggttaggagaagtcaagttgggagcctgaaatagtggttcttggaaaaatggatccccagtgaaaactagagctctaagcccattcagcccatttcacacctgaaaatgttagtgatcaccacttggaccagcatccttaagtatcagaaagccccaagcaattgctgcatcttagtagggtgagggataagcaaaagaggatgttcaccataacccaggaatgaagataccatcagcaaagaatttcaatttgttcagtctttcatttagagctagtctttcacagtaccatctgaatacctctttgaaagaaggaagactttacgtagtgtagatttgttttgtgttgtttgaaaatattatctttgtaattatttttaatatgtaaggaatgcttggaatatctgctgtatgtcaactttatgcagcttccttttgagggacaaatttaaaacaaacaaccccccatcacaaacttaaaggattgcaagggccagatctgttaagtggtttcataggagacacatccagcaattgtgtggtcagtggctcttttacccaataagatacatcacagtcacatgcttgatggtttatgttgacctaagatttattttgttaaaatctctctctgttgtgttcgttcttgttctgttttgttttgttttttaaagtcttgctgtggtctctttgtggcagaagtgtttcatgcatggcagcaggcctgttgcttttttatggcgattcccattgaaaatgtaagtaaatgtctgtggccttgttctctctatggtaaagatattattcaccatgtaaaacaaaaaacaatatttattgtattttagtatatttatataattatgttattgaaaaaaattggcattaaaacttaaccgcatcagaagcctattgtaaatacaagttctatttaagtgtactaattaacatataatatatgttttaaatatagaatttttaatgtttttaaatatattttcaaagtacat

SEQ ID NO: 7849 - protein, 262 aa, Homo sapiens
MQSREEEWFHQVRRVMTILFLTMVISYFGCMKAAPMKEANIRGQGGLAYPGVRTHGTLESVNGPKAGSRGLTSLADTFEHVIEELLDEDQKVRPNEENNKDADLYTSRVMLSSQVPLEPPLLFLLEEYKNYLDAANMSMRVRRHSDPARRGELSVCDSISEWVTAADKKTAVDMSGGTVTVLEKVPVSKGQLKQYFYETKCNPMGYTKEGCRGIDKRHWNSQCRTTQSYVRALTMDSKKRIGWRFIRIDTSCVCTLTIKRGR

SEQ ID NO: 7850 - DNA, 3971 bp, Homo sapiens
gctccgggtccccgacgctgccgccgccgcgcccgggcgcacccgcccgctcgctgtcccgcgcaccccgtagcgcctcgggctcccgggccggacagaggagccagcccggtgcgcccctccacctcctgctcggggggctttaatgagacacccaccgctgctgtggggccggcggggagcagcaccgcgacggggaccggggctgggcgctggagccagaatcggaaccacgatgtgactccgccgccggggacccgtgaggtttgtgtggaccccgagttccaccaggtgagaagagtgatgaccatccttttccttactatggttatttcatactttggttgcatgaaggctgcccccatgaaagaagcaaacatccgaggacaaggtggcttggcctacccaggtgtgcggacccatgggactctggagagcgtgaatgggcccaaggcaggttcaagaggcttgacatcattggctgacactttcgaacacgtgatagaagagctgttggatgaggaccagaaagttcggcccaatgaagaaaacaataaggacgcagacttgtacacgtccagggtgatgctcagtagtcaagtgcctttggagcctcctcttctctttctgctggaggaatacaaaaattacctagatgctgcaaacatgtccatgagggtccggcgccactctgaccctgcccgccgaggggagctgagcgtgtgtgacagtattagtgagtgggtaacggcagcagacaaaaagactgcagtggacatgtcgggcgggacggtcacagtccttgaaaaggtccctgtatcaaaaggccaactgaagcaatacttctacgagaccaagtgcaatcccatgggttacacaaaagaaggctgcaggggcatagacaaaaggcattggaactcccagtgccgaactacccagtcgtacgtgcgggcccttaccatggatagcaaaaagagaattggctggcgattcataaggatagacacttcttgtgtatgtacattgaccattaaaaggggaagatagtggatttatgttgtatagattagattatattgagacaaaaattatctatttgtatatatacataacagggtaaattattcagttaagaaaaaaataattttatgaactgcatgtataaatgaagtttatacagtacagtggttctacaatctatttattggacatgtccatgaccagaagggaaacagtcatttgcgcacaacttaaaaagtctgcattacattccttgataatgttgtggtttgttgccgttgccaagaactgaaaacataaaaagttaaaaaaaataataaattgcatgctgctttaattgtgaattgataataaactgtcctctttcagaaaacagaaaaaaaacacacacacacacaacaaaaatttgaaccaaaacattccgtttacattttagacagtaagtatcttcgttcttgttagtactatatctgttttactgcttttaacttctgatagcgttggaattaaaacaatgtcaaggtgctgttgtcattgctttactggcttaggggatgggggatggggggtatatttttgtttgttttgtgtttttttttcgtttgtttgttttgttttttagttcccacagggagtagagatggggaaagaattcctacaatatatattctggctgataaaagatacatttgtatgttgtgaagatgtttgcaatatcgatcagatgactagaaagtgaataaaaattaaggcaactgaacaaaaaaatgctcacactccacatcccgtgatgcacctcccaggccccgctcattctttgggcgttggtcagagtaagctgcttttgacggaaggacctatgtttgctcagaacacattctttccccccctccccctctggtctcctctttgttttgttttaaggaagaaaaatcagttgcgcgttctgaaatattttaccactgctgtgaacaagtgaacacattgtgtcacatcatgacactcgtataagcatggagaacagtgatttttttttagaacagaaaacaacaaaaaataaccccaaaatgaagattattttttatgaggagtgaacatttgggtaaatcatggctaagcttaaaaaaaactcatggtgaggcttaacaatgtcttgtaagcaaaaggtagagccctgtatcaacccagaaacacctagatcagaacaggaatccacattgccagtgacatgagactgaacagccaaatggaggctatgtggagttggcattgcatttaccggcagtgcgggaggaatttctgagtggccatcccaaggtctaggtggaggtggggcatggtatttgagacattccaaaacgaaggcctctgaaggacccttcagaggtggctctggaatgacatgtgtcaagctgcttggacctcgtgctttaagtgcctacattatctaactgtgctcaagaggttctcgactggaggaccacactcaagccgacttatgcccaccatcccacctctggataattttgcataaaattggattagcctggagcaggttgggagccaaatgtggcatttgtgatcatgagattgatgcaatgagatagaagatgtttgctacctgaacacttattgctttgaaactagacttgaggaaaccagggtttatcttttgagaacttttggtaagggaaaagggaacaggaaaagaaaccccaaactcaggccgaatgatcaaggggacccataggaaatcttgtccagagacaagacttcgggaaggtgtctggacattcagaacaccaagacttgaaggtgccttgctcaatggaagaggccaggacagagctgacaaaattttgctccccagtgaaggccacagcaaccttctgcccatcctgtctgttcatggagagggtccctgcctcacctctgccattttgggttaggagaagtcaagttgggagcctgaaatagtggttcttggaaaaatggatccccagtgaaaactagagctctaagcccattcagcccatttcacacctgaaaatgttagtgatcaccacttggaccagcatccttaagtatcagaaagccccaagcaattgctgcatcttagtagggtgagggataagcaaaagaggatgttcaccataacccaggaatgaagataccatcagcaaagaatttcaatttgttcagtctttcatttagagctagtctttcacagtaccatctgaatacctctttgaaagaaggaagactttacgtagtgtagatttgttttgtgttgtttgaaaatattatctttgtaattatttttaatatgtaaggaatgcttggaatatctgctgtatgtcaactttatgcagcttccttttgagggacaaatttaaaacaaacaaccccccatcacaaacttaaaggattgcaagggccagatctgttaagtggtttcataggagacacatccagcaattgtgtggtcagtggctcttttacccaataagatacatcacagtcacatgcttgatggtttatgttgacctaagatttattttgttaaaatctctctctgttgtgttcgttcttgttctgttttgttttgttttttaaagtcttgctgtggtctctttgtggcagaagtgtttcatgcatggcagcaggcctgttgcttttttatggcgattcccattgaaaatgtaagtaaatgtctgtggccttgttctctctatggtaaagatattattcaccatgtaaaacaaaaaacaatatttattgtattttagtatatttatataattatgttattgaaaaaaattggcattaaaacttaaccgcatcagaagcctattgtaaatacaagttctatttaagtgtactaattaacatataatatatgttttaaatatagaatttttaatgtttttaaatatattttcaaagtacat

SEQ ID NO: 7851 - protein, 247 aa, Homo sapiens
MTILFLTMVISYFGCMKAAPMKEANIRGQGGLAYPGVRTHGTLESVNGPKAGSRGLTSLADTFEHVIEELLDEDQKVRPNEENNKDADLYTSRVMLSSQVPLEPPLLFLLEEYKNYLDAANMSMRVRRHSDPARRGELSVCDSISEWVTAADKKTAVDMSGGTVTVLEKVPVSKGQLKQYFYETKCNPMGYTKEGCRGIDKRHWNSQCRTTQSYVRALTMDSKKRIGWRFIRIDTSCVCTLTIKRGR

SEQ ID NO: 7852 - DNA, 4021 bp, Homo sapiens
ctttcccattcaccgcggagagggctgctctcgctgccgctccccccggcgaactagcatgaaatctccctgcctctgccgagatcaaatggagcttctcgctgatggggtgcgagtattacctccgccatgcaatttccactatcaataatttaacttctttgctgcagaacagaaggagtacataccgggcaccaaagactcgcgccccctcccccctttaattaagcgaagggaacgtgaaaaaataatagagtgtgggagttttggggccgaagtctttcccggagcagctgccttgatggttactttgacaagtagtgactgaaaagttccaccaggtgagaagagtgatgaccatccttttccttactatggttatttcatactttggttgcatgaaggctgcccccatgaaagaagcaaacatccgaggacaaggtggcttggcctacccaggtgtgcggacccatgggactctggagagcgtgaatgggcccaaggcaggttcaagaggcttgacatcattggctgacactttcgaacacgtgatagaagagctgttggatgaggaccagaaagttcggcccaatgaagaaaacaataaggacgcagacttgtacacgtccagggtgatgctcagtagtcaagtgcctttggagcctcctcttctctttctgctggaggaatacaaaaattacctagatgctgcaaacatgtccatgagggtccggcgccactctgaccctgcccgccgaggggagctgagcgtgtgtgacagtattagtgagtgggtaacggcagcagacaaaaagactgcagtggacatgtcgggcgggacggtcacagtccttgaaaaggtccctgtatcaaaaggccaactgaagcaatacttctacgagaccaagtgcaatcccatgggttacacaaaagaaggctgcaggggcatagacaaaaggcattggaactcccagtgccgaactacccagtcgtacgtgcgggcccttaccatggatagcaaaaagagaattggctggcgattcataaggatagacacttcttgtgtatgtacattgaccattaaaaggggaagatagtggatttatgttgtatagattagattatattgagacaaaaattatctatttgtatatatacataacagggtaaattattcagttaagaaaaaaataattttatgaactgcatgtataaatgaagtttatacagtacagtggttctacaatctatttattggacatgtccatgaccagaagggaaacagtcatttgcgcacaacttaaaaagtctgcattacattccttgataatgttgtggtttgttgccgttgccaagaactgaaaacataaaaagttaaaaaaaataataaattgcatgctgctttaattgtgaattgataataaactgtcctctttcagaaaacagaaaaaaaacacacacacacacaacaaaaatttgaaccaaaacattccgtttacattttagacagtaagtatcttcgttcttgttagtactatatctgttttactgcttttaacttctgatagcgttggaattaaaacaatgtcaaggtgctgttgtcattgctttactggcttaggggatgggggatggggggtatatttttgtttgttttgtgtttttttttcgtttgtttgttttgttttttagttcccacagggagtagagatggggaaagaattcctacaatatatattctggctgataaaagatacatttgtatgttgtgaagatgtttgcaatatcgatcagatgactagaaagtgaataaaaattaaggcaactgaacaaaaaaatgctcacactccacatcccgtgatgcacctcccaggccccgctcattctttgggcgttggtcagagtaagctgcttttgacggaaggacctatgtttgctcagaacacattctttccccccctccccctctggtctcctctttgttttgttttaaggaagaaaaatcagttgcgcgttctgaaatattttaccactgctgtgaacaagtgaacacattgtgtcacatcatgacactcgtataagcatggagaacagtgatttttttttagaacagaaaacaacaaaaaataaccccaaaatgaagattattttttatgaggagtgaacatttgggtaaatcatggctaagcttaaaaaaaactcatggtgaggcttaacaatgtcttgtaagcaaaaggtagagccctgtatcaacccagaaacacctagatcagaacaggaatccacattgccagtgacatgagactgaacagccaaatggaggctatgtggagttggcattgcatttaccggcagtgcgggaggaatttctgagtggccatcccaaggtctaggtggaggtggggcatggtatttgagacattccaaaacgaaggcctctgaaggacccttcagaggtggctctggaatgacatgtgtcaagctgcttggacctcgtgctttaagtgcctacattatctaactgtgctcaagaggttctcgactggaggaccacactcaagccgacttatgcccaccatcccacctctggataattttgcataaaattggattagcctggagcaggttgggagccaaatgtggcatttgtgatcatgagattgatgcaatgagatagaagatgtttgctacctgaacacttattgctttgaaactagacttgaggaaaccagggtttatcttttgagaacttttggtaagggaaaagggaacaggaaaagaaaccccaaactcaggccgaatgatcaaggggacccataggaaatcttgtccagagacaagacttcgggaaggtgtctggacattcagaacaccaagacttgaaggtgccttgctcaatggaagaggccaggacagagctgacaaaattttgctccccagtgaaggccacagcaaccttctgcccatcctgtctgttcatggagagggtccctgcctcacctctgccattttgggttaggagaagtcaagttgggagcctgaaatagtggttcttggaaaaatggatccccagtgaaaactagagctctaagcccattcagcccatttcacacctgaaaatgttagtgatcaccacttggaccagcatccttaagtatcagaaagccccaagcaattgctgcatcttagtagggtgagggataagcaaaagaggatgttcaccataacccaggaatgaagataccatcagcaaagaatttcaatttgttcagtctttcatttagagctagtctttcacagtaccatctgaatacctctttgaaagaaggaagactttacgtagtgtagatttgttttgtgttgtttgaaaatattatctttgtaattatttttaatatgtaaggaatgcttggaatatctgctgtatgtcaactttatgcagcttccttttgagggacaaatttaaaacaaacaaccccccatcacaaacttaaaggattgcaagggccagatctgttaagtggtttcataggagacacatccagcaattgtgtggtcagtggctcttttacccaataagatacatcacagtcacatgcttgatggtttatgttgacctaagatttattttgttaaaatctctctctgttgtgttcgttcttgttctgttttgttttgttttttaaagtcttgctgtggtctctttgtggcagaagtgtttcatgcatggcagcaggcctgttgcttttttatggcgattcccattgaaaatgtaagtaaatgtctgtggccttgttctctctatggtaaagatattattcaccatgtaaaacaaaaaacaatatttattgtattttagtatatttatataattatgttattgaaaaaaattggcattaaaacttaaccgcatcagaagcctattgtaaatacaagttctatttaagtgtactaattaacatataatatatgttttaaatatagaatttttaatgtttttaaatatattttcaaagtacat

SEQ ID NO: 7853 - protein, 247 aa, Homo sapiens; identical to SEQ ID NO: 7851

SEQ ID NO: 7854 - DNA, 3825 bp, Homo sapiens
tttttttttcccttctgtcctccctccccgcgagtttcgggcgctggcttagagggttcccgctttctcaagggaaggggagctgccgagaccgcgctccgctccccagccgggccggatgcctcactgagcccagttccaccaggtgagaagagtgatgaccatccttttccttactatggttatttcatactttggttgcatgaaggctgcccccatgaaagaagcaaacatccgaggacaaggtggcttggcctacccaggtgtgcggacccatgggactctggagagcgtgaatgggcccaaggcaggttcaagaggcttgacatcattggctgacactttcgaacacgtgatagaagagctgttggatgaggaccagaaagttcggcccaatgaagaaaacaataaggacgcagacttgtacacgtccagggtgatgctcagtagtcaagtgcctttggagcctcctcttctctttctgctggaggaatacaaaaattacctagatgctgcaaacatgtccatgagggtccggcgccactctgaccctgcccgccgaggggagctgagcgtgtgtgacagtattagtgagtgggtaacggcagcagacaaaaagactgcagtggacatgtcgggcgggacggtcacagtccttgaaaaggtccctgtatcaaaaggccaactgaagcaatacttctacgagaccaagtgcaatcccatgggttacacaaaagaaggctgcaggggcatagacaaaaggcattggaactcccagtgccgaactacccagtcgtacgtgcgggcccttaccatggatagcaaaaagagaattggctggcgattcataaggatagacacttcttgtgtatgtacattgaccattaaaaggggaagatagtggatttatgttgtatagattagattatattgagacaaaaattatctatttgtatatatacataacagggtaaattattcagttaagaaaaaaataattttatgaactgcatgtataaatgaagtttatacagtacagtggttctacaatctatttattggacatgtccatgaccagaagggaaacagtcatttgcgcacaacttaaaaagtctgcattacattccttgataatgttgtggtttgttgccgttgccaagaactgaaaacataaaaagttaaaaaaaataataaattgcatgctgctttaattgtgaattgataataaactgtcctctttcagaaaacagaaaaaaaacacacacacacacaacaaaaatttgaaccaaaacattccgtttacattttagacagtaagtatcttcgttcttgttagtactatatctgttttactgcttttaacttctgatagcgttggaattaaaacaatgtcaaggtgctgttgtcattgctttactggcttaggggatgggggatggggggtatatttttgtttgttttgtgtttttttttcgtttgtttgttttgttttttagttcccacagggagtagagatggggaaagaattcctacaatatatattctggctgataaaagatacatttgtatgttgtgaagatgtttgcaatatcgatcagatgactagaaagtgaataaaaattaaggcaactgaacaaaaaaatgctcacactccacatcccgtgatgcacctcccaggccccgctcattctttgggcgttggtcagagtaagctgcttttgacggaaggacctatgtttgctcagaacacattctttccccccctccccctctggtctcctctttgttttgttttaaggaagaaaaatcagttgcgcgttctgaaatattttaccactgctgtgaacaagtgaacacattgtgtcacatcatgacactcgtataagcatggagaacagtgatttttttttagaacagaaaacaacaaaaaataaccccaaaatgaagattattttttatgaggagtgaacatttgggtaaatcatggctaagcttaaaaaaaactcatggtgaggcttaacaatgtcttgtaagcaaaaggtagagccctgtatcaacccagaaacacctagatcagaacaggaatccacattgccagtgacatgagactgaacagccaaatggaggctatgtggagttggcattgcatttaccggcagtgcgggaggaatttctgagtggccatcccaaggtctaggtggaggtggggcatggtatttgagacattccaaaacgaaggcctctgaaggacccttcagaggtggctctggaatgacatgtgtcaagctgcttggacctcgtgctttaagtgcctacattatctaactgtgctcaagaggttctcgactggaggaccacactcaagccgacttatgcccaccatcccacctctggataattttgcataaaattggattagcctggagcaggttgggagccaaatgtggcatttgtgatcatgagattgatgcaatgagatagaagatgtttgctacctgaacacttattgctttgaaactagacttgaggaaaccagggtttatcttttgagaacttttggtaagggaaaagggaacaggaaaagaaaccccaaactcaggccgaatgatcaaggggacccataggaaatcttgtccagagacaagacttcgggaaggtgtctggacattcagaacaccaagacttgaaggtgccttgctcaatggaagaggccaggacagagctgacaaaattttgctccccagtgaaggccacagcaaccttctgcccatcctgtctgttcatggagagggtccctgcctcacctctgccattttgggttaggagaagtcaagttgggagcctgaaatagtggttcttggaaaaatggatccccagtgaaaactagagctctaagcccattcagcccatttcacacctgaaaatgttagtgatcaccacttggaccagcatccttaagtatcagaaagccccaagcaattgctgcatcttagtagggtgagggataagcaaaagaggatgttcaccataacccaggaatgaagataccatcagcaaagaatttcaatttgttcagtctttcatttagagctagtctttcacagtaccatctgaatacctctttgaaagaaggaagactttacgtagtgtagatttgttttgtgttgtttgaaaatattatctttgtaattatttttaatatgtaaggaatgcttggaatatctgctgtatgtcaactttatgcagcttccttttgagggacaaatttaaaacaaacaaccccccatcacaaacttaaaggattgcaagggccagatctgttaagtggtttcataggagacacatccagcaattgtgtggtcagtggctcttttacccaataagatacatcacagtcacatgcttgatggtttatgttgacctaagatttattttgttaaaatctctctctgttgtgttcgttcttgttctgttttgttttgttttttaaagtcttgctgtggtctctttgtggcagaagtgtttcatgcatggcagcaggcctgttgcttttttatggcgattcccattgaaaatgtaagtaaatgtctgtggccttgttctctctatggtaaagatattattcaccatgtaaaacaaaaaacaatatttattgtattttagtatatttatataattatgttattgaaaaaaattggcattaaaacttaaccgcatcagaagcctattgtaaatacaagttctatttaagtgtactaattaacatataatatatgttttaaatatagaatttttaatgtttttaaatatattttcaaagtacat

SEQ ID NO: 7855 - protein, 247 aa, Homo sapiens; identical to SEQ ID NO: 7851

SEQ ID NO: 7856 - DNA, 3769 bp, Homo sapiens
gtgtgtaatccgggcgataggagtccattcagcaccttggacagagccaacggatttgtccgaggtggcggtacccccagttccaccaggtgagaagagtgatgaccatccttttccttactatggttatttcatactttggttgcatgaaggctgcccccatgaaagaagcaaacatccgaggacaaggtggcttggcctacccaggtgtgcggacccatgggactctggagagcgtgaatgggcccaaggcaggttcaagaggcttgacatcattggctgacactttcgaacacgtgatagaagagctgttggatgaggaccagaaagttcggcccaatgaagaaaacaataaggacgcagacttgtacacgtccagggtgatgctcagtagtcaagtgcctttggagcctcctcttctctttctgctggaggaatacaaaaattacctagatgctgcaaacatgtccatgagggtccggcgccactctgaccctgcccgccgaggggagctgagcgtgtgtgacagtattagtgagtgggtaacggcagcagacaaaaagactgcagtggacatgtcgggcgggacggtcacagtccttgaaaaggtccctgtatcaaaaggccaactgaagcaatacttctacgagaccaagtgcaatcccatgggttacacaaaagaaggctgcaggggcatagacaaaaggcattggaactcccagtgccgaactacccagtcgtacgtgcgggcccttaccatggatagcaaaaagagaattggctggcgattcataaggatagacacttcttgtgtatgtacattgaccattaaaaggggaagatagtggatttatgttgtatagattagattatattgagacaaaaattatctatttgtatatatacataacagggtaaattattcagttaagaaaaaaataattttatgaactgcatgtataaatgaagtttatacagtacagtggttctacaatctatttattggacatgtccatgaccagaagggaaacagtcatttgcgcacaacttaaaaagtctgcattacattccttgataatgttgtggtttgttgccgttgccaagaactgaaaacataaaaagttaaaaaaaataataaattgcatgctgctttaattgtgaattgataataaactgtcctctttcagaaaacagaaaaaaaacacacacacacacaacaaaaatttgaaccaaaacattccgtttacattttagacagtaagtatcttcgttcttgttagtactatatctgttttactgcttttaacttctgatagcgttggaattaaaacaatgtcaaggtgctgttgtcattgctttactggcttaggggatgggggatggggggtatatttttgtttgttttgtgtttttttttcgtttgtttgttttgttttttagttcccacagggagtagagatggggaaagaattcctacaatatatattctggctgataaaagatacatttgtatgttgtgaagatgtttgcaatatcgatcagatgactagaaagtgaataaaaattaaggcaactgaacaaaaaaatgctcacactccacatcccgtgatgcacctcccaggccccgctcattctttgggcgttggtcagagtaagctgcttttgacggaaggacctatgtttgctcagaacacattctttccccccctccccctctggtctcctctttgttttgttttaaggaagaaaaatcagttgcgcgttctgaaatattttaccactgctgtgaacaagtgaacacattgtgtcacatcatgacactcgtataagcatggagaacagtgatttttttttagaacagaaaacaacaaaaaataaccccaaaatgaagattattttttatgaggagtgaacatttgggtaaatcatggctaagcttaaaaaaaactcatggtgaggcttaacaatgtcttgtaagcaaaaggtagagccctgtatcaacccagaaacacctagatcagaacaggaatccacattgccagtgacatgagactgaacagccaaatggaggctatgtggagttggcattgcatttaccggcagtgcgggaggaatttctgagtggccatcccaaggtctaggtggaggtggggcatggtatttgagacattccaaaacgaaggcctctgaaggacccttcagaggtggctctggaatgacatgtgtcaagctgcttggacctcgtgctttaagtgcctacattatctaactgtgctcaagaggttctcgactggaggaccacactcaagccgacttatgcccaccatcccacctctggataattttgcataaaattggattagcctggagcaggttgggagccaaatgtggcatttgtgatcatgagattgatgcaatgagatagaagatgtttgctacctgaacacttattgctttgaaactagacttgaggaaaccagggtttatcttttgagaacttttggtaagggaaaagggaacaggaaaagaaaccccaaactcaggccgaatgatcaaggggacccataggaaatcttgtccagagacaagacttcgggaaggtgtctggacattcagaacaccaagacttgaaggtgccttgctcaatggaagaggccaggacagagctgacaaaattttgctccccagtgaaggccacagcaaccttctgcccatcctgtctgttcatggagagggtccctgcctcacctctgccattttgggttaggagaagtcaagttgggagcctgaaatagtggttcttggaaaaatggatccccagtgaaaactagagctctaagcccattcagcccatttcacacctgaaaatgttagtgatcaccacttggaccagcatccttaagtatcagaaagccccaagcaattgctgcatcttagtagggtgagggataagcaaaagaggatgttcaccataacccaggaatgaagataccatcagcaaagaatttcaatttgttcagtctttcatttagagctagtctttcacagtaccatctgaatacctctttgaaagaaggaagactttacgtagtgtagatttgttttgtgttgtttgaaaatattatctttgtaattatttttaatatgtaaggaatgcttggaatatctgctgtatgtcaactttatgcagcttccttttgagggacaaatttaaaacaaacaaccccccatcacaaacttaaaggattgcaagggccagatctgttaagtggtttcataggagacacatccagcaattgtgtggtcagtggctcttttacccaataagatacatcacagtcacatgcttgatggtttatgttgacctaagatttattttgttaaaatctctctctgttgtgttcgttcttgttctgttttgttttgttttttaaagtcttgctgtggtctctttgtggcagaagtgtttcatgcatggcagcaggcctgttgcttttttatggcgattcccattgaaaatgtaagtaaatgtctgtggccttgttctctctatggtaaagatattattcaccatgtaaaacaaaaaacaatatttattgtattttagtatatttatataattatgttattgaaaaaaattggcattaaaacttaaccgcatcagaagcctattgtaaatacaagttctatttaagtgtactaattaacatataatatatgttttaaatatagaatttttaatgtttttaaatatattttcaaagtacat

SEQ ID NO: 7857 - protein, 247 aa, Homo sapiens; identical to SEQ ID NO: 7851

SEQ ID NO: 7858 - DNA, 3984 bp, Homo sapiens
gtgtgtaatccgggcgataggagtccattcagcaccttggacagagccaacggatttgtccgaggtggcggtacccccaggtagtcttcttggccccgctgtaaagccaaccctgtgtcgcccttaaaaagcgtcttttctgaggttcggctcacactgagatcggggctggagagagagtcagattttggagcggagcgtttggaaagcgagccccagtttggtcccctcattgagctcgctgaagttggcttcctagcggtgtaggctggaatagactcttggcaagctccggttccaccaggtgagaagagtgatgaccatccttttccttactatggttatttcatactttggttgcatgaaggctgcccccatgaaagaagcaaacatccgaggacaaggtggcttggcctacccaggtgtgcggacccatgggactctggagagcgtgaatgggcccaaggcaggttcaagaggcttgacatcattggctgacactttcgaacacgtgatagaagagctgttggatgaggaccagaaagttcggcccaatgaagaaaacaataaggacgcagacttgtacacgtccagggtgatgctcagtagtcaagtgcctttggagcctcctcttctctttctgctggaggaatacaaaaattacctagatgctgcaaacatgtccatgagggtccggcgccactctgaccctgcccgccgaggggagctgagcgtgtgtgacagtattagtgagtgggtaacggcagcagacaaaaagactgcagtggacatgtcgggcgggacggtcacagtccttgaaaaggtccctgtatcaaaaggccaactgaagcaatacttctacgagaccaagtgcaatcccatgggttacacaaaagaaggctgcaggggcatagacaaaaggcattggaactcccagtgccgaactacccagtcgtacgtgcgggcccttaccatggatagcaaaaagagaattggctggcgattcataaggatagacacttcttgtgtatgtacattgaccattaaaaggggaagatagtggatttatgttgtatagattagattatattgagacaaaaattatctatttgtatatatacataacagggtaaattattcagttaagaaaaaaataattttatgaactgcatgtataaatgaagtttatacagtacagtggttctacaatctatttattggacatgtccatgaccagaagggaaacagtcatttgcgcacaacttaaaaagtctgcattacattccttgataatgttgtggtttgttgccgttgccaagaactgaaaacataaaaagttaaaaaaaataataaattgcatgctgctttaattgtgaattgataataaactgtcctctttcagaaaacagaaaaaaaacacacacacacacaacaaaaatttgaaccaaaacattccgtttacattttagacagtaagtatcttcgttcttgttagtactatatctgttttactgcttttaacttctgatagcgttggaattaaaacaatgtcaaggtgctgttgtcattgctttactggcttaggggatgggggatggggggtatatttttgtttgttttgtgtttttttttcgtttgtttgttttgttttttagttcccacagggagtagagatggggaaagaattcctacaatatatattctggctgataaaagatacatttgtatgttgtgaagatgtttgcaatatcgatcagatgactagaaagtgaataaaaattaaggcaactgaacaaaaaaatgctcacactccacatcccgtgatgcacctcccaggccccgctcattctttgggcgttggtcagagtaagctgcttttgacggaaggacctatgtttgctcagaacacattctttccccccctccccctctggtctcctctttgttttgttttaaggaagaaaaatcagttgcgcgttctgaaatattttaccactgctgtgaacaagtgaacacattgtgtcacatcatgacactcgtataagcatggagaacagtgatttttttttagaacagaaaacaacaaaaaataaccccaaaatgaagattattttttatgaggagtgaacatttgggtaaatcatggctaagcttaaaaaaaactcatggtgaggcttaacaatgtcttgtaagcaaaaggtagagccctgtatcaacccagaaacacctagatcagaacaggaatccacattgccagtgacatgagactgaacagccaaatggaggctatgtggagttggcattgcatttaccggcagtgcgggaggaatttctgagtggccatcccaaggtctaggtggaggtggggcatggtatttgagacattccaaaacgaaggcctctgaaggacccttcagaggtggctctggaatgacatgtgtcaagctgcttggacctcgtgctttaagtgcctacattatctaactgtgctcaagaggttctcgactggaggaccacactcaagccgacttatgcccaccatcccacctctggataattttgcataaaattggattagcctggagcaggttgggagccaaatgtggcatttgtgatcatgagattgatgcaatgagatagaagatgtttgctacctgaacacttattgctttgaaactagacttgaggaaaccagggtttatcttttgagaacttttggtaagggaaaagggaacaggaaaagaaaccccaaactcaggccgaatgatcaaggggacccataggaaatcttgtccagagacaagacttcgggaaggtgtctggacattcagaacaccaagacttgaaggtgccttgctcaatggaagaggccaggacagagctgacaaaattttgctccccagtgaaggccacagcaaccttctgcccatcctgtctgttcatggagagggtccctgcctcacctctgccattttgggttaggagaagtcaagttgggagcctgaaatagtggttcttggaaaaatggatccccagtgaaaactagagctctaagcccattcagcccatttcacacctgaaaatgttagtgatcaccacttggaccagcatccttaagtatcagaaagccccaagcaattgctgcatcttagtagggtgagggataagcaaaagaggatgttcaccataacccaggaatgaagataccatcagcaaagaatttcaatttgttcagtctttcatttagagctagtctttcacagtaccatctgaatacctctttgaaagaaggaagactttacgtagtgtagatttgttttgtgttgtttgaaaatattatctttgtaattatttttaatatgtaaggaatgcttggaatatctgctgtatgtcaactttatgcagcttccttttgagggacaaatttaaaacaaacaaccccccatcacaaacttaaaggattgcaagggccagatctgttaagtggtttcataggagacacatccagcaattgtgtggtcagtggctcttttacccaataagatacatcacagtcacatgcttgatggtttatgttgacctaagatttattttgttaaaatctctctctgttgtgttcgttcttgttctgttttgttttgttttttaaagtcttgctgtggtctctttgtggcagaagtgtttcatgcatggcagcaggcctgttgcttttttatggcgattcccattgaaaatgtaagtaaatgtctgtggccttgttctctctatggtaaagatattattcaccatgtaaaacaaaaaacaatatttattgtattttagtatatttatataattatgttattgaaaaaaattggcattaaaacttaaccgcatcagaagcctattgtaaatacaagttctatttaagtgtactaattaacatataatatatgttttaaatatagaatttttaatgtttttaaatatattttcaaagtacat

SEQ ID NO: 7859 - protein, 247 aa, Homo sapiens; identical to SEQ ID NO: 7851

SEQ ID NO: 7860 - DNA, 4067 bp, Homo sapiens
gtgtgtaatccgggcgataggagtccattcagcaccttggacagagccaacggatttgtccgaggtggcggtacccccaggtagtcttcttggccccgctgtaaagccaaccctgtgtcgcccttaaaaagcgtcttttctgaggttcggctcacactgagatcggggctggagagagagtcagattttggagcggagcgtttggaaagcgagccccagtttggtcccctcattgagctcgctgaagttggcttcctagcggtgtaggctggaatagactcttggcaagctccgggttggtatactgggttaactttgggaaatgcaagtgtttatctccaggatctagccaccggggtggtgtaagccgcaaagaagttccaccaggtgagaagagtgatgaccatccttttccttactatggttatttcatactttggttgcatgaaggctgcccccatgaaagaagcaaacatccgaggacaaggtggcttggcctacccaggtgtgcggacccatgggactctggagagcgtgaatgggcccaaggcaggttcaagaggcttgacatcattggctgacactttcgaacacgtgatagaagagctgttggatgaggaccagaaagttcggcccaatgaagaaaacaataaggacgcagacttgtacacgtccagggtgatgctcagtagtcaagtgcctttggagcctcctcttctctttctgctggaggaatacaaaaattacctagatgctgcaaacatgtccatgagggtccggcgccactctgaccctgcccgccgaggggagctgagcgtgtgtgacagtattagtgagtgggtaacggcagcagacaaaaagactgcagtggacatgtcgggcgggacggtcacagtccttgaaaaggtccctgtatcaaaaggccaactgaagcaatacttctacgagaccaagtgcaatcccatgggttacacaaaagaaggctgcaggggcatagacaaaaggcattggaactcccagtgccgaactacccagtcgtacgtgcgggcccttaccatggatagcaaaaagagaattggctggcgattcataaggatagacacttcttgtgtatgtacattgaccattaaaaggggaagatagtggatttatgttgtatagattagattatattgagacaaaaattatctatttgtatatatacataacagggtaaattattcagttaagaaaaaaataattttatgaactgcatgtataaatgaagtttatacagtacagtggttctacaatctatttattggacatgtccatgaccagaagggaaacagtcatttgcgcacaacttaaaaagtctgcattacattccttgataatgttgtggtttgttgccgttgccaagaactgaaaacataaaaagttaaaaaaaataataaattgcatgctgctttaattgtgaattgataataaactgtcctctttcagaaaacagaaaaaaaacacacacacacacaacaaaaatttgaaccaaaacattccgtttacattttagacagtaagtatcttcgttcttgttagtactatatctgttttactgcttttaacttctgatagcgttggaattaaaacaatgtcaaggtgctgttgtcattgctttactggcttaggggatgggggatggggggtatatttttgtttgttttgtgtttttttttcgtttgtttgttttgttttttagttcccacagggagtagagatggggaaagaattcctacaatatatattctggctgataaaagatacatttgtatgttgtgaagatgtttgcaatatcgatcagatgactagaaagtgaataaaaattaaggcaactgaacaaaaaaatgctcacactccacatcccgtgatgcacctcccaggccccgctcattctttgggcgttggtcagagtaagctgcttttgacggaaggacctatgtttgctcagaacacattctttccccccctccccctctggtctcctctttgttttgttttaaggaagaaaaatcagttgcgcgttctgaaatattttaccactgctgtgaacaagtgaacacattgtgtcacatcatgacactcgtataagcatggagaacagtgatttttttttagaacagaaaacaacaaaaaataaccccaaaatgaagattattttttatgaggagtgaacatttgggtaaatcatggctaagcttaaaaaaaactcatggtgaggcttaacaatgtcttgtaagcaaaaggtagagccctgtatcaacccagaaacacctagatcagaacaggaatccacattgccagtgacatgagactgaacagccaaatggaggctatgtggagttggcattgcatttaccggcagtgcgggaggaatttctgagtggccatcccaaggtctaggtggaggtggggcatggtatttgagacattccaaaacgaaggcctctgaaggacccttcagaggtggctctggaatgacatgtgtcaagctgcttggacctcgtgctttaagtgcctacattatctaactgtgctcaagaggttctcgactggaggaccacactcaagccgacttatgcccaccatcccacctctggataattttgcataaaattggattagcctggagcaggttgggagccaaatgtggcatttgtgatcatgagattgatgcaatgagatagaagatgtttgctacctgaacacttattgctttgaaactagacttgaggaaaccagggtttatcttttgagaacttttggtaagggaaaagggaacaggaaaagaaaccccaaactcaggccgaatgatcaaggggacccataggaaatcttgtccagagacaagacttcgggaaggtgtctggacattcagaacaccaagacttgaaggtgccttgctcaatggaagaggccaggacagagctgacaaaattttgctccccagtgaaggccacagcaaccttctgcccatcctgtctgttcatggagagggtccctgcctcacctctgccattttgggttaggagaagtcaagttgggagcctgaaatagtggttcttggaaaaatggatccccagtgaaaactagagctctaagcccattcagcccatttcacacctgaaaatgttagtgatcaccacttggaccagcatccttaagtatcagaaagccccaagcaattgctgcatcttagtagggtgagggataagcaaaagaggatgttcaccataacccaggaatgaagataccatcagcaaagaatttcaatttgttcagtctttcatttagagctagtctttcacagtaccatctgaatacctctttgaaagaaggaagactttacgtagtgtagatttgttttgtgttgtttgaaaatattatctttgtaattatttttaatatgtaaggaatgcttggaatatctgctgtatgtcaactttatgcagcttccttttgagggacaaatttaaaacaaacaaccccccatcacaaacttaaaggattgcaagggccagatctgttaagtggtttcataggagacacatccagcaattgtgtggtcagtggctcttttacccaataagatacatcacagtcacatgcttgatggtttatgttgacctaagatttattttgttaaaatctctctctgttgtgttcgttcttgttctgttttgttttgttttttaaagtcttgctgtggtctctttgtggcagaagtgtttcatgcatggcagcaggcctgttgcttttttatggcgattcccattgaaaatgtaagtaaatgtctgtggccttgttctctctatggtaaagatattattcaccatgtaaaacaaaaaacaatatttattgtattttagtatatttatataattatgttattgaaaaaaattggcattaaaacttaaccgcatcagaagcctattgtaaatacaagttctatttaagtgtactaattaacatataatatatgttttaaatatagaatttttaatgtttttaaatatattttcaaagtacat

SEQ ID NO: 7861 - protein, 247 aa, Homo sapiens; identical to SEQ ID NO: 7851

SEQ ID NO: 7862 - DNA, 4027 bp, Homo sapiens
ggcaatcattggtaacctcgctcattcattagaatcacgtaagaactcaaaaggaaacgtgtctctcggagtgagggcgtttgcgtaaatctataggtttttcgacatcgatgccagttgctttgtcttctgtagtcgccaaggtggttgagagtttaagcttgcggatattgcaaagggttattagattcataagtcacaccaagtggtgggcgatccactgagcaaagccgaacttctcacatgatgacttcaaacaagacacattaccttccagcatctgttggggagacgagattttaagacacttgagtctccaggacagcaaaggcacaatgttccaccaggtgagaagagtgatgaccatccttttccttactatggttatttcatactttggttgcatgaaggctgcccccatgaaagaagcaaacatccgaggacaaggtggcttggcctacccaggtgtgcggacccatgggactctggagagcgtgaatgggcccaaggcaggttcaagaggcttgacatcattggctgacactttcgaacacgtgatagaagagctgttggatgaggaccagaaagttcggcccaatgaagaaaacaataaggacgcagacttgtacacgtccagggtgatgctcagtagtcaagtgcctttggagcctcctcttctctttctgctggaggaatacaaaaattacctagatgctgcaaacatgtccatgagggtccggcgccactctgaccctgcccgccgaggggagctgagcgtgtgtgacagtattagtgagtgggtaacggcagcagacaaaaagactgcagtggacatgtcgggcgggacggtcacagtccttgaaaaggtccctgtatcaaaaggccaactgaagcaatacttctacgagaccaagtgcaatcccatgggttacacaaaagaaggctgcaggggcatagacaaaaggcattggaactcccagtgccgaactacccagtcgtacgtgcgggcccttaccatggatagcaaaaagagaattggctggcgattcataaggatagacacttcttgtgtatgtacattgaccattaaaaggggaagatagtggatttatgttgtatagattagattatattgagacaaaaattatctatttgtatatatacataacagggtaaattattcagttaagaaaaaaataattttatgaactgcatgtataaatgaagtttatacagtacagtggttctacaatctatttattggacatgtccatgaccagaagggaaacagtcatttgcgcacaacttaaaaagtctgcattacattccttgataatgttgtggtttgttgccgttgccaagaactgaaaacataaaaagttaaaaaaaataataaattgcatgctgctttaattgtgaattgataataaactgtcctctttcagaaaacagaaaaaaaacacacacacacacaacaaaaatttgaaccaaaacattccgtttacattttagacagtaagtatcttcgttcttgttagtactatatctgttttactgcttttaacttctgatagcgttggaattaaaacaatgtcaaggtgctgttgtcattgctttactggcttaggggatgggggatggggggtatatttttgtttgttttgtgtttttttttcgtttgtttgttttgttttttagttcccacagggagtagagatggggaaagaattcctacaatatatattctggctgataaaagatacatttgtatgttgtgaagatgtttgcaatatcgatcagatgactagaaagtgaataaaaattaaggcaactgaacaaaaaaatgctcacactccacatcccgtgatgcacctcccaggccccgctcattctttgggcgttggtcagagtaagctgcttttgacggaaggacctatgtttgctcagaacacattctttccccccctccccctctggtctcctctttgttttgttttaaggaagaaaaatcagttgcgcgttctgaaatattttaccactgctgtgaacaagtgaacacattgtgtcacatcatgacactcgtataagcatggagaacagtgatttttttttagaacagaaaacaacaaaaaataaccccaaaatgaagattattttttatgaggagtgaacatttgggtaaatcatggctaagcttaaaaaaaactcatggtgaggcttaacaatgtcttgtaagcaaaaggtagagccctgtatcaacccagaaacacctagatcagaacaggaatccacattgccagtgacatgagactgaacagccaaatggaggctatgtggagttggcattgcatttaccggcagtgcgggaggaatttctgagtggccatcccaaggtctaggtggaggtggggcatggtatttgagacattccaaaacgaaggcctctgaaggacccttcagaggtggctctggaatgacatgtgtcaagctgcttggacctcgtgctttaagtgcctacattatctaactgtgctcaagaggttctcgactggaggaccacactcaagccgacttatgcccaccatcccacctctggataattttgcataaaattggattagcctggagcaggttgggagccaaatgtggcatttgtgatcatgagattgatgcaatgagatagaagatgtttgctacctgaacacttattgctttgaaactagacttgaggaaaccagggtttatcttttgagaacttttggtaagggaaaagggaacaggaaaagaaaccccaaactcaggccgaatgatcaaggggacccataggaaatcttgtccagagacaagacttcgggaaggtgtctggacattcagaacaccaagacttgaaggtgccttgctcaatggaagaggccaggacagagctgacaaaattttgctccccagtgaaggccacagcaaccttctgcccatcctgtctgttcatggagagggtccctgcctcacctctgccattttgggttaggagaagtcaagttgggagcctgaaatagtggttcttggaaaaatggatccccagtgaaaactagagctctaagcccattcagcccatttcacacctgaaaatgttagtgatcaccacttggaccagcatccttaagtatcagaaagccccaagcaattgctgcatcttagtagggtgagggataagcaaaagaggatgttcaccataacccaggaatgaagataccatcagcaaagaatttcaatttgttcagtctttcatttagagctagtctttcacagtaccatctgaatacctctttgaaagaaggaagactttacgtagtgtagatttgttttgtgttgtttgaaaatattatctttgtaattatttttaatatgtaaggaatgcttggaatatctgctgtatgtcaactttatgcagcttccttttgagggacaaatttaaaacaaacaaccccccatcacaaacttaaaggattgcaagggccagatctgttaagtggtttcataggagacacatccagcaattgtgtggtcagtggctcttttacccaataagatacatcacagtcacatgcttgatggtttatgttgacctaagatttattttgttaaaatctctctctgttgtgttcgttcttgttctgttttgttttgttttttaaagtcttgctgtggtctctttgtggcagaagtgtttcatgcatggcagcaggcctgttgcttttttatggcgattcccattgaaaatgtaagtaaatgtctgtggccttgttctctctatggtaaagatattattcaccatgtaaaacaaaaaacaatatttattgtattttagtatatttatataattatgttattgaaaaaaattggcattaaaacttaaccgcatcagaagcctattgtaaatacaagttctatttaagtgtactaattaacatataatatatgttttaaatatagaatttttaatgtttttaaatatattttcaaagtacat

SEQ ID NO: 7863 - protein, 255 aa, Homo sapiens
MFHQVRRVMTILFLTMVISYFGCMKAAPMKEANIRGQGGLAYPGVRTHGTLESVNGPKAGSRGLTSLADTFEHVIEELLDEDQKVRPNEENNKDADLYTSRVMLSSQVPLEPPLLFLLEEYKNYLDAANMSMRVRRHSDPARRGELSVCDSISEWVTAADKKTAVDMSGGTVTVLEKVPVSKGQLKQYFYETKCNPMGYTKEGCRGIDKRHWNSQCRTTQSYVRALTMDSKKRIGWRFIRIDTSCVCTLTIKRGR

SEQ ID NO: 7864 - DNA, 3659 bp, Homo sapiens
agtggacttacaagtccgaagccaatgtagcttggaaaacttgggaggcggaattcctaccgctgggaactgaaagggtctgcgacactctcgggcaggccgaacccacatctctacccatcctgcgcccctcttctgaagcgccctccagttccaccaggtgagaagagtgatgaccatccttttccttactatggttatttcatactttggttgcatgaaggctgcccccatgaaagaagcaaacatccgaggacaaggtggcttggcctacccaggtgtgcggacccatgggactctggagagcgtgaatgggcccaaggcaggttcaagaggcttgacatcattggctgacactttcgaacacgtgatagaagagctgttggatgaggaccagaaagttcggcccaatgaagaaaacaataaggacgcagacttgtacacgtccagggtgatgctcagtagtcaagtgcctttggagcctcctcttctctttctgctggaggaatacaaaaattacctagatgctgcaaacatgtccatgagggtccggcgccactctgaccctgcccgccgaggggagctgagcgtgtgtgacagtattagtgagtgggtaacggcagcagacaaaaagactgcagtggacatgtcgggcgggacggtcacagtccttgaaaaggtccctgtatcaaaaggccaactgaagcaatacttctacgagaccaagtgcaatcccatgggttacacaaaagaaggctgcaggggcatagacaaaaggcattggaactcccagtgccgaactacccagtcgtacgtgcgggcccttaccatggatagcaaaaagagaattggctggcgattcataaggatagacacttcttgtgtatgtacattgaccattaaaaggggaagatagtggatttatgttgtatagattagattatattgagacaaaaattatctatttgtatatatacataacagggtaaattattcagttaagaaaaaaataattttatgaactgcatgtataaatgaagtttatacagtacagtggttctacaatctatttattggacatgtccatgaccagaagggaaacagtcatttgcgcacaacttaaaaagtctgcattacattccttgataatgttgtggtttgttgccgttgccaagaactgaaaacataaaaagttaaaaaaaataataaattgcatgctgctttaattgtgaattgataataaactgtcctctttcagaaaacagaaaaaaaacacacacacacacaacaaaaatttgaaccaaaacattccgtttacattttagacagtaagtatcttcgttcttgttagtactatatctgttttactgcttttaacttctgatagcgttggaattaaaacaatgtcaaggtgctgttgtcattgctttactggcttaggggatgggggatggggggtatatttttgtttgttttgtgtttttttttcgtttgtttgttttgttttttagttcccacagggagtagagatggggaaagaattcctacaatatatattctggctgataaaagatacatttgtatgttgtgaagatgtttgcaatatcgatcagatgactagaaagtgaataaaaattaaggcaactgaacaaaaaaatgctcacactccacatcccgtgatgcacctcccaggccccgctcattctttgggcgttggtcagagtaagctgcttttgacggaaggacctatgtttgctcagaacacattctttccccccctccccctctggtctcctctttgttttgttttaaggaagaaaaatcagttgcgcgttctgaaatattttaccactgctgtgaacaagtgaacacattgtgtcacatcatgacactcgtataagcatggagaacagtgatttttttttagaacagaaaacaacaaaaaataaccccaaaatgaagattattttttatgaggagtgaacatttgggtaaatcatggctaagcttaaaaaaaactcatggtgaggcttaacaatgtcttgtaagcaaaaggtagagccctgtatcaacccagaaacacctagatcagaacaggaatccacattgccagtgacatgagactgaacagccaaatggaggctatgtggagttggcattgcatttaccggcagtgcgggaggaatttctgagtggccatcccaaggtctaggtggaggtggggcatggtatttgagacattccaaaacgaaggcctctgaaggacccttcagaggtggctctggaatgacatgtgtcaagctgcttggacctcgtgctttaagtgcctacattatctaactgtgctcaagaggttctcgactggaggaccacactcaagccgacttatgcccaccatcccacctctggataattttgcataaaattggattagcctggagcaggttgggagccaaatgtggcatttgtgatcatgagattgatgcaatgagatagaagatgtttgctacctgaacacttattgctttgaaactagacttgaggaaaccagggtttatcttttgagaacttttggtaagggaaaagggaacaggaaaagaaaccccaaactcaggccgaatgatcaaggggacccataggaaatcttgtccagagacaagacttcgggaaggtgtctggacattcagaacaccaagacttgaaggtgccttgctcaatggaagaggccaggacagagctgacaaaattttgctccccagtgaaggccacagcaaccttctgcccatcctgtctgttcatggagagggtccctgcctcacctctgccattttgggttaggagaagtcaagttgggagcctgaaatagtggttcttggaaaaatggatccccagtgaaaactagagctctaagcccattcagcccatttcacacctgaaaatgttagtgatcaccacttggaccagcatccttaagtatcagaaagccccaagcaattgctgcatcttagtagggtgagggataagcaaaagaggatgttcaccataacccaggaatgaagataccatcagcaaagaatttcaatttgttcagtctttcatttagagctagtctttcacagtaccatctgaatacctctttgaaagaaggaagactttacgtagtgtagatttgttttgtgttgtttgaaaatattatctttgtaattatttttaatatgtaaggaatgcttggaatatctgctgtatgtcaactttatgcagcttccttttgagggacaaatttaaaacaaacaaccccccatcacaaacttaaaggattgcaagggccagatctgttaagtggtttcataggagacacatccagcaattgtgtggtcagtggctcttttacccaataagatacatcacagtcacatgcttgatggtttatgttgacctaagatttattttgttaaaatctctctctgttgtgttcgttcttgttctgttttgttttgttttttaaagtcttgctgtggtctctttgtggcagaagtgtttcatgcatggcagcaggcctgttgcttttttatggcgattcccattgaaaatgtaagtaaatgtctgtggccttgttctctctatggtaaagatattattcaccatgtaaaacaaaaaac

SEQ ID NO: 7865 - protein, 247 aa, Homo sapiens; identical to SEQ ID NO: 7851

SEQ ID NO: 7866 - DNA, 1516 bp, Homo sapiens
agtggacttacaagtccgaagccaatgtagcttggaaaacttgggaggcggaattcctaccgctgggaactgaaagggtctgcgacactctcgggcaggccgaacccacatctctacccatcctgcgcccctcttctgaagcgccctccagggaagttaagagttttgactttcggggagtggttgggatgtacgtgggggattcttgactcgggttagtctctggggatgcagagccgggaagaggaatggttccaccaggtgagaagagtgatgaccatccttttccttactatggttatttcatactttggttgcatgaaggctgcccccatgaaagaagcaaacatccgaggacaaggtggcttggcctacccaggtgtgcggacccatgggactctggagagcgtgaatgggcccaaggcaggttcaagaggcttgacatcattggctgacactttcgaacacgtgatagaagagctgttggatgaggaccagaaagttcggcccaatgaagaaaacaataaggacgcagacttgtacacgtccagggtgatgctcagtagtcaagtgcctttggagcctcctcttctctttctgctggaggaatacaaaaattacctagatgctgcaaacatgtccatgagggtccggcgccactctgaccctgcccgccgaggggagctgagcgtgtgtgacagtattagtgagtgggtaacggcagcagacaaaaagactgcagtggacatgtcgggcgggacggtcacagtccttgaaaaggtccctgtatcaaaaggccaactgaagcaatacttctacgagaccaagtgcaatcccatgggttacacaaaagaaggctgcaggggcatagacaaaaggcattggaactcccagtgccgaactacccagtcgtacgtgcgggcccttaccatggatagcaaaaagagaattggctggcgattcataaggatagacacttcttgtgtatgtacattgaccattaaaaggggaagatagtggatttatgttgtatagattagattatattgagacaaaaattatctatttgtatatatacataacagggtaaattattcagttaagaaaaaaataattttatgaactgcatgtataaatgaagtttatacagtacagtggttctacaatctatttattggacatgtccatgaccagaagggaaacagtcatttgcgcacaacttaaaaagtctgcattacattccttgataatgttgtggtttgttgccgttgccaagaactgaaaacataaaaagttaaaaaaaataataaattgcatgctgctttaattgtgaattgataataaactgtcctctttcagaaaacagaaaaaaaacacacacacacacaacaaaaatttgaaccaaaacattccgtttacattttagacagtaagtatcttcgttcttgttagtactatatctgttttactgcttttaacttctgatagcgttggaattaaaacaatgtcaaggtgc

SEQ ID NO: 7867 - protein, 262 aa, Homo sapiens; identical to SEQ ID NO: 7849

SEQ ID NO: 7868 - DNA, 1546 bp, Homo sapiens
gctccgggtccccgacgctgccgccgccgcgcccgggcgcacccgcccgctcgctgtcccgcgcaccccgtagcgcctcgggctcccgggccggacagaggagccagcccggtgcgcccctccacctcctgctcggggggctttaatgagacacccaccgctgctgtggggccggcggggagcagcaccgcgacggggaccggggctgggcgctggagccagaatcggaaccacgatgtgactccgccgccggggacccgtgaggtttgtgtggaccccgagttccaccaggtgagaagagtgatgaccatccttttccttactatggttatttcatactttggttgcatgaaggctgcccccatgaaagaagcaaacatccgaggacaaggtggcttggcctacccaggtgtgcggacccatgggactctggagagcgtgaatgggcccaaggcaggttcaagaggcttgacatcattggctgacactttcgaacacgtgatagaagagctgttggatgaggaccagaaagttcggcccaatgaagaaaacaataaggacgcagacttgtacacgtccagggtgatgctcagtagtcaagtgcctttggagcctcctcttctctttctgctggaggaatacaaaaattacctagatgctgcaaacatgtccatgagggtccggcgccactctgaccctgcccgccgaggggagctgagcgtgtgtgacagtattagtgagtgggtaacggcagcagacaaaaagactgcagtggacatgtcgggcgggacggtcacagtccttgaaaaggtccctgtatcaaaaggccaactgaagcaatacttctacgagaccaagtgcaatcccatgggttacacaaaagaaggctgcaggggcatagacaaaaggcattggaactcccagtgccgaactacccagtcgtacgtgcgggcccttaccatggatagcaaaaagagaattggctggcgattcataaggatagacacttcttgtgtatgtacattgaccattaaaaggggaagatagtggatttatgttgtatagattagattatattgagacaaaaattatctatttgtatatatacataacagggtaaattattcagttaagaaaaaaataattttatgaactgcatgtataaatgaagtttatacagtacagtggttctacaatctatttattggacatgtccatgaccagaagggaaacagtcatttgcgcacaacttaaaaagtctgcattacattccttgataatgttgtggtttgttgccgttgccaagaactgaaaacataaaaagttaaaaaaaataataaattgcatgctgctttaattgtgaattgataataaactgtcctctttcagaaaacagaaaaaaaacacacacacacacaacaaaaatttgaaccaaaacattccgtttacattttagacagtaagtatcttcgttcttgttagtactatatctgttttactgcttttaacttctgatagcgttggaattaaaacaatgtcaaggtgc

SEQ ID NO: 7869 - protein, 247 aa, Homo sapiens; identical to SEQ ID NO: 7851

SEQ ID NO: 7870 - DNA, 1468 bp, Homo sapiens
gagacctcggggcgtgcgattctcactcgctccctcccgccccagcgcccacagccggggtttctgcagagggcgcgggacgcggggttccccggggctgaggctggggctggaacacccctcgaagccgcgggcgtcctgtccaaggcgccccaggagggcgcaggactcgcagggcgatgtcgcggggccctaggggaggagttccaccaggtgagaagagtgatgaccatccttttccttactatggttatttcatactttggttgcatgaaggctgcccccatgaaagaagcaaacatccgaggacaaggtggcttggcctacccaggtgtgcggacccatgggactctggagagcgtgaatgggcccaaggcaggttcaagaggcttgacatcattggctgacactttcgaacacgtgatagaagagctgttggatgaggaccagaaagttcggcccaatgaagaaaacaataaggacgcagacttgtacacgtccagggtgatgctcagtagtcaagtgcctttggagcctcctcttctctttctgctggaggaatacaaaaattacctagatgctgcaaacatgtccatgagggtccggcgccactctgaccctgcccgccgaggggagctgagcgtgtgtgacagtattagtgagtgggtaacggcagcagacaaaaagactgcagtggacatgtcgggcgggacggtcacagtccttgaaaaggtccctgtatcaaaaggccaactgaagcaatacttctacgagaccaagtgcaatcccatgggttacacaaaagaaggctgcaggggcatagacaaaaggcattggaactcccagtgccgaactacccagtcgtacgtgcgggcccttaccatggatagcaaaaagagaattggctggcgattcataaggatagacacttcttgtgtatgtacattgaccattaaaaggggaagatagtggatttatgttgtatagattagattatattgagacaaaaattatctatttgtatatatacataacagggtaaattattcagttaagaaaaaaataattttatgaactgcatgtataaatgaagtttatacagtacagtggttctacaatctatttattggacatgtccatgaccagaagggaaacagtcatttgcgcacaacttaaaaagtctgcattacattccttgataatgttgtggtttgttgccgttgccaagaactgaaaacataaaaagttaaaaaaaataataaattgcatgctgctttaattgtgaattgataataaactgtcctctttcagaaaacagaaaaaaaacacacacacacacaacaaaaatttgaaccaaaacattccgtttacattttagacagtaagtatcttcgttcttgttagtactatatctgttttactgcttttaacttctgatagcgttggaattaaaacaatgtcaaggtgc

SEQ ID NO: 7871 - protein, 75 aa, Homo sapiens
MSRGPRGGVPPGEKSDDHPFPYYGYFILWLHEGCPHERSKHPRTRWLGLPRCADPWDSGEREWAQGRFKRLDIIG

SEQ ID NO: 7872 - DNA, 1596 bp, Homo sapiens
ctttcccattcaccgcggagagggctgctctcgctgccgctccccccggcgaactagcatgaaatctccctgcctctgccgagatcaaatggagcttctcgctgatggggtgcgagtattacctccgccatgcaatttccactatcaataatttaacttctttgctgcagaacagaaggagtacataccgggcaccaaagactcgcgccccctcccccctttaattaagcgaagggaacgtgaaaaaataatagagtgtgggagttttggggccgaagtctttcccggagcagctgccttgatggttactttgacaagtagtgactgaaaagttccaccaggtgagaagagtgatgaccatccttttccttactatggttatttcatactttggttgcatgaaggctgcccccatgaaagaagcaaacatccgaggacaaggtggcttggcctacccaggtgtgcggacccatgggactctggagagcgtgaatgggcccaaggcaggttcaagaggcttgacatcattggctgacactttcgaacacgtgatagaagagctgttggatgaggaccagaaagttcggcccaatgaagaaaacaataaggacgcagacttgtacacgtccagggtgatgctcagtagtcaagtgcctttggagcctcctcttctctttctgctggaggaatacaaaaattacctagatgctgcaaacatgtccatgagggtccggcgccactctgaccctgcccgccgaggggagctgagcgtgtgtgacagtattagtgagtgggtaacggcagcagacaaaaagactgcagtggacatgtcgggcgggacggtcacagtccttgaaaaggtccctgtatcaaaaggccaactgaagcaatacttctacgagaccaagtgcaatcccatgggttacacaaaagaaggctgcaggggcatagacaaaaggcattggaactcccagtgccgaactacccagtcgtacgtgcgggcccttaccatggatagcaaaaagagaattggctggcgattcataaggatagacacttcttgtgtatgtacattgaccattaaaaggggaagatagtggatttatgttgtatagattagattatattgagacaaaaattatctatttgtatatatacataacagggtaaattattcagttaagaaaaaaataattttatgaactgcatgtataaatgaagtttatacagtacagtggttctacaatctatttattggacatgtccatgaccagaagggaaacagtcatttgcgcacaacttaaaaagtctgcattacattccttgataatgttgtggtttgttgccgttgccaagaactgaaaacataaaaagttaaaaaaaataataaattgcatgctgctttaattgtgaattgataataaactgtcctctttcagaaaacagaaaaaaaacacacacacacacaacaaaaatttgaaccaaaacattccgtttacattttagacagtaagtatcttcgttcttgttagtactatatctgttttactgcttttaacttctgatagcgttggaattaaaacaatgtcaaggtgc

SEQ ID NO: 7873 - protein, 247 aa, Homo sapiens; identical to SEQ ID NO: 7851

SEQ ID NO: 7874 - DNA, 1597 bp, Homo sapiens
gccaacggatttgtccgaggtggcggtacccccaggtagtcttcttggccccgctgtaaagccaaccctgtgtcgcccttaaaaagcgtcttttctgaggttcggctcacactgagatcggggctggagagagagtcagattttggagcggagcgtttggaaagcgagccccagtttggtcccctcattgagctcgctgaagttggcttcctagcggtgtaggctggaatagactcttggcaagctccgggttggtatactgggttaactttgggaaatgcaagtgtttatctccaggatctagccaccggggtggtgtaagccgcaaagaagttccaccaggtgagaagagtgatgaccatccttttccttactatggttatttcatactttggttgcatgaaggctgcccccatgaaagaagcaaacatccgaggacaaggtggcttggcctacccaggtgtgcggacccatgggactctggagagcgtgaatgggcccaaggcaggttcaagaggcttgacatcattggctgacactttcgaacacgtgatagaagagctgttggatgaggaccagaaagttcggcccaatgaagaaaacaataaggacgcagacttgtacacgtccagggtgatgctcagtagtcaagtgcctttggagcctcctcttctctttctgctggaggaatacaaaaattacctagatgctgcaaacatgtccatgagggtccggcgccactctgaccctgcccgccgaggggagctgagcgtgtgtgacagtattagtgagtgggtaacggcagcagacaaaaagactgcagtggacatgtcgggcgggacggtcacagtccttgaaaaggtccctgtatcaaaaggccaactgaagcaatacttctacgagaccaagtgcaatcccatgggttacacaaaagaaggctgcaggggcatagacaaaaggcattggaactcccagtgccgaactacccagtcgtacgtgcgggcccttaccatggatagcaaaaagagaattggctggcgattcataaggatagacacttcttgtgtatgtacattgaccattaaaaggggaagatagtggatttatgttgtatagattagattatattgagacaaaaattatctatttgtatatatacataacagggtaaattattcagttaagaaaaaaataattttatgaactgcatgtataaatgaagtttatacagtacagtggttctacaatctatttattggacatgtccatgaccagaagggaaacagtcatttgcgcacaacttaaaaagtctgcattacattccttgataatgttgtggtttgttgccgttgccaagaactgaaaacataaaaagttaaaaaaaataataaattgcatgctgctttaattgtgaattgataataaactgtcctctttcagaaaacagaaaaaaaacacacacacacacaacaaaaatttgaaccaaaacattccgtttacattttagacagtaagtatcttcgttcttgttagtactatatctgttttactgcttttaacttctgatagcgttggaattaaaacaatgtcaaggtgc

SEQ ID NO: 7875 - protein, 247 aa, Homo sapiens; identical to SEQ ID NO: 7851

SEQ ID NO: 7876 - DNA, 1581 bp, Homo sapiens
tcattcattagaatcacgtaagaactcaaaaggaaacgtgtctctcggagtgagggcgtttgcgtaaatctataggtttttcgacatcgatgccagttgctttgtcttctgtagtcgccaaggtggttgagagtttaagcttgcggatattgcaaagggttattagattcataagtcacaccaagtggtgggcgatccactgagcaaagccgaacttctcacatgatgacttcaaacaagacacattaccttccagcatctgttggggagacgagattttaagacacttgagtctccaggacagcaaaggcacaatgttccaccaggtgagaagagtgatgaccatccttttccttactatggttatttcatactttggttgcatgaaggctgcccccatgaaagaagcaaacatccgaggacaaggtggcttggcctacccaggtgtgcggacccatgggactctggagagcgtgaatgggcccaaggcaggttcaagaggcttgacatcattggctgacactttcgaacacgtgatagaagagctgttggatgaggaccagaaagttcggcccaatgaagaaaacaataaggacgcagacttgtacacgtccagggtgatgctcagtagtcaagtgcctttggagcctcctcttctctttctgctggaggaatacaaaaattacctagatgctgcaaacatgtccatgagggtccggcgccactctgaccctgcccgccgaggggagctgagcgtgtgtgacagtattagtgagtgggtaacggcagcagacaaaaagactgcagtggacatgtcgggcgggacggtcacagtccttgaaaaggtccctgtatcaaaaggccaactgaagcaatacttctacgagaccaagtgcaatcccatgggttacacaaaagaaggctgcaggggcatagacaaaaggcattggaactcccagtgccgaactacccagtcgtacgtgcgggcccttaccatggatagcaaaaagagaattggctggcgattcataaggatagacacttcttgtgtatgtacattgaccattaaaaggggaagatagtggatttatgttgtatagattagattatattgagacaaaaattatctatttgtatatatacataacagggtaaattattcagttaagaaaaaaataattttatgaactgcatgtataaatgaagtttatacagtacagtggttctacaatctatttattggacatgtccatgaccagaagggaaacagtcatttgcgcacaacttaaaaagtctgcattacattccttgataatgttgtggtttgttgccgttgccaagaactgaaaacataaaaagttaaaaaaaataataaattgcatgctgctttaattgtgaattgataataaactgtcctctttcagaaaacagaaaaaaaacacacacacacacaacaaaaatttgaaccaaaacattccgtttacattttagacagtaagtatcttcgttcttgttagtactatatctgttttactgcttttaacttctgatagcgttggaattaaaacaatgtcaaggtgc

SEQ ID NO: 7877 - protein, 255 aa, Homo sapiens; identical to SEQ ID NO: 7863

SEQ ID NO: 7878 - DNA, 1325 bp, Homo sapiens
agtggacttacaagtccgaagccaatgtagcttggaaaacttgggaggcggaattcctaccgctgggaactgaaagggtctgcgacactctcgggcaggccgaacccacatctctacccatcctgcgcccctcttctgaagcgccctccagggaagttaagagttttgactttcggggagtggttgggatgtacgtgggggattcttgactcgggttagtctctggggatgcagagccgggaagaggaatggttccaccaggtgagaagagtgatgaccatccttttccttactatggttatttcatactttggttgcatgaaggctgcccccatgaaagaagcaaacatccgaggacaaggtggcttggcctacccaggtgtgcggacccatgggactctggagagcgtgaatgggcccaaggcaggttcaagaggcttgacatcattggctgacactttcgaacacgtgatagaagagctgttggatgaggaccagaaagttcggcccaatgaagaaaacaataaggacgcagacttgtacacgtccagggtgatgctcagtagtcaagtgcctttggagcctcctcttctctttctgctggaggaatacaaaaattacctagatgctgcaaacatgtccatgagggtccggcgccactctgaccctgcccgccgaggggagctgagcgtgtgtgacagtattagtgagtgggtaacggcagcagacaaaaagactgcagtggacatgtcgggcgggacggtcacagtccttgaaaaggtccctgtatcaaaaggccaactgaagcaatacttctacgagaccaagtgcaatcccatgggttacacaaaagaaggctgcaggggcatagacaaaaggcattggaactcccagtgccgaactacccagtcgtacgtgcgggcccttaccatggatagcaaaaagagaattggctggcgattcataaggatagacacttcttgtgtatgtacattgaccattaaaaggggaagatagtggatttatgttgtatagattagattatattgagacaaaaattatctatttgtatatatacataacagggtaaattattcagttaagaaaaaaataattttatgaactgcatgtataaatgaagtttatacagtacagtggttctacaatctatttattggacatgtccatgaccagaagggaaacagtcatttgcgcacaacttaaaaagtctgcattacattccttgataatgttgtggtttgttgccgttgccaagaactgaaaacataaaaagttaaaaaaaataataaattgcatgctgcttt

SEQ ID NO: 7879 - protein, 262 aa, Homo sapiens; identical to SEQ ID NO: 7849

SEQ ID NO: 7880 - DNA, 1355 bp, Homo sapiens
gctccgggtccccgacgctgccgccgccgcgcccgggcgcacccgcccgctcgctgtcccgcgcaccccgtagcgcctcgggctcccgggccggacagaggagccagcccggtgcgcccctccacctcctgctcggggggctttaatgagacacccaccgctgctgtggggccggcggggagcagcaccgcgacggggaccggggctgggcgctggagccagaatcggaaccacgatgtgactccgccgccggggacccgtgaggtttgtgtggaccccgagttccaccaggtgagaagagtgatgaccatccttttccttactatggttatttcatactttggttgcatgaaggctgcccccatgaaagaagcaaacatccgaggacaaggtggcttggcctacccaggtgtgcggacccatgggactctggagagcgtgaatgggcccaaggcaggttcaagaggcttgacatcattggctgacactttcgaacacgtgatagaagagctgttggatgaggaccagaaagttcggcccaatgaagaaaacaataaggacgcagacttgtacacgtccagggtgatgctcagtagtcaagtgcctttggagcctcctcttctctttctgctggaggaatacaaaaattacctagatgctgcaaacatgtccatgagggtccggcgccactctgaccctgcccgccgaggggagctgagcgtgtgtgacagtattagtgagtgggtaacggcagcagacaaaaagactgcagtggacatgtcgggcgggacggtcacagtccttgaaaaggtccctgtatcaaaaggccaactgaagcaatacttctacgagaccaagtgcaatcccatgggttacacaaaagaaggctgcaggggcatagacaaaaggcattggaactcccagtgccgaactacccagtcgtacgtgcgggcccttaccatggatagcaaaaagagaattggctggcgattcataaggatagacacttcttgtgtatgtacattgaccattaaaaggggaagatagtggatttatgttgtatagattagattatattgagacaaaaattatctatttgtatatatacataacagggtaaattattcagttaagaaaaaaataattttatgaactgcatgtataaatgaagtttatacagtacagtggttctacaatctatttattggacatgtccatgaccagaagggaaacagtcatttgcgcacaacttaaaaagtctgcattacattccttgataatgttgtggtttgttgccgttgccaagaactgaaaacataaaaagttaaaaaaaataataaattgcatgctgcttt

SEQ ID NO: 7881 - protein, 247 aa, Homo sapiens; identical to SEQ ID NO: 7851

SEQ ID NO: 7882 - DNA, 1277 bp, Homo sapiens
gagacctcggggcgtgcgattctcactcgctccctcccgccccagcgcccacagccggggtttctgcagagggcgcgggacgcggggttccccggggctgaggctggggctggaacacccctcgaagccgcgggcgtcctgtccaaggcgccccaggagggcgcaggactcgcagggcgatgtcgcggggccctaggggaggagttccaccaggtgagaagagtgatgaccatccttttccttactatggttatttcatactttggttgcatgaaggctgcccccatgaaagaagcaaacatccgaggacaaggtggcttggcctacccaggtgtgcggacccatgggactctggagagcgtgaatgggcccaaggcaggttcaagaggcttgacatcattggctgacactttcgaacacgtgatagaagagctgttggatgaggaccagaaagttcggcccaatgaagaaaacaataaggacgcagacttgtacacgtccagggtgatgctcagtagtcaagtgcctttggagcctcctcttctctttctgctggaggaatacaaaaattacctagatgctgcaaacatgtccatgagggtccggcgccactctgaccctgcccgccgaggggagctgagcgtgtgtgacagtattagtgagtgggtaacggcagcagacaaaaagactgcagtggacatgtcgggcgggacggtcacagtccttgaaaaggtccctgtatcaaaaggccaactgaagcaatacttctacgagaccaagtgcaatcccatgggttacacaaaagaaggctgcaggggcatagacaaaaggcattggaactcccagtgccgaactacccagtcgtacgtgcgggcccttaccatggatagcaaaaagagaattggctggcgattcataaggatagacacttcttgtgtatgtacattgaccattaaaaggggaagatagtggatttatgttgtatagattagattatattgagacaaaaattatctatttgtatatatacataacagggtaaattattcagttaagaaaaaaataattttatgaactgcatgtataaatgaagtttatacagtacagtggttctacaatctatttattggacatgtccatgaccagaagggaaacagtcatttgcgcacaacttaaaaagtctgcattacattccttgataatgttgtggtttgttgccgttgccaagaactgaaaacataaaaagttaaaaaaaataataaattgcatgctgcttt

SEQ ID NO: 7883 - protein, 75 aa, Homo sapiens; identical to SEQ ID NO: 7871

SEQ ID NO: 7884 - DNA, 1405 bp, Homo sapiens
ctttcccattcaccgcggagagggctgctctcgctgccgctccccccggcgaactagcatgaaatctccctgcctctgccgagatcaaatggagcttctcgctgatggggtgcgagtattacctccgccatgcaatttccactatcaataatttaacttctttgctgcagaacagaaggagtacataccgggcaccaaagactcgcgccccctcccccctttaattaagcgaagggaacgtgaaaaaataatagagtgtgggagttttggggccgaagtctttcccggagcagctgccttgatggttactttgacaagtagtgactgaaaagttccaccaggtgagaagagtgatgaccatccttttccttactatggttatttcatactttggttgcatgaaggctgcccccatgaaagaagcaaacatccgaggacaaggtggcttggcctacccaggtgtgcggacccatgggactctggagagcgtgaatgggcccaaggcaggttcaagaggcttgacatcattggctgacactttcgaacacgtgatagaagagctgttggatgaggaccagaaagttcggcccaatgaagaaaacaataaggacgcagacttgtacacgtccagggtgatgctcagtagtcaagtgcctttggagcctcctcttctctttctgctggaggaatacaaaaattacctagatgctgcaaacatgtccatgagggtccggcgccactctgaccctgcccgccgaggggagctgagcgtgtgtgacagtattagtgagtgggtaacggcagcagacaaaaagactgcagtggacatgtcgggcgggacggtcacagtccttgaaaaggtccctgtatcaaaaggccaactgaagcaatacttctacgagaccaagtgcaatcccatgggttacacaaaagaaggctgcaggggcatagacaaaaggcattggaactcccagtgccgaactacccagtcgtacgtgcgggcccttaccatggatagcaaaaagagaattggctggcgattcataaggatagacacttcttgtgtatgtacattgaccattaaaaggggaagatagtggatttatgttgtatagattagattatattgagacaaaaattatctatttgtatatatacataacagggtaaattattcagttaagaaaaaaataattttatgaactgcatgtataaatgaagtttatacagtacagtggttctacaatctatttattggacatgtccatgaccagaagggaaacagtcatttgcgcacaacttaaaaagtctgcattacattccttgataatgttgtggtttgttgccgttgccaagaactgaaaacataaaaagttaaaaaaaataataaattgcatgctgcttt

SEQ ID NO: 7885 - protein, 247 aa, Homo sapiens; identical to SEQ ID NO: 7851

SEQ ID NO: 7886 - DNA, 1406 bp, Homo sapiens
gccaacggatttgtccgaggtggcggtacccccaggtagtcttcttggccccgctgtaaagccaaccctgtgtcgcccttaaaaagcgtcttttctgaggttcggctcacactgagatcggggctggagagagagtcagattttggagcggagcgtttggaaagcgagccccagtttggtcccctcattgagctcgctgaagttggcttcctagcggtgtaggctggaatagactcttggcaagctccgggttggtatactgggttaactttgggaaatgcaagtgtttatctccaggatctagccaccggggtggtgtaagccgcaaagaagttccaccaggtgagaagagtgatgaccatccttttccttactatggttatttcatactttggttgcatgaaggctgcccccatgaaagaagcaaacatccgaggacaaggtggcttggcctacccaggtgtgcggacccatgggactctggagagcgtgaatgggcccaaggcaggttcaagaggcttgacatcattggctgacactttcgaacacgtgatagaagagctgttggatgaggaccagaaagttcggcccaatgaagaaaacaataaggacgcagacttgtacacgtccagggtgatgctcagtagtcaagtgcctttggagcctcctcttctctttctgctggaggaatacaaaaattacctagatgctgcaaacatgtccatgagggtccggcgccactctgaccctgcccgccgaggggagctgagcgtgtgtgacagtattagtgagtgggtaacggcagcagacaaaaagactgcagtggacatgtcgggcgggacggtcacagtccttgaaaaggtccctgtatcaaaaggccaactgaagcaatacttctacgagaccaagtgcaatcccatgggttacacaaaagaaggctgcaggggcatagacaaaaggcattggaactcccagtgccgaactacccagtcgtacgtgcgggcccttaccatggatagcaaaaagagaattggctggcgattcataaggatagacacttcttgtgtatgtacattgaccattaaaaggggaagatagtggatttatgttgtatagattagattatattgagacaaaaattatctatttgtatatatacataacagggtaaattattcagttaagaaaaaaataattttatgaactgcatgtataaatgaagtttatacagtacagtggttctacaatctatttattggacatgtccatgaccagaagggaaacagtcatttgcgcacaacttaaaaagtctgcattacattccttgataatgttgtggtttgttgccgttgccaagaactgaaaacataaaaagttaaaaaaaataataaattgcatgctgcttt

SEQ ID NO: 7887 - protein, 247 aa, Homo sapiens; identical to SEQ ID NO: 7851

SEQ ID NO: 7888 - DNA, 1390 bp, Homo sapiens
tcattcattagaatcacgtaagaactcaaaaggaaacgtgtctctcggagtgagggcgtttgcgtaaatctataggtttttcgacatcgatgccagttgctttgtcttctgtagtcgccaaggtggttgagagtttaagcttgcggatattgcaaagggttattagattcataagtcacaccaagtggtgggcgatccactgagcaaagccgaacttctcacatgatgacttcaaacaagacacattaccttccagcatctgttggggagacgagattttaagacacttgagtctccaggacagcaaaggcacaatgttccaccaggtgagaagagtgatgaccatccttttccttactatggttatttcatactttggttgcatgaaggctgcccccatgaaagaagcaaacatccgaggacaaggtggcttggcctacccaggtgtgcggacccatgggactctggagagcgtgaatgggcccaaggcaggttcaagaggcttgacatcattggctgacactttcgaacacgtgatagaagagctgttggatgaggaccagaaagttcggcccaatgaagaaaacaataaggacgcagacttgtacacgtccagggtgatgctcagtagtcaagtgcctttggagcctcctcttctctttctgctggaggaatacaaaaattacctagatgctgcaaacatgtccatgagggtccggcgccactctgaccctgcccgccgaggggagctgagcgtgtgtgacagtattagtgagtgggtaacggcagcagacaaaaagactgcagtggacatgtcgggcgggacggtcacagtccttgaaaaggtccctgtatcaaaaggccaactgaagcaatacttctacgagaccaagtgcaatcccatgggttacacaaaagaaggctgcaggggcatagacaaaaggcattggaactcccagtgccgaactacccagtcgtacgtgcgggcccttaccatggatagcaaaaagagaattggctggcgattcataaggatagacacttcttgtgtatgtacattgaccattaaaaggggaagatagtggatttatgttgtatagattagattatattgagacaaaaattatctatttgtatatatacataacagggtaaattattcagttaagaaaaaaataattttatgaactgcatgtataaatgaagtttatacagtacagtggttctacaatctatttattggacatgtccatgaccagaagggaaacagtcatttgcgcacaacttaaaaagtctgcattacattccttgataatgttgtggtttgttgccgttgccaagaactgaaaacataaaaagttaaaaaaaataataaattgcatgctgcttt

SEQ ID NO: 7889 - protein, 255 aa, Homo sapiens; identical to SEQ ID NO: 7863

SEQ ID NO: 7890 - DNA, 2710 bp, Homo sapiens
gagttgcttcagcatcctggtgttgctgtgccgtgggtcctgtgcggtcacttagccaagatgcctgaggaaacccagacccaagaccaaccgatggaggaggaggaggttgagacattcgcctttcaggcagaaattgcccagttgatgtcattgatcatcaatactttctactcgaacaaagagatctttctgagagagctcatttcaaattcatcagatgcattggacaaaatctggtatgaaagcttgacagatcccagtaaattagactctgggaaagagctgcatattaaccttataccaaacaaacaagatcaaactctcactattgtggatactggaattggaatgaccaaggctgacttgatcaataaccttggtgaacgtatgggtcgtggaacaaaggttatcctacacctgaaagaagaccaaactgagtacttggaggaacaaagaataaaggagattgtgaagaaacattctcagcttattggatatcccattactctttttgtggagaaggaatgtgataaagaagtcagcgacgatgagactgaagaaaaggaagacaaagaagaagaaaaagaaaaagaagagaaagagtccaaagacaaacctgaaattgaagatgttggttctgatgaggaagaagaaaagaaggatggtgacaagaagaagaagaagactaaggaaaagtacatcgaccaagaagaactcaacaaaacaaagcccatctggaccagaaatcccgacgatattactaatgaggagtacggagaattctgcaagaacttgaccaatgactgggaagatcacttggcagtgaagcatttttcagttgaaggacagttggaattcagagcccttctatttgtcccatgacgtgctccttttgacctgtttgaaaacagaaagaaaaagaacaacatcaaattgtatgtacgcagagatttcatcatggataactgtgaggagctaatccctgaatatctgaacttcattagaggggtggtagactcggaggatctccctctaaacatttcccgtgagatgttgcaacaaagtaaaattttgaaagttatcaggaaaaatttggtcaaaaaatgcttagaactctttacagaactggcggaagataaagagaactgcaagaaattctatgagcagttctctaaaaacataaagcttggaatacaagaagactctcaaaatcggaagaagctttcagagctgttaaggtactacacgtctgcctctggtgatgagatggtttctctcaaggactactgcaccagaatgaaggaaaaacagaaacatatctattatatcacaggtgagaccaaggaccaggtagctaactcagcctttgtggaacgtcttgggaaacatggcttagaagtgatctatatgattgagcccattgatgagtactgtgtccaacagctgaaggaatttgaggggaagactttagtgccagtcaccaaagaaggcctggaacttccagaggatgaagaaaagaaaaagaaataggaagagaaaaaacaatgtttgagaacctctgcaaaaccatgaaagacatattggagaaaaaagttgaaaaggtggttgtgtcaaaccgattggtgacgtctccatgctgtattgtcacaagcacatatggctggacagaaaacatggagagaatcatgaaagctcaagccctaagagacaactcaacaatgggttatatggcagccaagaaacacctggagataaatcctgatgattccattattgagaccttaaggcaaaaggcagaggctgataagaatgacaagtctgtgaaggatctgctcatcttgctttacgaaactgcactcctgtcttctggcttcagtctggaagatccccagacacatgctaacaggacctacaggatgatcaaacttggtctgggtattgatgaagatgatcctgctgctgatgataccagtgctgctgtaactgaagaaatgccgcccctcgaaggagatgacgacacatcatgcatggaagaagtagactaacctctggctaagggatgacttaactgttcaatactctacaattcctccgataatatatattcaaggatgtttttctttatttttgttaatattaaaaagtctgtacggcatgacaacaactactttaaggggaagataagatttctgtctactaagtgatgctgtgataccttaggcactaaagcagagctagtaatgctttttgagtttcacgtcggtttattttcacagattggggtaacgtgcgttgtaagatgtatgtaacatgatgttaactttgtggtctaaagtgtttagctgtcaagccggattcctaagtagaccaaatcttgttatcgaagtgttcctgagctataccttgatgtttagaaaagtatttgttacatcttgtaggatctactttttgaacttttcatcccctatagttgacaattctgcatgtactagtcctctagaaataggttaaactgaagcaacttgatggaaggatctctccacagggcttgttttccaaagaaaagtattgtttggaggagcaaagttataagcctacctaagcatatcataaagctgtttaaaaataactcagacccggtcttgtggatggaaatgtagtgctcgagtcacattcttcttatagttgtaacaaatacagatgagtt

SEQ ID NO: 7891 - protein, 274 aa, Homo sapiens
MPEETQTQDQPMEEEEVETFAFQAEIAQLMSLIINTFYSNKEIFLRELISNSSDALDKIWYESLTDPSKLDSGKELHINLIPNKQDQTLTIVDTGIGMTKADLINNLGERMGRGTKVILHLKEDQTEYLEEQRIKEIVKKHSQLIGYPITLFVEKECDKEVSDDETEEKEDKEEEKEKEEKESKDKPEIEDVGSDEEEEKKDGDKKKKKTKEKYIDQEELNKTKPIWTRNPDDITNEEYGEFCKNLTNDWEDHLAVKHFSVEGQLEFRALLFVP

SEQ ID NO: 7892 - DNA, 2695 bp, Homo sapiens
tgagttgcttcagcatcctggtgttgctgtgccgtgggtcctgtgcggtcacttagccaagatgcctgaggaaacccagacccaagaccaaccgatggaggaggaggaggttgagacattcgcctttcaggcagaaattgcccagttgatgtcattgatcatcaatactttctactcgaacaaagagatctttctgagagagctcatttcaaattcatcagatgcattggacaaaatctggtatgaaagcttgacagatcccagtaaattagactctgggaaagagctgcatattaaccttataccaaacaaacaagatcaaactctcactattgtggatactggaattggaatgaccaaggctgacttgatcaataaccttggtactatcgccaagtctgggaccaaagcgttcatggaagctttgcaggctggtgcagatatctctatgattggccagttcggtgttagtttttattctgcttatttggttgctgagaaagtaactgtgatcaccaaacataatgatgatgagcagtacgcctgggagtcctcagcagggggatcattcacagtgaggacagacacaggtgaacgtatgggtcgtggaacaaagatgttggttctgatgaggaagaagaaaagaaggatggtgacaagaagaagaagaagactaaggaaaagtacatcgaccaagaagaactcaacaaaacaaagcccatctggaccagaaatcccgacgatattactaatgaggagtacggagaattctgcaagaacttgaccaatgactgggaagatcacttggcagtgaagcatttttcagttgaaggacagttggaattcagagcccttctatttgtcccatgacgtgctccttttgacctgtttgaaaacagaaagaaaaagaacaacatcaaattgtatgtacgcagagatttcatcatggataactgtgaggagctaatccctgaatatctgaacttcattagaggggtggtagactcggaggatctccctctaaacatttcccgtgagatgttgcaacaaagtaaaattttgaaagttatcaggaaaaatttggtcaaaaaatgcttagaactctttacagaactggcggaagataaagagaactgcaagaaattctatgagcagttctctaaaaacataaagcttggaatacaagaagactctcaaaatcggaagaagctttcagagctgttaaggtactacacgtctgcctctggtgatgagatggtttctctcaaggactactgcaccagaatgaaggaaaaacagaaacatatctattatatcacaggtgagaccaaggaccaggtagctaactcagcctttgtggaacgtcttgggaaacatggcttagaagtgatctatatgattgagcccattgatgagtactgtgtccaacagctgaaggaatttgaggggaagactttagtgccagtcaccaaagaaggcctggaacttccagaggatgaagaaaagaaaaagaaataggaagagaaaaaacaatgtttgagaacctctgcaaaaccatgaaagacatattggagaaaaaagttgaaaaggtggttgtgtcaaaccgattggtgacgtctccatgctgtattgtcacaagcacatatggctggacagaaaacatggagagaatcatgaaagctcaagccctaagagacaactcaacaatgggttatatggcagccaagaaacacctggagataaatcctgatgattccattattgagaccttaaggcaaaaggcagaggctgataagaatgacaagtctgtgaaggatctgctcatcttgctttacgaaactgcactcctgtcttctggcttcagtctggaagatccccagacacatgctaacaggacctacaggatgatcaaacttggtctgggtattgatgaagatgatcctgctgctgatgataccagtgctgctgtaactgaagaaatgccgcccctcgaaggagatgacgacacatcatgcatggaagaagtagactaacctctggctaagggatgacttaactgttcaatactctacaattcctccgataatatatattcaaggatgtttttctttatttttgttaatattaaaaagtctgtacggcatgacaacaactactttaaggggaagataagatttctgtctactaagtgatgctgtgataccttaggcactaaagcagagctagtaatgctttttgagtttcacgtcggtttattttcacagattggggtaacgtgcgttgtaagatgtatgtaacatgatgttaactttgtggtctaaagtgtttagctgtcaagccggattcctaagtagaccaaatcttgttatcgaagtgttcctgagctataccttgatgtttagaaaagtatttgttacatcttgtaggatctactttttgaacttttcatcccctatagttgacaattctgcatgtactagtcctctagaaataggttaaactgaagcaacttgatggaaggatctctccacagggcttgttttccaaagaaaagtattgtttggaggagcaaagttataagcctacctaagcatatcataaagctgtttaaaaataactcagacccggtcttgtggatggaaatgtagtgctcgagtcacattcttcttatagttgtaacaaatacagatgagtt

SEQ ID NO: 7893 - protein, 240 aa, Homo sapiens
MPEETQTQDQPMEEEEVETFAFQAEIAQLMSLIINTFYSNKEIFLRELISNSSDALDKIWYESLTDPSKLDSGKELHINLIPNKQDQTLTIVDTGIGMTKADLINNLGTIAKSGTKAFMEALQAGADISMIGQFGVSFYSAYLVAEKVTVITKHNDDEQYAWESSAGGSFTVRTDTGERMGRGTKMLVLMRKKKRRMVTRRRRRLRKSTSTKKNSTKQSPSGPEIPTILLMRSTENSART

SEQ ID NO: 7894 - DNA, 2692 bp, Homo sapiens
tgagttgcttcagcatcctggtgttgctgtgccgtgggtcctgtgcggtcacttagccaagatgcctgaggaaacccagacccaagaccaaccgatggaggaggaggaggttgagacattcgcctttcaggcagaaattgcccagttgatgtcattgatcatcaatactttctactcgaacaaagagatctttctgagagagctcatttcaaattcatcagatgcattggacaaaatctggtatgaaagcttgacagatcccagtaaattagactctgggaaagagctgcatattaaccttataccaaacaaacaagatcaaactctcactattgtggatactggaattggaatgaccaaggctgacttgatcaataaccttggtactatcgccaagtctgggaccaaagcgttcatggaagctttgcaggctggtgcagatatctctatgattggccagttcggtgttagtttttattctgcttatttggttgctgagaaagtaactgtgatcaccaaacataatgatgatgagcaactgaagaaaaggaagacaaagaagaagaaaaagaaaaagaagagaaagagtccaaagacaaacctgaaattgaagatgttggttctgatgaggaagaagaaaagaaggatggtgacaagaagaagaagaagactaaggaaaagtacatcgaccaagaagaactcaacaaaacaaagcccatctggaccagaaatcccgacgatattactaatgaggagtacggagaattctgcaagaacttgaccaatgactgggaagatcacttggcagtgaagcatttttcagttgaaggacagttggaattcagagcccttctatttgtcccatgacgtgctccttttgacctgtttgaaaacagaaagaaaaagaacaacatcaaattgtatgtacgcagagatttcatcatggataactgtgaggagctaatccctgaatatctgaacttcattagaggggtggtagactcggaggatctccctctaaacatttcccgtgagatgttgcaacaaagtaaaattttgaaagttatcaggaaaaatttggtcaaaaaatgcttagaactctttacagaactggcggaagataaagagaactgcaagaaattctatgagcagttctctaaaaacataaagcttggaatacaagaagactctcaaaatcggaagaagctttcagagctgttaaggtactacacgtctgcctctggtgatgagatggtttctctcaaggactactgcaccagaatgaaggaaaaacagaaacatatctattatatcacaggtgagaccaaggaccaggtagctaactcagcctttgtggaacgtcttgggaaacatggcttagaagtgatctatatgattgagcccattgatgagtactgtgtccaacagctgaaggaatttgaggggaagactttagtgccagtcaccaaagaaggcctggaacttccagaggatgaagaaaagaaaaagaaataggaagagaaaaaacaatgtttgagaacctctgcaaaaccatgaaagacatattggagaaaaaagttgaaaaggtggttgtgtcaaaccgattggtgacgtctccatgctgtattgtcacaagcacatatggctggacagaaaacatggagagaatcatgaaagctcaagccctaagagacaactcaacaatgggttatatggcagccaagaaacacctggagataaatcctgatgattccattattgagaccttaaggcaaaaggcagaggctgataagaatgacaagtctgtgaaggatctgctcatcttgctttacgaaactgcactcctgtcttctggcttcagtctggaagatccccagacacatgctaacaggacctacaggatgatcaaacttggtctgggtattgatgaagatgatcctgctgctgatgataccagtgctgctgtaactgaagaaatgccgcccctcgaaggagatgacgacacatcatgcatggaagaagtagactaacctctggctaagggatgacttaactgttcaatactctacaattcctccgataatatatattcaaggatgtttttctttatttttgttaatattaaaaagtctgtacggcatgacaacaactactttaaggggaagataagatttctgtctactaagtgatgctgtgataccttaggcactaaagcagagctagtaatgctttttgagtttcacgtcggtttattttcacagattggggtaacgtgcgttgtaagatgtatgtaacatgatgttaactttgtggtctaaagtgtttagctgtcaagccggattcctaagtagaccaaatcttgttatcgaagtgttcctgagctataccttgatgtttagaaaagtatttgttacatcttgtaggatctactttttgaacttttcatcccctatagttgacaattctgcatgtactagtcctctagaaataggttaaactgaagcaacttgatggaaggatctctccacagggcttgttttccaaagaaaagtattgtttggaggagcaaagttataagcctacctaagcatatcataaagctgtttaaaaataactcagacccggtcttgtggatggaaatgtagtgctcgagtcacattcttcttatagttgtaacaaatacagatgagtt

SEQ ID NO: 7895 - protein, 239 aa, Homo sapiens
MPEETQTQDQPMEEEEVETFAFQAEIAQLMSLIINTFYSNKEIFLRELISNSSDALDKIWYESLTDPSKLDSGKELHINLIPNKQDQTLTIVDTGIGMTKADLINNLGTIAKSGTKAFMEALQAGADISMIGQFGVSFYSAYLVAEKVTVITKHNDDEQLKKRKTKKKKKKKKRKSPKTNLKLKMLVLMRKKKRRMVTRRRRRLRKSTSTKKNSTKQSPSGPEIPTILLMRSTENSART

SEQ ID NO: 7896 - DNA, 3198 bp, Homo sapiens
aattaattttgattacatttaaaattctatatggcaaaaataccataattaaagataaaaggcaaagaacaaattgggaaaaatatttttcaacatatataaccaagggctaatttctctaacacctaaaaagttcttataaatcaataaaaagaaaaccaacatctcaatggaaaaagaacaaagctcataaagagttcacagaaaaaggatatacaaatggctttaaacatgtgaaagaatgttcaacttcactcacaataagaaaaaatacaaattatgagttgcttcagcatcctggtgttgctgtgccgtgggtcctgtgcggtcacttagccaagatgcctgaggaaacccagacccaagaccaaccgatggaggaggaggaggttgagacattcgcctttcaggcagaaattgcccagttgatgtcattgatcatcaatactttctactcgaacaaagagatctttctgagagagctcatttcaaattcatcagatgcattggacaaaatctggtatgaaagcttgacagatcccagtaaattagactctgggaaagagctgcatattaaccttataccaaacaaacaagatcaaactctcactattgtggatactggaattggaatgaccaaggctgacttgatcaataaccttggtactatcgccaagtctgggaccaaagcgttcatggaagctttgcaggctggtgcagatatctctatgattggccagttcggtgttagtttttattctgcttatttggttgctgagaaagtaactgtgatcaccaaacataatgatgatgagcagtacgcctgggagtcctcagcagggggatcattcacagtgaggacagacacaggtgaacgtatgggtcgtggaacaaaggttatcctacacctgaaagaagaccaaactgagtacttggaggaacaaagaataaaggagattgtgaagaaacattctcagcttattggatatcccattactctttttgtggagaaggaatgtgataaagaagtcagcgacgatgagactgaagaaaaggaagacaaagaagaagaaaaagaaaaagaagagaaagagtccaaagacaaacctgaaattgaagatgttggttctgatgaggaagaagaaaagaaggatggtgacaagaagaagaagaagactaaggaaaagtacatcgaccaagaagaactcaacaaaacaaagcccatctggaccagaaatcccgacgatattactaatgaggagtacggagaattctgcaagaacttgaccaatgactgggaagatcacttggcagtgaagcatttttcagttgaaggacagttggaattcagagcccttctatttgtcccatgacgtgctccttttgacctgtttgaaaacagaaagaaaaagaacaacatcaaattgtatgtacgcagagatttcatcatggataactgtgaggagctaatccctgaatatctgaacttcattagaggggtggtagactcggaggatctccctctaaacatttcccgtgagatgttgcaacaaagtaaaattttgaaagttatcaggaaaaatttggtcaaaaaatgcttagaactctttacagaactggcggaagataaagagaactgcaagaaattctatgagcagttctctaaaaacataaagcttggaatacaagaagactctcaaaatcggaagaagctttcagagctgttaaggtactacacgtctgcctctggtgatgagatggtttctctcaaggactactgcaccagaatgaaggaaaaacagaaacatatctattatatcacaggtgagaccaaggaccaggtagctaactcagcctttgtggaacgtcttgggaaacatggcttagaagtgatctatatgattgagcccattgatgagtactgtgtccaacagctgaaggaatttgaggggaagactttagtgccagtcaccaaagaaggcctggaacttccagaggatgaagaaaagaaaaagaaataggaagagaaaaaacaatgtttgagaacctctgcaaaaccatgaaagacatattggagaaaaaagttgaaaaggtggttgtgtcaaaccgattggtgacgtctccatgctgtattgtcacaagcacatatggctggacagaaaacatggagagaatcatgaaagctcaagccctaagagacaactcaacaatgggttatatggcagccaagaaacacctggagataaatcctgatgattccattattgagaccttaaggcaaaaggcagaggctgataagaatgacaagtctgtgaaggatctgctcatcttgctttacgaaactgcactcctgtcttctggcttcagtctggaagatccccagacacatgctaacaggacctacaggatgatcaaacttggtctgggtattgatgaagatgatcctgctgctgatgataccagtgctgctgtaactgaagaaatgccgcccctcgaaggagatgacgacacatcatgcatggaagaagtagactaacctctggctaagggatgacttaactgttcaatactctacaattcctccgataatatatattcaaggatgtttttctttatttttgttaatattaaaaagtctgtacggcatgacaacaactactttaaggggaagataagatttctgtctactaagtgatgctgtgataccttaggcactaaagcagagctagtaatgctttttgagtttcacgtcggtttattttcacagattggggtaacgtgcgttgtaagatgtatgtaacatgatgttaactttgtggtctaaagtgtttagctgtcaagccggattcctaagtagaccaaatcttgttatcgaagtgttcctgagctataccttgatgtttagaaaagtatttgttacatcttgtaggatctactttttgaacttttcatcccctatagttgacaattctgcatgtactagtcctctagaaataggttaaactgaagcaacttgatggaaggatctctccacagggcttgttttccaaagaaaagtattgtttggaggagcaaagttataagcctacctaagcatatcataaagctgtttaaaaataactcagacccggtcttgtggatggaaatgtagtgctcgagtcacattcttcttatagttgtaacaaatacagatgagtt

SEQ ID NO: 7897 - protein, 343 aa, Homo sapiens
MPEETQTQDQPMEEEEVETFAFQAEIAQLMSLIINTFYSNKEIFLRELISNSSDALDKIWYESLTDPSKLDSGKELHINLIPNKQDQTLTIVDTGIGMTKADLINNLGTIAKSGTKAFMEALQAGADISMIGQFGVSFYSAYLVAEKVTVITKHNDDEQYAWESSAGGSFTVRTDTGERMGRGTKVILHLKEDQTEYLEEQRIKEIVKKHSQLIGYPITLFVEKECDKEVSDDETEEKEDKEEEKEKEEKESKDKPEIEDVGSDEEEEKKDGDKKKKKTKEKYIDQEELNKTKPIWTRNPDDITNEEYGEFCKNLTNDWEDHLAVKHFSVEGQLEFRALLFVP

SEQ ID NO: 7898 - DNA, 2312 bp, Homo sapiens
ggagctgctggtgggaggcagccacttgagatcaccaggcctcctgtagaccggcgggtgcagggcccggtcccagagttaagggaaagtcgtttggaaaccccaggccaacaggaccctttggcagctgaggctggaaacagcggaaccaaaggcagacggtcctcagttgcttgggcggacgtggacccaatctgtccgtccttacaagtttcccccaggggcaggacctagacgcgcggcgcattcaggttctcctggaccgtagtggtagtcgctggcccgagttagaggccagctgagaagtcttcgtgcttcagatttgtttacctacaaaatgcttcggtatccatatttttgtagaatgtataaagaatgcctttcatgttggttggaatctggcatacctaatttaggtgtctggccaaacagaatacatactacagcagaaaaatatagagaatatgaagcccgggagcaaacagatcaaactcaagcccaggagttacacagatctcaagatagagattttgaaactatggctaaattacatattccagtaatggtggatgaagttgttcattgtttgtcaccacaaaaaggacagatttttctagatatgacatttggttcgggagggcacacaaaagccattctgcagaaggagtcagatattgttctctatgccttggacagagacccaacagcttatgcattagctgaacatctttcagagttgtatcctaaacaaatccgagctatgctgggccagttcagccaggcagaagccttattaatgaaagctggagtgcagccaggaacttttgatggagttcttatggatcttgggtgttcctccatgcaacttgatactcctgaaagaggtttttcccttcggaaagatggccctttggacatgagaatggatggtggcagatcaacaggcacttgcatctatcctaagaacatacggggaggagaagcatgccaagaaaatcgcttcagcaattgttcaggcacgcagcatctaccccatcaccagaacccagcagcttgccagcatcgttgcaggagcatttcctccctctgctatttatacacggaaagacttactacagcgatctacccatattgccaccaagactttccaggctcttcgcatatttgtgaacaatgagctcaatgaactctacacgggactgaagacagctcagaagtttctgagacctggtggtcgtcttgttgccctctccttccattcactagaggatcgcatcgtcaaaagatttttgcttggaataagcatgacagaaagatttaacctaagtgttagacaacaagtgatgaaaacatctcaattgggttcagatcacgaaaacacggaagaagtctctatgagaagagctcctttaatgtgggaattgatacacaagaaggtacttagtccacaagatcaggatgtacaagataaccccagagggcgctcagccaagcttagagcagctatcaaattataagttatcatcatcttattcttcaaatttttttctcacaatttctctaatctttactcatgttatgtccctgaatgtcttggtataggtttaagtgtgggacagtctgaaaattgatagcatttagcatttcttttttctcaaaaagaaactgtaggaaatacatgacagagaaagttacactcagggagcagcagcacctccagactggaaaaatatgttaatctttgcatcatattggactcttgaaggcaatccttcctctggccaggaaattttttaaaaaataatactgtgttgtgtttatctaaatacgtaaactcaagctaccaaagagaaagatgttgtaatcatatctgcatgtcctaaattttgaatttagatattccaatttgcatcagtctttctgtggctcaaataatgatgattatggaatgaattttaatgtccctacttgtgaataattagctttctcaaatgtaggctttttacaaattttaaattttaaaatattagtttaaatgtgtgttatactgataaaatttcatctttcaaattatagtctattattttaaagggatttttcagtatgatatgggccattttgttcatctatcgcaaagtaaaaatgtaaaatccttacagagaattgtttcacaaaacttatatttcatgtcaattgtatttattttaataatagctcacaatgcctttagtaagtaataaagtctcttattagaatcttgtattttttaattgagctaatcaaaataattcagccaagtctatttgaaatag

SEQ ID NO: 7899 - protein, 279 aa, Homo sapiens
MLRYPYFCRMYKECLSCWLESGIPNLGVWPNRIHTTAEKYREYEAREQTDQTQAQELHRSQDRDFETMAKLHIPVMVDEVVHCLSPQKGQIFLDMTFGSGGHTKAILQKESDIVLYALDRDPTAYALAEHLSELYPKQIRAMLGQFSQAEALLMKAGVQPGTFDGVLMDLGCSSMQLDTPERGFSLRKDGPLDMRMDGGRSTGTCIYPKNIRGGEACQENRFSNCSGTQHLPHHQNPAACQHRCRSISSLCYLYTERLTTAIYPYCHQDFPGSSHICEQ

SEQ ID NO: 7900 - DNA, 2388 bp, Homo sapiens
agtttcccccaggggcaggacctagacgcgcggcgcattcaggttctcctggaccgtagtggtagtcgctggcccgagttagaggccagctgagaagtcttcgtgcttcagatttgtttacctacaaaatgcttcggtatccatatttttgtagaatgtataaagaatgcctttcatgttggttggaatctggcatacctaatttaggtgtctggccaaacagaatacatactacagcagaaaaatatagagaatatgaagcccgggagcaaacagatcaaactcaagcccaggagttacacagatctcaagatagagattttgaaactatggctaaattacatattccagtaatggtggatgaagttgttcattgtttgtcaccacaaaaaggacagatttttctagatatgacatttggttcgggagggcacacaaaagccattctgcagaaggagtcagatattgttctctatgccttggacagagacccaacagcttatgcattagctgaacatctttcagagttgtatcctaaacaaatccgagctatgctgggccagttcagccaggcagaagccttattaatgaaagctggagtgcagccaggaacttttgatggagttcttatggatcttgggtgttcctccatgcaacttgatactcctgaaagaggtttttcccttcggaaagatggccctttggacatgagaatggatggtggcagatcaacaggcacttgcatctatcctaagaacatacggggaggagaagcatgccaagaaaatcgcttcagcaattgttcaggcacgcagcatctaccccatcaccagaacccagcagcttgccagcatcgttgcaggagcatttcctccctctgctatttatacacggaaagacttactacagcgatctacccatattgccaccaagactttccaggctcttcgcatatttgtgaacaatgagctcaatgaactctacacgggactgaagacagctcagaagtttctgagacctggtggtcgtcttgttgccctctccttccattcactagaggatcgcatcgtcaaaagatttttgcttggaataagcatgacagaaagatttaacctaagtgttagacaacaagtgatgaaaacatctcaattgggttcagatcacgaaaacacggaagaagtctctatgagaagagctcctttaatgtgggaattgatacacaagaaggtacttagtccacaagatcaggatgtacaagataaccccagagggcgctcagccaagcttagagcagctatcaaattataagttatcatcatcttattcttcaaatttttttctcacaatttctctaatctttactcatgttatgtccctgaatgtcttggtataggtttaagtgtgggacagtctgaaaattgatagcatttagcatttcttttttctcaaaaagaaactgtaggaaatacatgacagagaaagttacactcagggagcagcagcacctccagactggaaaaatatgttaatctttgcatcatattggactcttgaaggcaatccttcctctggccaggaaattttttaaaaaataatactgtgttgtgtttatctaaatacgtaaactcaagctaccaaagagaaagatgttgtaatcatatctgcatgtcctaaattttgaatttagatattccaatttgcatcagtctttctgtggctcaaataatgatgattatggaatgaattttaatgtccctacttgtgaataattagctttctcaaatgtaggctttttacaaattttaaattttaaaatattagtttaaatgtgtgttatactgataaaatttcatctttcaaattatagtctattattttaaagggatttttcagtatgatatgggccattttgttcatctatcgcaaagtaaaaatgtaaaatccttacagagaattgtttcacaaaacttatatttcatgtcaattgtatttattttaataatagctcacaatgcctttagtaagtaataaagtctcttattagaatcttgtattttttaattgagctaatcaaaataattcagccaagtctatttgaaatagaaaactgtctatttaatatagtaaaatcaatgctcccttaatgttgttacaaagatatggtaactgtaatatgggtaaaagtttattcaagaaaagagtacttggtagaagattctttaacaaattgaggagattgattcataattcacatgtcaattttttatagtaatatgtacttctaatttattatttatacttaaattgtgacctgaaagatgagttggagataattagtcaaagggcacatggagtatggaagggggcatgttgattaaccatacatag

SEQ ID NO: 7901 - protein, 279 aa, Homo sapiens; identical to SEQ ID NO: 7899

SEQ ID NO: 7902 - DNA, 4068 bp, Homo sapiens
ctagacgcgcggcgcattcaggttctcctggaccgtagtggtagtcgctggcccgagttagaggccagctgagaagtcttcgtgcttcagatttgtttacctacaaaatgcttcggtatccatatttttgtagaatgtataaagaatgcctttcatgttggttggaatctggcatacctaatttaggtgtctggccaaacagaatacatactacagcagaaaaatatagagaatatgaagcccgggagcaaacagatcaaactcaagcccaggagttacacagatctcaagatagagattttgaaactatggctaaattacatattccagtaatggtggatgaagttgttcattgtttgtcaccacaaaaaggacagatttttctagatatgacatttggttcgggagggcacacaaaagccattctgcagaaggagtcagatattgttctctatgccttggacagagacccaacagcttatgcattagctgaacatctttcagagttgtatcctaaacaaatccgagctatgctgggccagttcagccaggcagaagccttattaatgaaagctggagtgcagccaggaacttttgatggagttcttatggatcttgggtgttcctccatgcaacttgatactcctgaaagaggtttttcccttcggaaagatggccctttggacatgagaatggatggtggcaggtaccctgacatgcccactgctgctgatgttgtgaatgctttagatcaacaggcacttgcatctatcctaagaacatacggggaggagaagcatgccaagaaaatcgcttcagcaattgttcaggcacgcagcatctaccccatcaccagaacccagcagcttgccagcatcgttgcagaatactctgaaacatatttcccagtggcccaaactctttattaggaaaatggacgaattgaatagcaaatggagcatttcctccctctgctatttatacacggaaagacttactacagcgatctacccatattgccaccaagactttccaggctcttcgcatatttgtgaacaatgagctcaatgaactctacacgggactgaagacagctcagaagtttctgagacctggtggtcgtcttgttgccctctccttccattcactagaggatcgcatcgtcaaaagatttttgcttggaataagcatgacagaaagatttaacctaagtgttagacaacaagtgatgaaaacatctcaattgggttcagatcacgaaaacacggaagaagtctctatgagaagagctcctttaatgtgggaattgatacacaagaaggtacttagtccacaagatcaggatgtacaagataaccccagagggcgctcagccaagcttagagcagctatcaaattataagttatcatcatcttattcttcaaatttttttctcacaatttctctaatctttactcatgttatgtccctgaatgtcttggtataggtttaagtgtgggacagtctgaaaattgatagcatttagcatttcttttttctcaaaaagaaactgtaggaaatacatgacagagaaagttacactcagggagcagcagcacctccagactggaaaaatatgttaatctttgcatcatattggactcttgaaggcaatccttcctctggccaggaaattttttaaaaaataatactgtgttgtgtttatctaaatacgtaaactcaagctaccaaagagaaagatgttgtaatcatatctgcatgtcctaaattttgaatttagatattccaatttgcatcagtctttctgtggctcaaataatgatgattatggaatgaattttaatgtccctacttgtgaataattagctttctcaaatgtaggctttttacaaattttaaattttaaaatattagtttaaatgtgtgttatactgataaaatttcatctttcaaattatagtctattattttaaagggatttttcagtatgatatgggccattttgttcatctatcgcaaagtaaaaatgtaaaatccttacagagaattgtttcacaaaacttatatttcatgtcaattgtatttattttaataatagctcacaatgcctttagtaagtaataaagtctcttattagaatcttgtattttttaattgagctaatcaaaataattcagccaagtctatttgaaatagaaaactgtctatttaatatagtaaaatcaatgctcccttaatgttgttacaaagatatggtaactgtaatatgggtaaaagtttattcaagaaaagagtacttggtagaagattctttaacaaattgaggagattgattcataattcacatgtcaattttttatagtaatatgtacttctaatttattatttatacttaaattgtgacctgaaagatgagttggagataattagtcaaagggcacatggagtatggaagggggcatgttgattaaccatacatagaaataaatattctcttagttatccttgaaatcatatttatactattaatttgctcagtgcacttttttcaaatacagaaaaaagattctccattatagttacaaattttaggttggtgaatccaagtgaatgaaatatcagcataactatgtgggcaaaatagatagaattaaatgcatgaattttcctcagacttattttatctgcctctgtaatatttaactttagtacccaggcttgttcactacttctgctttacaggctttatttaaatctgaacaatcctacagggaaatcagaattaggaaaaaaatctggagaacaatatggttgaaatagaaacaagagaatgcacctaggttaattccctgaatcctacttgaacattgtataaatttctctttgcatataatacatatttgtgaatgagacatattcccaaaaaattcttatctctgtatgtgattggaaaagaaaagatcacatttgtatattcaacaatctttcacctatttcataagtcattttttcaccctgtatagtatgggaattattttttatgttaaatagaaactgaatgtactgggttgaatggtgtcctctccaaaattcatgtacttcctggagcctcagtatgtgaccttatttggaaatactgtggttgtggttgtaagtagctaagatgaggtcatactggagcagggcaggcccttaatccaatatgactggtgttccttataagagaagatagggcgggcatggtggctcacgcctgtaatcccagcactgtgggaggccaagccaggcaaatcgcttgaggctgaggagttcaagaccagcctggccaacatggcgaaaacccatctctactaaaaataaaattagccatgcgtggtgcttgtaatgtcagctacccaggagtctgaggcacaagaatcactcgaacctgggaggtggaggttgcgagatcacaccactgcactccagtgtgagcaacagaacgagactctgtctcaaaaaaaaaaaaaaaaaggaagaaagagaagatagagacacaggggagaatgccacatgaagctggaggcagagattggagtgatacattgtgggaaccctcagaagataggaaaaaagcatggaatagattctccctcagagttccagtagttgccaaccctgctaacatggttttgcacatctagcatccagaacagtgagaatgtatttctgctgttttaaggtacccagttcatggtaatttgttacagcaatcctaggaagctaatactctgacagaaaaaaatcttggataatatgcatgagaaaaatccttcaataaacacaaaattggtttcaaaatgttttcatgtaaaaataaattaacttttctgtaattagattgtgttttatagtaattcttgcctgcttcttagtctttgttgtaggatgcataataaaatacatgaatgagttttaaatggttagctttggagaatggttttgggaagttcctacagtacacagaaataaaagctaatgttactatgaatgcgcattacttttctaataaaatgtttctgaatctc

SEQ ID NO: 7903 - protein, 273 aa, Homo sapiens
MLRYPYFCRMYKECLSCWLESGIPNLGVWPNRIHTTAEKYREYEAREQTDQTQAQELHRSQDRDFETMAKLHIPVMVDEVVHCLSPQKGQIFLDMTFGSGGHTKAILQKESDIVLYALDRDPTAYALAEHLSELYPKQIRAMLGQFSQAEALLMKAGVQPGTFDGVLMDLGCSSMQLDTPERGFSLRKDGPLDMRMDGGRYPDMPTAADVVNALDQQALASILRTYGEEKHAKKIASAIVQARSIYPITRTQQLASIVAEYSETYFPVAQTLY

SEQ ID NO: 7904 - DNA, 4177 bp, Homo sapiens
ctagacgcgcggcgcattcaggttctcctggaccgtagtggtagtcgctggcccgagttagaggccagctgagaagtcttcgtgcttcagatttgtttacctacaaaatgcttcggtatccatatttttgtagaatgtataaagaatgcctttcatgttggttggaatctggcatacctaatttaggtgtctggccaaacagaatacatactacagcagaaaaatatagagaatatgaagcccgggagcaaacagatcaaactcaagcccaggagttacacagatctcaagatagagattttgaaactatggctaaattacatattccagtaatggtggatgaagttgttcattgtttgtcaccacaaaaaggacagatttttctagatatgacatttggttcgggagggcacacaaaagccattctgcagaaggagtcagatattgttctctatgccttggacagagacccaacagcttatgcattagctgaacatctttcagagttgtatcctaaacaaatccgagctatgctgggccagttcagccaggcagaagccttattaatgaaagctggagtgcagccaggaacttttgatggagttcttatggatcttgggtgttcctccatgcaacttgatactcctgaaagaggtttttcccttcggaaagatggccctttggacatgagaatggatggtggcaggtaccctgacatgcccactgctgctgatgttgtgaatgctttagatcaacaggcacttgcatctatcctaagaacatacggggaggagaagcatgccaagaaaatcgcttcagcaattgttcaggcacgcagcatctaccccatcaccagaacccagcagcttgccagcatcgttgcagaatactctgaaacatatttcccagtggcccaaactctttattaggaaaatggacgaattgaatagcaaatggagcatttcctccctctgctatttatacacggaaagacttactacagcgatctacccatattgccaccaagactttccaggctcttcgcatatttgtgaacaatgagctcaatgaactctacacgggactgaagacagctcagaagtttctgagacctggtggtcgtcttgttgccctctccttccattcactagaggatcgcatcgtcaaaagatttttgcttggaataagcatgacagaaagatttaacctaagtgttagacaacaagtgatgaaaacatctcaattgggttcagatcacgaaaacacggaagaagtctctatgagaagagctcctttaatgtgggaattgatacacaagaaggtacttagtccacaagatcaggatgtacaagataaccccagagggcgctcagccaagcttagagcagctatcaaattataagttatcatcatcttattcttcaaatttttttctcacaatttctctaatctttactcatgttatgtccctgaatgtcttggtataggtttaagtgtgggacagtctgaaaattgatagcatttagcatttcttttttctcaaaaagaaactgtaggaaatacatgacagagaaagttacactcagggagcagcagcacctccagactggaaaaatatgttaatctttgcatcatattggactcttgaaggcaatccttcctctggccaggaaattttttaaaaaataatactgtgttgtgtttatctaaatacgtaaactcaagctaccaaagagaaagatgttgtaatcatatctgcatgtcctaaattttgaatttagatattccaatttgcatcagtctttctgtggctcaaataatgatgattatggaatgaattttaatgtccctacttgtgaataattagctttctcaaatgtaggctttttacaaattttaaattttaaaatattagtttaaatgtgtgttatactgataaaatttcatctttcaaattatagtctattattttaaagggatttttcagtatgatatgggccattttgttcatctatcgcaaagtaaaaatgtaaaatccttacagagaattgtttcacaaaacttatatttcatgtcaattgtatttattttaataatagctcacaatgcctttagtaagtaataaagtctcttattagaatcttgtattttttaattgagctaatcaaaataattcagccaagtctatttgaaatagaaaactgtctatttaatatagtaaaatcaatgctcccttaatgttgttacaaagatatggtaactgtaatatgggtaaaagtttattcaagaaaagagtacttggtagaagattctttaacaaattgaggagattgattcataattcacatgtcaattttttatagtaatatgtacttctaatttattatttatacttaaattgtgacctgaaagatgagttggagataattagtcaaagggcacatggagtatggaagggggcatgttgattaaccatacatagaaataaatattctcttagttatccttgaaatcatatttatactattaatttgctcagtgcacttttttcaaatacagaaaaaagattctccattatagttacaaattttaggttggtgaatccaagtgaatgaaatatcagcataactatgtgggcaaaatagatagaattaaatgcatgaattttcctcagacttattttatctgcctctgtaatatttaactttagtacccaggcttgttcactacttctgctttacaggctttatttaaatctgaacaatcctacagggaaatcagaattaggaaaaaaatctggagaacaatatggttgaaatagaaacaagagaatgcacctaggttaattccctgaatcctacttgaacattgtataaatttctctttgcatataatacatatttgtgaatgagacatattcccaaaaaattcttatctctgtatgtgattggaaaagaaaagatcacatttgtatattcaacaatctttcacctatttcataagtcattttttcaccctgtatagtatgggaattattttttatgttaaatagaaactgaatgtactgggttgaatggtgtcctctccaaaattcatgtacttcctggagcctcagtatgtgaccttatttggaaatactgtggttgtggttgtaagtagctaagatgaggtcatactggagcagggcaggcccttaatccaatatgactggtgttccttataagagaagatagggcgggcatggtggctcacgcctgtaatcccagcactgtgggaggccaagccaggcaaatcgcttgaggctgaggagttcaagaccagcctggccaacatggcgaaaacccatctctactaaaaataaaattagccatgcgtggtgcttgtaatgtcagctacccaggagtctgaggcacaagaatcactcgaacctgggaggtggaggttgcgagatcacaccactgcactccagtgtgagcaacagaacgagactctgtctcaaaaaaaaaaaaaaaaaggaagaaagagaagatagagacacaggggagaatgccacatgaagctggaggcagagattggagtgatacattgtgggaaccctcagaagataggaaaaaagcatggaatagattctccctcagagttccagtagttgccaaccctgctaacatggttttgcacatctagcatccagaacagtgagaatgtatttctgctgttttaaggtacccagttcatggtaatttgttacagcaatcctaggaagctaatactctgacagaaaaaaatcttggataatatgcatgagaaaaatccttcaataaacacaaaattggtttcaaaatgttttcatgtaaaaataaattaacttttctgtaattagattgtgttttatagtaattcttgcctgcttcttagtctttgttgtaggatgcataataaaatacatgaatgagttttaaatggttagctttggagaatggttttgggaagttcctacagtacacagaaataaaagctaatgttactatgaatgcgcattacttttctaataaaatgtttctgaatctctgtcttgactgccttctatgaatcattttaacatagtatcaatgtcattgtgtagtacatcagttcttaacagtttttagttcattacttaaataaaatttaataacta

SEQ ID NO: 7905 - protein, 273 aa, Homo sapiens; identical to SEQ ID NO: 7903

SEQ ID NO: 7906 - DNA, 3995 bp, Homo sapiens
agacgcgcggcgcattcaggttctcctggaccgtagtggtagtcgctggcccgagttagaggccagctgagaagtcttcgtgcttcagatttgtttacctacaaaatgcttcggtatccatatttttgtagaatgtataaagaatgcctttcatgttggttggaatctggcatacctaatttaggtgtctggccaaacagaatacatactacagcagaaaaatatagagaatatgaagcccgggagcaaacagatcaaactcaagcccaggagttacacagatctcaagatagagattttgaaactatggctaaattacatattccagtaatggtggatgaagttgttcattgtttgtcaccacaaaaaggacagatttttctagatatgacatttggttcgggagggcacacaaaagccattctgcagaaggagtcagatattgttctctatgccttggacagagacccaacagcttatgcattagctgaacatctttcagagttgtatcctaaacaaatccgagctatgctgggccagttcagccaggcagaagccttattaatgaaagctggagtgcagccaggaacttttgatggagttcttatggatcttgggtgttcctccatgcaacttgatactcctgaaagaggtttttcccttcggaaagatggccctttggacatgagaatggatggtggcaggtaccctgacatgcccactgctgctgatgttgtgaatgctttagatcaacaggcacttgcatctatcctaagaacatacggggaggagaagcatgccaagaaaatcgcttcagcaattgttcaggcacgcagcatctaccccatcaccagaacccagcagcttgccagcatcgttgcaggagcatttcctccctctgctatttatacacggaaagacttactacagcgatctacccatattgccaccaagactttccaggctcttcgcatatttgtgaacaatgagctcaatgaactctacacgggactgaagacagctcagaagtttctgagacctggtggtcgtcttgttgccctctccttccattcactagaggatcgcatcgtcaaaagatttttgcttggaataagcatgacagaaagatttaacctaagtgttagacaacaagtgatgaaaacatctcaattgggttcagatcacgaaaacacggaagaagtctctatgagaagagctcctttaatgtgggaattgatacacaagaaggtacttagtccacaagatcaggatgtacaagataaccccagagggcgctcagccaagcttagagcagctatcaaattataagttatcatcatcttattcttcaaatttttttctcacaatttctctaatctttactcatgttatgtccctgaatgtcttggtataggtttaagtgtgggacagtctgaaaattgatagcatttagcatttcttttttctcaaaaagaaactgtaggaaatacatgacagagaaagttacactcagggagcagcagcacctccagactggaaaaatatgttaatctttgcatcatattggactcttgaaggcaatccttcctctggccaggaaattttttaaaaaataatactgtgttgtgtttatctaaatacgtaaactcaagctaccaaagagaaagatgttgtaatcatatctgcatgtcctaaattttgaatttagatattccaatttgcatcagtctttctgtggctcaaataatgatgattatggaatgaattttaatgtccctacttgtgaataattagctttctcaaatgtaggctttttacaaattttaaattttaaaatattagtttaaatgtgtgttatactgataaaatttcatctttcaaattatagtctattattttaaagggatttttcagtatgatatgggccattttgttcatctatcgcaaagtaaaaatgtaaaatccttacagagaattgtttcacaaaacttatatttcatgtcaattgtatttattttaataatagctcacaatgcctttagtaagtaataaagtctcttattagaatcttgtattttttaattgagctaatcaaaataattcagccaagtctatttgaaatagaaaactgtctatttaatatagtaaaatcaatgctcccttaatgttgttacaaagatatggtaactgtaatatgggtaaaagtttattcaagaaaagagtacttggtagaagattctttaacaaattgaggagattgattcataattcacatgtcaattttttatagtaatatgtacttctaatttattatttatacttaaattgtgacctgaaagatgagttggagataattagtcaaagggcacatggagtatggaagggggcatgttgattaaccatacatagaaataaatattctcttagttatccttgaaatcatatttatactattaatttgctcagtgcacttttttcaaatacagaaaaaagattctccattatagttacaaattttaggttggtgaatccaagtgaatgaaatatcagcataactatgtgggcaaaatagatagaattaaatgcatgaattttcctcagacttattttatctgcctctgtaatatttaactttagtacccaggcttgttcactacttctgctttacaggctttatttaaatctgaacaatcctacagggaaatcagaattaggaaaaaaatctggagaacaatatggttgaaatagaaacaagagaatgcacctaggttaattccctgaatcctacttgaacattgtataaatttctctttgcatataatacatatttgtgaatgagacatattcccaaaaaattcttatctctgtatgtgattggaaaagaaaagatcacatttgtatattcaacaatctttcacctatttcataagtcattttttcaccctgtatagtatgggaattattttttatgttaaatagaaactgaatgtactgggttgaatggtgtcctctccaaaattcatgtacttcctggagcctcagtatgtgaccttatttggaaatactgtggttgtggttgtaagtagctaagatgaggtcatactggagcagggcaggcccttaatccaatatgactggtgttccttataagagaagatagggcgggcatggtggctcacgcctgtaatcccagcactgtgggaggccaagccaggcaaatcgcttgaggctgaggagttcaagaccagcctggccaacatggcgaaaacccatctctactaaaaataaaattagccatgcgtggtgcttgtaatgtcagctacccaggagtctgaggcacaagaatcactcgaacctgggaggtggaggttgcgagatcacaccactgcactccagtgtgagcaacagaacgagactctgtctcaaaaaaaaaaaaaaaaaggaagaaagagaagatagagacacaggggagaatgccacatgaagctggaggcagagattggagtgatacattgtgggaaccctcagaagataggaaaaaagcatggaatagattctccctcagagttccagtagttgccaaccctgctaacatggttttgcacatctagcatccagaacagtgagaatgtatttctgctgttttaaggtacccagttcatggtaatttgttacagcaatcctaggaagctaatactctgacagaaaaaaatcttggataatatgcatgagaaaaatccttcaataaacacaaaattggtttcaaaatgttttcatgtaaaaataaattaacttttctgtaattagattgtgttttatagtaattcttgcctgcttcttagtctttgttgtaggatgcataataaaatacatgaatgagttttaaatggttagctttggagaatggttttgggaagttcctacagtacacagaaataaaagctaatgttactatgaatgcgcattacttttctaataaaatgtttctgaatctc

SEQ ID NO: 7907 - protein, 407 aa, Homo sapiens
MLRYPYFCRMYKECLSCWLESGIPNLGVWPNRIHTTAEKYREYEAREQTDQTQAQELHRSQDRDFETMAKLHIPVMVDEVVHCLSPQKGQIFLDMTFGSGGHTKAILQKESDIVLYALDRDPTAYALAEHLSELYPKQIRAMLGQFSQAEALLMKAGVQPGTFDGVLMDLGCSSMQLDTPERGFSLRKDGPLDMRMDGGRYPDMPTAADVVNALDQQALASILRTYGEEKHAKKIASAIVQARSIYPITRTQQLASIVAGAFPPSAIYTRKDLLQRSTHIATKTFQALRIFVNNELNELYTGLKTAQKFLRPGGRLVALSFHSLEDRIVKRFLLGISMTERFNLSVRQQVMKTSQLGSDHENTEEVSMRRAPLMWELIHKKVLSPQDQDVQDNPRGRSAKLRAAIKL

SEQ ID NO: 7908 - DNA, 4104 bp, Homo sapiens
agacgcgcggcgcattcaggttctcctggaccgtagtggtagtcgctggcccgagttagaggccagctgagaagtcttcgtgcttcagatttgtttacctacaaaatgcttcggtatccatatttttgtagaatgtataaagaatgcctttcatgttggttggaatctggcatacctaatttaggtgtctggccaaacagaatacatactacagcagaaaaatatagagaatatgaagcccgggagcaaacagatcaaactcaagcccaggagttacacagatctcaagatagagattttgaaactatggctaaattacatattccagtaatggtggatgaagttgttcattgtttgtcaccacaaaaaggacagatttttctagatatgacatttggttcgggagggcacacaaaagccattctgcagaaggagtcagatattgttctctatgccttggacagagacccaacagcttatgcattagctgaacatctttcagagttgtatcctaaacaaatccgagctatgctgggccagttcagccaggcagaagccttattaatgaaagctggagtgcagccaggaacttttgatggagttcttatggatcttgggtgttcctccatgcaacttgatactcctgaaagaggtttttcccttcggaaagatggccctttggacatgagaatggatggtggcaggtaccctgacatgcccactgctgctgatgttgtgaatgctttagatcaacaggcacttgcatctatcctaagaacatacggggaggagaagcatgccaagaaaatcgcttcagcaattgttcaggcacgcagcatctaccccatcaccagaacccagcagcttgccagcatcgttgcaggagcatttcctccctctgctatttatacacggaaagacttactacagcgatctacccatattgccaccaagactttccaggctcttcgcatatttgtgaacaatgagctcaatgaactctacacgggactgaagacagctcagaagtttctgagacctggtggtcgtcttgttgccctctccttccattcactagaggatcgcatcgtcaaaagatttttgcttggaataagcatgacagaaagatttaacctaagtgttagacaacaagtgatgaaaacatctcaattgggttcagatcacgaaaacacggaagaagtctctatgagaagagctcctttaatgtgggaattgatacacaagaaggtacttagtccacaagatcaggatgtacaagataaccccagagggcgctcagccaagcttagagcagctatcaaattataagttatcatcatcttattcttcaaatttttttctcacaatttctctaatctttactcatgttatgtccctgaatgtcttggtataggtttaagtgtgggacagtctgaaaattgatagcatttagcatttcttttttctcaaaaagaaactgtaggaaatacatgacagagaaagttacactcagggagcagcagcacctccagactggaaaaatatgttaatctttgcatcatattggactcttgaaggcaatccttcctctggccaggaaattttttaaaaaataatactgtgttgtgtttatctaaatacgtaaactcaagctaccaaagagaaagatgttgtaatcatatctgcatgtcctaaattttgaatttagatattccaatttgcatcagtctttctgtggctcaaataatgatgattatggaatgaattttaatgtccctacttgtgaataattagctttctcaaatgtaggctttttacaaattttaaattttaaaatattagtttaaatgtgtgttatactgataaaatttcatctttcaaattatagtctattattttaaagggatttttcagtatgatatgggccattttgttcatctatcgcaaagtaaaaatgtaaaatccttacagagaattgtttcacaaaacttatatttcatgtcaattgtatttattttaataatagctcacaatgcctttagtaagtaataaagtctcttattagaatcttgtattttttaattgagctaatcaaaataattcagccaagtctatttgaaatagaaaactgtctatttaatatagtaaaatcaatgctcccttaatgttgttacaaagatatggtaactgtaatatgggtaaaagtttattcaagaaaagagtacttggtagaagattctttaacaaattgaggagattgattcataattcacatgtcaattttttatagtaatatgtacttctaatttattatttatacttaaattgtgacctgaaagatgagttggagataattagtcaaagggcacatggagtatggaagggggcatgttgattaaccatacatagaaataaatattctcttagttatccttgaaatcatatttatactattaatttgctcagtgcacttttttcaaatacagaaaaaagattctccattatagttacaaattttaggttggtgaatccaagtgaatgaaatatcagcataactatgtgggcaaaatagatagaattaaatgcatgaattttcctcagacttattttatctgcctctgtaatatttaactttagtacccaggcttgttcactacttctgctttacaggctttatttaaatctgaacaatcctacagggaaatcagaattaggaaaaaaatctggagaacaatatggttgaaatagaaacaagagaatgcacctaggttaattccctgaatcctacttgaacattgtataaatttctctttgcatataatacatatttgtgaatgagacatattcccaaaaaattcttatctctgtatgtgattggaaaagaaaagatcacatttgtatattcaacaatctttcacctatttcataagtcattttttcaccctgtatagtatgggaattattttttatgttaaatagaaactgaatgtactgggttgaatggtgtcctctccaaaattcatgtacttcctggagcctcagtatgtgaccttatttggaaatactgtggttgtggttgtaagtagctaagatgaggtcatactggagcagggcaggcccttaatccaatatgactggtgttccttataagagaagatagggcgggcatggtggctcacgcctgtaatcccagcactgtgggaggccaagccaggcaaatcgcttgaggctgaggagttcaagaccagcctggccaacatggcgaaaacccatctctactaaaaataaaattagccatgcgtggtgcttgtaatgtcagctacccaggagtctgaggcacaagaatcactcgaacctgggaggtggaggttgcgagatcacaccactgcactccagtgtgagcaacagaacgagactctgtctcaaaaaaaaaaaaaaaaaggaagaaagagaagatagagacacaggggagaatgccacatgaagctggaggcagagattggagtgatacattgtgggaaccctcagaagataggaaaaaagcatggaatagattctccctcagagttccagtagttgccaaccctgctaacatggttttgcacatctagcatccagaacagtgagaatgtatttctgctgttttaaggtacccagttcatggtaatttgttacagcaatcctaggaagctaatactctgacagaaaaaaatcttggataatatgcatgagaaaaatccttcaataaacacaaaattggtttcaaaatgttttcatgtaaaaataaattaacttttctgtaattagattgtgttttatagtaattcttgcctgcttcttagtctttgttgtaggatgcataataaaatacatgaatgagttttaaatggttagctttggagaatggttttgggaagttcctacagtacacagaaataaaagctaatgttactatgaatgcgcattacttttctaataaaatgtttctgaatctctgtcttgactgccttctatgaatcattttaacatagtatcaatgtcattgtgtagtacatcagttcttaacagtttttagttcattacttaaataaaatttaataacta

SEQ ID NO: 7909 - protein, 407 aa, Homo sapiens; identical to SEQ ID NO: 7907

SEQ ID NO: 7910 - DNA, 1768 bp, Homo sapiens
catcaaatgaaaggaattaggaatctcatcgtttgacagctagctaactaaatgaattataaattatgtccatccttctgccacaggaaggtgctattttagctagtaagccaaaatgtctaacaaactttaatgtcaaataaaccaatgctgttgtttatattagaactacatggttatttcagatactattttgttatttttttggttttgttatgaaacattccattttcattaattttacaaaacacatttactgaaaatagtatgcaaacatttattgagctttctgcctttctattttatgaattaagagattctgcattaaaatgtcaataaagttaagcagttatgttgaaccatcattttaatttctgcaaaatatcaaagataatgctaagaaatttttaaaaaaattatagcaaaaatatcctgcagttcttattgatttatgtgctccatgaatgtttacttcctattttacatgaaaatatatgtttgttcatattcttagaatactctgaaacatatttcccagtggcccaaactctttattaggaaaatggacgaattgaatagcaaatggagcatttcctccctctgctatttatacacggaaagacttactacagcgatctacccatattgccaccaagactttccaggctcttcgcatatttgtgaacaatgagctcaatgaactctacacgggactgaagacagctcagaagtttctgagacctggtggtcgtcttgttgccctctccttccattcactagaggatcgcatcgtcaaaagatttttgcttggaataagcatgacagaaagatttaacctaagtgttagacaacaagtgatgaaaacatctcaattgggttcagatcacgaaaacacggaagaagtctctatgagaagagctcctttaatgtgggaattgatacacaagaaggtacttagtccacaagatcaggatgtacaagataaccccagagggcgctcagccaagcttagagcagctatcaaattataagttatcatcatcttattcttcaaatttttttctcacaatttctctaatctttactcatgttatgtccctgaatgtcttggtataggtttaagtgtgggacagtctgaaaattgatagcatttagcatttcttttttctcaaaaagaaactgtaggaaatacatgacagagaaagttacactcagggagcagcagcacctccagactggaaaaatatgttaatctttgcatcatattggactcttgaaggcaatccttcctctggccaggaaattttttaaaaaataatactgtgttgtgtttatctaaatacgtaaactcaagctaccaaagagaaagatgttgtaatcatatctgcatgtcctaaattttgaatttagatattccaatttgcatcagtctttctgtggctcaaataatgatgattatggaatgaattttaatgtccctacttgtgaataattagctttctcaaatgtaggctttttacaaattttaaattttaaaatattagtttaaatgtgtgttatactgataaaatttcatctttcaaattatagtctattattttaaagggatttttcagtatgatatgggccattttgttcatctatcgcaaagtaaaaatgtaaaatccttacagagaattgtttcacaaaacttatatttcatgtcaattgtatttattttaataatagctcacaatgcctttagtaagtaataaagtctcttattaga

SEQ ID NO: 7911 - protein, 42 aa, Homo sapiens
MDELNSKWSISSLCYLYTERLTTAIYPYCHQDFPGSSHICEQ

SEQ ID NO: 7912 - DNA, 505 bp, Homo sapiens
aggagcgctaagtgaacaaggatgctacatgcaggatccacttgtgtccattgatctctcagagtggctgaggatcataggtttcttcttgaagggctcaaggaatgaagcatcccacaaaatgatcctgctgaataattgccagatgctgctggccctgtacgaatccctggccgtgagcattcctgagtccctgaaggtcttcaagaaagtttaggtgaggggataagagcagctgcattttcaaagtcagtgaaggtagagcattcaagagcattcctctgtattatggaagatatcctgaagctcaatgcctgcaataaaagcaagcttggaagtagggatgagataggccacccagatgatgaatttgagaggtacaaaaacaggtgcttatcatttataattgctattccttgtacttttttgtaattcacattaatcagttttggaataaagagaggatgaattcctttcttgtgatgaataaaggttgtcaatggtc

SEQ ID NO: 7913 - protein, 62 aa, Homo sapiens
MQDPLVSIDLSEWLRIIGFFLKGSRNEASHKMILLNNCQMLLALYESLAVSIPESLKVFKKV

SEQ ID NO: 7914 - DNA, 564 bp, Homo sapiens
atcagcggcagaagggcagcaatggccacacaccgaagcaccttggcgggctattccccttgcagctctcctcagcgcgctgctcccactcgcaatcaaaaggcggaaaaagcgcgaaaccgccaggcatctcccatacccacccggctgccgcgcaacccctccttggcttccactgggagacaggggacgccgatgagcaggaagaagcagggcagtgactgcttagtttatcctggtcacccgccaggtttgtggcctgtgatctcttgtcaccttggtctctcagctttgtcttctgaaatctggacttccaattgtctttgtcttgctgcccttccttgcgacactggcctggaatccctcacggtagtctgctggagtggaatttaggacgcatctcagttgtcaccatctttaattgcatgatgtctagttccttgcaaaccattatttcatgtatttcgctcttttttgtttgttttgttttgttttgttttcaggctaggggaaaatccagtccctgttactccattttggccagaaattcaaggtaatgacttt

SEQ ID NO: 7915 - protein, 123 aa, Homo sapiens
MATHRSTLAGYSPCSSPQRAAPTRNQKAEKARNRQASPIPTRLPRNPSLASTGRQGTPMSRKKQGSDCLVYPGHPPGLWPVISCHLGLSALSSEIWTSNCLCLAALPCDTGLESLTVVCWSGI

SEQ ID NO: 7916 - DNA, 643 bp, Homo sapiens
agtgacaaacctcttttggtttacaggcggtcagacactcagcatgactggcaaaacagattatctgtgtgtcagtgtacattttattcatccgtcgtttgggtcagggtctgcgggcagacacaggtagctactgccctgttgtgagaagcaatacctcaattggtgccccatgtgaggagagctgtgtgaggacagtcaggggtctgcagaaacagaccttccgcagttggagccccttgtaaggcaagctatgaaggaagtgtaaggaccgctttcatgaggaaagctgcaaaggaagcctgaggaatgcgacgggcccccaggaaacaaaggtgaagaaaaaccgcgtggtcaagtcagtgagtaactacaatcaaagacagccttgcagagccccaggggagtcaaggggaggagcaggctggcaaggagagagatgccccaggtctgaaggagtgatgtagaagacaggatctgttggctgggaacctaaggatgattcacactcacttcctagaactgaatcaaaaggaaaatcccacctctccacaatcaagtaacaaaaggatcagaggctactccttttgcaaatcatgccaccaattcccactttccactgcattgcagatgaaaaacggaa

SEQ ID NO: 7917 - protein, 47 aa, Homo sapiens
MIHTHFLELNQKENPTSPQSSNKRIRGYSFCKSCHQFPLSTALQMKN

SEQ ID NO: 7918 - DNA, 1599 bp, Homo sapiens
cctttaggtatctgatcgctttgccaattttgcgttactgggcaggctaagagatcttcttttaattcagcctgcttaagacgggaactgataactgtagtgtatcctctgccttttttcttatctattggaggaagctcagatggtgtcacaagaaggatctgaagtggagcttctagtatccccaggagcgcgaagtgaacacggaaggtacctgcaggatccaattgtgtccattgatctctcagagtggctgaggataatagagtttcttcttcaaggtctcaaggtctgaagcatcccacagaatgatcctactgaataactcccataagctgctggccctatacaaatccttggccaggagcatccctgagtccctgaaggtgtatggctctgtgtatcacatcaatcacgggaaccccttcaacatggaggtgctggtggattcctggcctgaatatcagatggttattatccggcctcaaaagcaggagatgactgatgacatggattcatacacaaacgtatatcgtatgttctccaaagagcctcaaaaatcagaagaagttttgaaaaattgtgagatcgtaaactggaaacagagactccaaatccaaggtcttcaagaaagtttaggtgaggggataagagtggctacattttcaaagtcagtgaaagtagagcattcgagagcactcctcttggttacggaagatattctgaagctcaatgcctccagtaaaagcaagcttggaagctgggctgagacaggccacccagatgatgaatttgaaagtgaaactcccaactttaagtatgcccagctggatgtctcttattctgggctggtaaatgacaactggaagcgagggaagaatgagaggagcctgcattacatcaagcgctgcatagaagacctgccagcagcctgtatgctcggcccagagggagtcccggtctcatgggtaaccatggacccttcttgtgaagtaggaatggcctacagcatggaaaaataccgaaggacaggcaacatggcacgagtgatggtgcgatacatgaaatatctgcgtcagaagaatattccattttacatctctgtgttggaagaaaatgaagactcccgcagatttgtggggcagtttggtttctttgaggcctcctgtgagtggcaccaatggacttgctacccacagaatctagttccattttagacaatgaagctgcttagtaatctctgccaagccatctcttaatattaaagcagacaccacagaatagatttcttcacttacaaatgcatattgggcacttataatacagcaggaactcttctcacctggagccttgatgttaaaagacacagccatgctcttgaggagcttacaatcctggctggaggcaggggagggtatattctttaaatatgcttaagtgttatagggaaagacggggttaccagtaaacatgtaactagaaagccaggctcagttcttacctctgggaatcagaactctttatgcaacttggttaatagaatctactatctggaagataaatgaaggattttaataaaattttcaatagaataaacct

SEQ ID NO: 7919 - protein, 302 aa, Homo sapiens
MILLNNSHKLLALYKSLARSIPESLKVYGSVYHINHGNPFNMEVLVDSWPEYQMVIIRPQKQEMTDDMDSYTNVYRMFSKEPQKSEEVLKNCEIVNWKQRLQIQGLQESLGEGIRVATFSKSVKVEHSRALLLVTEDILKLNASSKSKLGSWAETGHPDDEFESETPNFKYAQLDVSYSGLVNDNWKRGKNERSLHYIKRCIEDLPAACMLGPEGVPVSWVTMDPSCEVGMAYSMEKYRRTGNMARVMVRYMKYLRQKNIPFYISVLEENEDSRRFVGQFGFFEASCEWHQWTCYPQNLVPF

SEQ ID NO: 7920 - DNA, 2264 bp, Homo sapiens
cctttaggtatctgatcgctttgccaattttgcgttactgggcaggctaagagatcttcttttaattcagcctgcttaagacgggaactgataactgtagtgtatcctctgccttttttcttatctattggaggaagctcagatggtgtcacaagaaggatctgaagtggagcttctagtatccccaggagcgcgaagtgaacacggaaggtacctgcaggatccaattgtgtccattgatctctcagagtggctgaggataatagagtttcttcttcaaggtctcaaggtctgaagcatcccacagaatgatcctactgaataactcccataagctgctggccctatacaaatccttggccaggagcatccctgagtccctgaaggtgtatggctctgtgtatcacatcaatcacgggaaccccttcaacatggaggtgctggtggattcctggcctgaatatcagatggttattatccggcctcaaaagcaggagatgactgatgacatggattcatacacaaacgtatatcgtatgttctccaaagagcctcaaaaatcagaagaagttttgaaaaattgtgagatcgtaaactggaaacagagactccaaatccaaggtcttcaagaaagtttaggtgaggggataagagtggctacattttcaaagtcagtgaaagtagagcattcgagagcactcctcttggttacggaagatattctgaagctcaatgcctccagtaaaagcaagcttggaagctgggctgagacaggccacccagatgatgaatttgaaagtgaaactcccaactttaagtatgcccagctggatgtctcttattctgggctggtaaatgacaactggaagcgagggaagaatgagaggagcctgcattacatcaagcgctgcatagaagacctgccagcagcctgtatgctcggcccagagggagtcccggtctcatgggtaaccatggacccttcttgtgaagtaggaatggcctacagcatggaaaaataccgaaggacaggcaacatggcacgagtgatggtgcgatacatgaaatatctgcgtcagaagaatattccattttacatctctgtgttggaagaaaatgaagactcccgcagatttgtggggcagtttggtttctttgaggcctcctgtgagtggcaccaatggacttgctacccacagaatctagttccattttagacaatgaagctgcttagtaatctctgccaagccatctcttaatattaaagcagacaccacagaatagatttcttcacttacaaatgcatattgggcacttataatacagcaggaactcttctcacctggagccttgatgttaaaagacacagccatgctcttgaggagcttacaatcctggctggaggcaggggagggtatattctttaaatatgcttaagtgttatagggaaagacggggttaccagtaaacatgtaactagaaagccaggctcagttcttacctctgggaatcagaactctttatgcaacttggttaatagaatctactatctggaagataaatgaaggattttaataaaattttcaatagaataaacctaatctgtatggatactttatcaaaaatgaatgtccctgctatttctggatttatgaggcaatggtacactaaagaatggaatcagttcagtgaatagaaaggtatccaaggtgaagcctgagacgaatggctttcccaggctaccttccatcactgttgtacagaaaagaaatccagagaatcaaatggactggccttgggggtctctgctatggaaatgccattttttgtgtctcctttctcctactctttctcacatcctcttcatgattgaagcatggcacaaggcaaggtgttgcctgcgagtctggttgtaagttcagcctttggtgtttgcactactgctatcataaggggtcagggacattccggggagaagtgaccactaaggtgaggattagagagtgagtagaagtgagccagacaaaaaaagcagaaaatgcagatgatggaaaggacatgtgccatgcactatcataagaacttcctaactgaacactgatactacaattctgaatccctgatcttaaaaaataattatacttcaccaacaaaacttggcctcttttggttccactctgccaccctgccattggaacttggattactgtgaacattgcagctatagcaaaataaaaaataaaaaaaataaataattggcattt

SEQ ID NO: 7921 - protein, 302 aa, Homo sapiens; identical to SEQ ID NO: 7919

SEQ ID NO: 7922 - DNA, 1631 bp, Homo sapiens
gatcgctttgccaattttgcgttactgggcaggctaagagatcttcttttaattcagcctgcttaagacgggaactgataactgtagtgtatcctctgccttttttcttatctattggaggaagctcaggtgaagaaatggagttgccatcaactaagttgagaaagactacagatggtgtcacaagaaggatctgaagtggagcttctagtatccccaggagcgcgaagtgaacacggaaggtacctgcaggatccaattgtgtccattgatctctcagagtggctgaggataatagagtttcttcttcaaggtctcaaggtctgaagcatcccacagaatgatcctactgaataactcccataagctgctggccctatacaaatccttggccaggagcatccctgagtccctgaaggtgtatggctctgtgtatcacatcaatcacgggaaccccttcaacatggaggtgctggtggattcctggcctgaatatcagatggttattatccggcctcaaaagcaggagatgactgatgacatggattcatacacaaacgtatatcgtatgttctccaaagagcctcaaaaatcagaagaagttttgaaaaattgtgagatcgtaaactggaaacagagactccaaatccaaggtcttcaagaaagtttaggtgaggggataagagtggctacattttcaaagtcagtgaaagtagagcattcgagagcactcctcttggttacggaagatattctgaagctcaatgcctccagtaaaagcaagcttggaagctgggctgagacaggccacccagatgatgaatttgaaagtgaaactcccaactttaagtatgcccagctggatgtctcttattctgggctggtaaatgacaactggaagcgagggaagaatgagaggagcctgcattacatcaagcgctgcatagaagacctgccagcagcctgtatgctcggcccagagggagtcccggtctcatgggtaaccatggacccttcttgtgaagtaggaatggcctacagcatggaaaaataccgaaggacaggcaacatggcacgagtgatggtgcgatacatgaaatatctgcgtcagaagaatattccattttacatctctgtgttggaagaaaatgaagactcccgcagatttgtggggcagtttggtttctttgaggcctcctgtgagtggcaccaatggacttgctacccacagaatctagttccattttagacaatgaagctgcttagtaatctctgccaagccatctcttaatattaaagcagacaccacagaatagatttcttcacttacaaatgcatattgggcacttataatacagcaggaactcttctcacctggagccttgatgttaaaagacacagccatgctcttgaggagcttacaatcctggctggaggcaggggagggtatattctttaaatatgcttaagtgttatagggaaagacggggttaccagtaaacatgtaactagaaagccaggctcagttcttacctctgggaatcagaactctttatgcaacttggttaatagaatctactatctggaagataaatgaaggattttaataaaattttcaatagaataaacct

SEQ ID NO: 7923 - protein, 302 aa, Homo sapiens; identical to SEQ ID NO: 7919

SEQ ID NO: 7924 - DNA, 2603 bp, Homo sapiens
gcatttgtggcgctaaaaaaagggatgggcgtgggagattccaggacttgtgctcgctgaagatacaactgttagtccaagctcctgtatcagcagtgcttgcacctcataggtgatgatcatgagggggacaaggagcctctagacttaagagacaagttgccagcattctccagatggagtgtttccctccgcagcaccccctgctggtcagtttgacaagcaggtgaacagaagttctcaaatacacaatagtagattctatcaatcaagtttcataaagagttctgattcccagagatagcagattctgtcaaccacatttcataaagagttctgattctaagagagccatacacctgaaggagggatggaaagactaggagagcctgggatcctcagagatggagatctggatgtgaagagaaagagaaaaacaaaagtcaacagacagtactgtgaccaagtcagtgatggtgagatcagcagcatctctaggacccttctgattgacatgaagtcaccatcaagtaggcagaactcacagcaggagacctgtctctgatgctgctgagccactttgacaatcgttatatagaaatctgattggatgccgtgaaactggacatcagcaaaatgtcagaatgggactttctagcatttatcctcacacagaaacatcaatttaaacaactatctatgcatgaaaataccttcagaagagctaagaaaaccaggtgaaaggttacagaaatgttgtgtagcagagaaataagaaaagattaattgaagagcataggaagaacaatttttcatttcctgtgtcacccctcccacaacaccaggcagcagggcacagagagaggcaatctctgtgtcgaagaagaaaagtgaagtgagcactgaactttgccttggactccaacgcagagcctgcttcagtaaaatccagtaatgggtatgcgactattgcccgaaactccaggctagtacctgcacactaagccagaccagatcacacagcccaggctccaggcttgcctggtggacttggtttctgggtatatcctcatgccaggtctaccccagtgccttggatgtcagacagtctttgggaccaggccagccccagtgactccaggctccagactgctcccagaacaaggccggcctcgacaactccaggtttcaagccagccccaggaccaggctagctcctgcaactctagtcaccatgccagtgtccatatatccaacccctaatctggcccctgtggatacaggctcgaggactgcctagcacaaggctagcccctgtggtcgcagactccaagtccaccctaggttccagaccggcccagaactagattggctcacaccaatccaggattcaggcccaccccatttccaggttggcagccctagccctaggccttagtcaggtatctggcaagcatctgcagacccaggctccaggcctcccgaggcctaagccagtttctgccaccccactctccaggccagttcctatggtcccatcctctagcagacccagggtccaggcccatcacagttgactccagtattgggcaggtgcctacagacccagtatctagtactgcctctgtggacttaggttccagtccagttcctacagccctaggacccaagccaccctttgtggccctagtgtccatgcccacttctgaatatgttggttctaggacagatctcacacaaccagcctccaggccattccacaattcttggcccacccctgtggctacaagcaccagtctagcacctatggtctcaaactttagactggccccatctcaccacagccctaggccagcatcagactccaggctggtttttgtaacccagcatccaacaaactcagggcccagctgtgctctagcagacccagggtacaggccgacttcattagaccctgttgctaggctggccatcatggacaaagtctctaggaccatctctgaagactcaggctccaggtctgcccccgtctaccaagatcccaggcccatttctccagattccggctccagtcctgcaccagtaccaggccagtccccatggactcagatgccaggcttatcccagcagactcagacactatgctcattccaaaatctggccagcccctgcagacacaggctcaatgcacgcctcagagccatgttagcccctgtggacccatgctcagtccagcacctactgttaacagcctctgtacctgcccttatagaaattggctttacgttcatccccacatacccaatgaaaagatccaccccagttgatccaggcttcaggcccaactctacagacccaggaaacaggcctaccatctgctaacacaggcaccaggccagcctgcctgaggactttggcaacaagttcacctgcagaccacactagacaccctacaaagagttgctggatgactaggaaagggtttttccagataaagccggtatgcaagaactagaataagtttcttgtttttcaaatgtgcagacactaatgcactgcctaaaaatcaagatcaagaacaatcagagaaaaatgataccacc

SEQ ID NO: 7925 - protein, 64 aa, Homo sapiens
MERLGEPGILRDGDLDVKRKRKTKVNRQYCDQVSDGEISSISRTLLIDMKSPSSRQNSQQETCL

SEQ ID NO: 7926 - DNA, 2099 bp, Homo sapiens
agtgttggccaatcccagcagccatacttcaactactcatagactgctgaatgttcaaactgtgttcaaataagatggtgtcacaagaaggatctgaagtggagcttctagtatccccaggagcgcgaagtgaacacggaaggtacctgcaggatccaattgtgtccattgatctctcagagtggctgaggataatagagtttcttcttcaaggtctcaaggtgtatggctctgtgtatcacatcaatcacgggaaccccttcaacatggaggtgctggtggattcctggcctgaatatcagatggttattatccggcctcaaaagcaggagatgactgatgacatggattcatacacaaacgtatatcgtatgttctccaaagagcctcaaaaatcagaagaagttttgaaaaattgtgagatcgtaaactggaaacagagactccaaatccaaggtcttcaagaaagtttaggtgaggggataagagtggctacattttcaaagtcagtgaaagtagagcattcgagagcactcctcttggttacggaagatattctgaagctcaatgcctccagtaaaagcaagcttggaagctgggctgagacaggccacccagatgatgaatttgaaagtgaaactcccaactttaagtatgcccagctggatgtctcttattctgggctggtaaatgacaactggaagcgagggaagaatgagaggagcctgcattacatcaagcgctgcatagaagacctgccagcagcctgtatgctcggcccagagggagtcccggtctcatgggtaaccatggacccttcttgtgaagtaggaatggcctacagcatggaaaaataccgaaggacaggcaacatggcacgagtgatggtgcgatacatgaaatatctgcgtcagaagaatattccattttacatctctgtgttggaagaaaatgaagactcccgcagatttgtggggcagtttggtttctttgaggcctcctgtgagtggcaccaatggacttgctacccacagaatctagttccattttagacaatgaagctgcttagtaatctctgccaagccatctcttaatattaaagcagacaccacagaatagatttcttcacttacaaatgcatattgggcacttataatacagcaggaactcttctcacctggagccttgatgttaaaagacacagccatgctcttgaggagcttacaatcctggctggaggcaggggagggtatattctttaaatatgcttaagtgttatagggaaagacggggttaccagtaaacatgtaactagaaagccaggctcagttcttacctctgggaatcagaactctttatgcaacttggttaatagaatctactatctggaagataaatgaaggattttaataaaattttcaatagaataaacctaatctgtatggatactttatcaaaaatgaatgtccctgctatttctggatttatgaggcaatggtacactaaagaatggaatcagttcagtgaatagaaaggtatccaaggtgaagcctgagacgaatggctttcccaggctaccttccatcactgttgtacagaaaagaaatccagagaatcaaatggactggccttgggggtctctgctatggaaatgccattttttgtgtctcctttctcctactctttctcacatcctcttcatgattgaagcatggcacaaggcaaggtgttgcctgcgagtctggttgtaagttcagcctttggtgtttgcactactgctatcataaggggtcagggacattccggggagaagtgaccactaaggtgaggattagagagtgagtagaagtgagccagacaaaaaaagcagaaaatgcagatgatggaaaggacatgtgccatgcactatcataagaacttcctaactgaacactgatactacaattctgaatccctgatcttaaaaaataattatacttcaccaacaaaacttggcctcttttggttccactctgccaccctgccattggaacttggattactgtgaacattgcagctatagcaaaataaaaaataaaaaaaataaataattggcattt

SEQ ID NO: 7927 - protein, 333 aa, Homo sapiens; identical to SEQ ID NO: 870

SEQ ID NO: 7928 - DNA, 1400 bp, Homo sapiens
atcccagcagccatacttcaactactcatagactgctgaatgttcaaactgtgttcaaataagatggtgtcacaagaaggatctgaagtggagcttctagtatccccaggagcgcgaagtgaacacggaaggtacctgcaggatccaattgtgtccattgatctctcagagtggctgaggataataggtgtatggctctgtgtatcacatcaatcacgggaaccccttcaacatggaggtgctggtggattcctggcctgaatatcagatggttattatccggcctcaaaagcaggagatgactgatgacatggattcatacacaaacgtatatcgtatgttctccaaagagcctcaaaaatcagaagaagttttgaaaaattgtgagatcgtaaactggaaacagagactccaaatccaaggtcttcaagaaagtttaggtgaggggataagagtggctacattttcaaagtcagtgaaagtagagcattcgagagcactcctcttggttacggaagatattctgaagctcaatgcctccagtaaaagcaagcttggaagctgggctgagacaggccacccagatgatgaatttgaaagtgaaactcccaactttaagtatgcccagctggatgtctcttattctgggctggtaaatgacaactggaagcgagggaagaatgagaggagcctgcattacatcaagcgctgcatagaagacctgccagcagcctgtatgctcggcccagagggagtcccggtctcatgggtaaccatggacccttcttgtgaagtaggaatggcctacagcatggaaaaataccgaaggacaggcaacatggcacgagtgatggtgcgatacatgaaatatctgcgtcagaagaatattccattttacatctctgtgttggaagaaaatgaagactcccgcagatttgtggggcagtttggtttctttgaggcctcctgtgagtggcaccaatggacttgctacccacagaatctagttccattttagacaatgaagctgcttagtaatctctgccaagccatctcttaatattaaagcagacaccacagaatagatttcttcacttacaaatgcatattgggcacttataatacagcaggaactcttctcacctggagccttgatgttaaaagacacagccatgctcttgaggagcttacaatcctggctggaggcaggggagggtatattctttaaatatgcttaagtgttatagggaaagacggggttaccagtaaacatgtaactagaaagccaggctcagttcttacctctgggaatcagaactctttatgcaacttggttaatagaatctactatctggaagataaatgaaggattttaataaaattttcaatagaataaacct

SEQ ID NO: 7929 - protein, 261 aa, Homo sapiens
MEVLVDSWPEYQMVIIRPQKQEMTDDMDSYTNVYRMFSKEPQKSEEVLKNCEIVNWKQRLQIQGLQESLGEGIRVATFSKSVKVEHSRALLLVTEDILKLNASSKSKLGSWAETGHPDDEFESETPNFKYAQLDVSYSGLVNDNWKRGKNERSLHYIKRCIEDLPAACMLGPEGVPVSWVTMDPSCEVGMAYSMEKYRRTGNMARVMVRYMKYLRQKNIPFYISVLEENEDSRRFVGQFGFFEASCEWHQWTCYPQNLVPF

SEQ ID NO: 7930 - DNA, 2065 bp, Homo sapiens
atcccagcagccatacttcaactactcatagactgctgaatgttcaaactgtgttcaaataagatggtgtcacaagaaggatctgaagtggagcttctagtatccccaggagcgcgaagtgaacacggaaggtacctgcaggatccaattgtgtccattgatctctcagagtggctgaggataataggtgtatggctctgtgtatcacatcaatcacgggaaccccttcaacatggaggtgctggtggattcctggcctgaatatcagatggttattatccggcctcaaaagcaggagatgactgatgacatggattcatacacaaacgtatatcgtatgttctccaaagagcctcaaaaatcagaagaagttttgaaaaattgtgagatcgtaaactggaaacagagactccaaatccaaggtcttcaagaaagtttaggtgaggggataagagtggctacattttcaaagtcagtgaaagtagagcattcgagagcactcctcttggttacggaagatattctgaagctcaatgcctccagtaaaagcaagcttggaagctgggctgagacaggccacccagatgatgaatttgaaagtgaaactcccaactttaagtatgcccagctggatgtctcttattctgggctggtaaatgacaactggaagcgagggaagaatgagaggagcctgcattacatcaagcgctgcatagaagacctgccagcagcctgtatgctcggcccagagggagtcccggtctcatgggtaaccatggacccttcttgtgaagtaggaatggcctacagcatggaaaaataccgaaggacaggcaacatggcacgagtgatggtgcgatacatgaaatatctgcgtcagaagaatattccattttacatctctgtgttggaagaaaatgaagactcccgcagatttgtggggcagtttggtttctttgaggcctcctgtgagtggcaccaatggacttgctacccacagaatctagttccattttagacaatgaagctgcttagtaatctctgccaagccatctcttaatattaaagcagacaccacagaatagatttcttcacttacaaatgcatattgggcacttataatacagcaggaactcttctcacctggagccttgatgttaaaagacacagccatgctcttgaggagcttacaatcctggctggaggcaggggagggtatattctttaaatatgcttaagtgttatagggaaagacggggttaccagtaaacatgtaactagaaagccaggctcagttcttacctctgggaatcagaactctttatgcaacttggttaatagaatctactatctggaagataaatgaaggattttaataaaattttcaatagaataaacctaatctgtatggatactttatcaaaaatgaatgtccctgctatttctggatttatgaggcaatggtacactaaagaatggaatcagttcagtgaatagaaaggtatccaaggtgaagcctgagacgaatggctttcccaggctaccttccatcactgttgtacagaaaagaaatccagagaatcaaatggactggccttgggggtctctgctatggaaatgccattttttgtgtctcctttctcctactctttctcacatcctcttcatgattgaagcatggcacaaggcaaggtgttgcctgcgagtctggttgtaagttcagcctttggtgtttgcactactgctatcataaggggtcagggacattccggggagaagtgaccactaaggtgaggattagagagtgagtagaagtgagccagacaaaaaaagcagaaaatgcagatgatggaaaggacatgtgccatgcactatcataagaacttcctaactgaacactgatactacaattctgaatccctgatcttaaaaaataattatacttcaccaacaaaacttggcctcttttggttccactctgccaccctgccattggaacttggattactgtgaacattgcagctatagcaaaataaaaaataaaaaaaataaataattggcattt

SEQ ID NO: 7931 - protein, 261 aa, Homo sapiens; identical to SEQ ID NO: 7929

SEQ ID NO: 7932 - DNA, 2360 bp, Homo sapiens
aaactgtgttcaaataaggcaagcgcccagttgtaaccaatctctttgtttctgtacctgatttctggttcctgtacatcactttaccttttttgtctataaattcattttgaccacgaggcacccccggagcctcggtgaatctgctgtgattttgtaggctgccggattcacaaattgtttgttgcttaatgaaactcctttaagtttaattcagctgaagtttttcttttatcagatggtgtcacaagaaggatctgaagtggagcttctagtatccccaggagcgcgaagtgaacacggaaggtacctgcaggatccaattgtgtccattgatctctcagagtggctgaggataatagagtttcttcttcaaggtctcaaggtctgaagcatcccacagaatgatcctactgaataactcccataagctgctggccctatacaaatccttggccaggagcatccctgagtccctgaaggtgtatggctctgtgtatcacatcaatcacgggaaccccttcaacatggaggtgctggtggattcctggcctgaatatcagatggttattatccggcctcaaaagcaggagatgactgatgacatggattcatacacaaacgtatatcgtatgttctccaaagagcctcaaaaatcagaagaagttttgaaaaattgtgagatcgtaaactggaaacagagactccaaatccaaggtcttcaagaaagtttaggtgaggggataagagtggctacattttcaaagtcagtgaaagtagagcattcgagagcactcctcttggttacggaagatattctgaagctcaatgcctccagtaaaagcaagcttggaagctgggctgagacaggccacccagatgatgaatttgaaagtgaaactcccaactttaagtatgcccagctggatgtctcttattctgggctggtaaatgacaactggaagcgagggaagaatgagaggagcctgcattacatcaagcgctgcatagaagacctgccagcagcctgtatgctcggcccagagggagtcccggtctcatgggtaaccatggacccttcttgtgaagtaggaatggcctacagcatggaaaaataccgaaggacaggcaacatggcacgagtgatggtgcgatacatgaaatatctgcgtcagaagaatattccattttacatctctgtgttggaagaaaatgaagactcccgcagatttgtggggcagtttggtttctttgaggcctcctgtgagtggcaccaatggacttgctacccacagaatctagttccattttagacaatgaagctgcttagtaatctctgccaagccatctcttaatattaaagcagacaccacagaatagatttcttcacttacaaatgcatattgggcacttataatacagcaggaactcttctcacctggagccttgatgttaaaagacacagccatgctcttgaggagcttacaatcctggctggaggcaggggagggtatattctttaaatatgcttaagtgttatagggaaagacggggttaccagtaaacatgtaactagaaagccaggctcagttcttacctctgggaatcagaactctttatgcaacttggttaatagaatctactatctggaagataaatgaaggattttaataaaattttcaatagaataaacctaatctgtatggatactttatcaaaaatgaatgtccctgctatttctggatttatgaggcaatggtacactaaagaatggaatcagttcagtgaatagaaaggtatccaaggtgaagcctgagacgaatggctttcccaggctaccttccatcactgttgtacagaaaagaaatccagagaatcaaatggactggccttgggggtctctgctatggaaatgccattttttgtgtctcctttctcctactctttctcacatcctcttcatgattgaagcatggcacaaggcaaggtgttgcctgcgagtctggttgtaagttcagcctttggtgtttgcactactgctatcataaggggtcagggacattccggggagaagtgaccactaaggtgaggattagagagtgagtagaagtgagccagacaaaaaaagcagaaaatgcagatgatggaaaggacatgtgccatgcactatcataagaacttcctaactgaacactgatactacaattctgaatccctgatcttaaaaaataattatacttcaccaacaaaacttggcctcttttggttccactctgccaccctgccattggaacttggattactgtgaacattgcagctatagcaaaataaaaaataaaaaaaataaataattggcattt

SEQ ID NO: 7933 - protein, 302 aa, Homo sapiens; identical to SEQ ID NO: 7919

SEQ ID NO: 7934 - DNA, 781 bp, Homo sapiens
aaataaggcaagcgcccagttgtaaccaatctctttgtttctgtacctgatttctggttcctgtacatcactttaccttttttgtctataaattcattttgaccacgaggcacccccggagcctcggtgaatctgctgtgattttgtaggctgccggattcacaaattgtttgttgcttaatgaaactcctttaagtttaattcagctgaagtttttcttttatcagatggtgtcacaagaaggatctgaagtggagcttctagtatccccaggagcgcgaagtgaacacggaaggtacctgcaggatccaattgtgtccattgatctctcagagtggctgaggataatagagtttcttcttcaaggtctcaaggtctgaagcatcccacagaatgatcctactgaataactcccataagctgctggccctatacaaatccttggccaggagcatccctgagtccctgaaggtcagggaacagtgggaggtcagggtatgggagtaggggtgttgaggatgagaaaatagcaggcttgtgattctagtccttcctgactgtttgcagagggttggagctgggaaacaggatgggactgggggcacaggctgcatatcaagagctgctgcttctctttgggaagaggcagctaggtccactctgcaggttttgccactcatttggagaggcagtggagcatggtggctacgaacatggtttggagcctgtctgaatggatatgcattccaaggctgccattttctagtcagatggctttgtg

SEQ ID NO: 7935 - protein, 50 aa, Homo sapiens
MVSQEGSEVELLVSPGARSEHGRYLQDPIVSIDLSEWLRIIEFLLQGLKV

SEQ ID NO: 7936 - DNA, 2287 bp, Homo sapiens
aatattcacttttaattctttccacaagggaggaagggcatgggttttggagacagtcatatatggtttcaaaatctgactctggcatttatctctaagaacttgagaaatttacttagtccctctgagatttggtgtattcagaatgaatatgatactaacagtacctacatcacgagtgttacttgaatggagatgtataaagtgcattttaaattcatttgtttccttaacattttcccttcatttcttatcttttcagagtttcttcttcaaggtctcaaggtctgaagcatcccacagaatgatcctactgaataactcccataagctgctggccctatacaaatccttggccaggagcatccctgagtccctgaaggtcagggaacagtgggaggtcagggtatgggagtaggggtgttgaggatgagaaaatagcaggcttgtgattctagtccttcctgactgtttgcagagggttggagctgggaaacaggatgggactgggggcacaggctgcatatcaagagctgctgcttctctttgggaagaggcagctaggtccactctgcaggttttgccactcatttggagaggcagtggagcatggtggctacgaacatggtttggagcctgtctgaatggatatgcattccaaggctgccattttctagtcagatggctttgtggatgtttctttccctttctctgactttacgtttggtttttccatcaatgagatgggaataacgttagcacctacctcttaaagttgctatggacactgaataaatctatacaatataaatgctaagagcattgccaagtgcccagctagtacacagtagctctttggtatcacaaggacagtcctacctgtgagttctgcctgcttgctggtaacttcacgtccatcagtatggtcctctccaggaccatactgctcatctcaccatcactgacttggtctcagtaccttctcttaatctccatttttctcttcctcttcacaaccagatcctcatctctggggatctcaacctctcctggtccctttcatccctccttcaggtgtatggctctgtgtatcacatcaatcacgggaaccccttcaacatggaggtgctggtggattcctggcctgaatatcagatggttattatccggcctcaaaagcaggagatgactgatgacatggattcatacacaaacgtatatcgtatgttctccaaagagcctcaaaaatcagaagaagttttgaaaaattgtgagatcgtaaactggaaacagagactccaaatccaaggtcttcaagaaagtttaggtgaggggataagagtggctacattttcaaagtcagtgaaagtagagcattcgagagcactcctcttggttacggaagatattctgaagctcaatgcctccagtaaaagcaagcttggaagctgggctgagacaggccacccagatgatgaatttgaaagtgaaactcccaactttaagtatgcccagctggatgtctcttattctgggctggtaaatgacaactggaagcgagggaagaatgagaggagcctgcattacatcaagcgctgcatagaagacctgccagcagcctgtatgctcggcccagagggagtcccggtctcatgggtaaccatggacccttcttgtgaagtaggaatggcctacagcatggaaaaataccgaaggacaggcaacatggcacgagtgatggtgcgatacatgaaatatctgcgtcagaagaatattccattttacatctctgtgttggaagaaaatgaagactcccgcagatttgtggggcagtttggtttctttgaggcctcctgtgagtggcaccaatggacttgctacccacagaatctagttccattttagacaatgaagctgcttagtaatctctgccaagccatctcttaatattaaagcagacaccacagaatagatttcttcacttacaaatgcatattgggcacttataatacagcaggaactcttctcacctggagccttgatgttaaaagacacagccatgctcttgaggagcttacaatcctggctggaggcaggggagggtatattctttaaatatgcttaagtgttatagggaaagacggggttaccagtaaacatgtaactagaaagccaggctcagttcttacctctgggaatcagaactctttatgcaacttggttaatagaatctactatctggaagataaatgaaggattttaataaaattttcaatagaataaacct

SEQ ID NO: 7937 - protein, 261 aa, Homo sapiens; identical to SEQ ID NO: 7929

SEQ ID NO: 7938 - DNA, 2952 bp, Homo sapiens
aatattcacttttaattctttccacaagggaggaagggcatgggttttggagacagtcatatatggtttcaaaatctgactctggcatttatctctaagaacttgagaaatttacttagtccctctgagatttggtgtattcagaatgaatatgatactaacagtacctacatcacgagtgttacttgaatggagatgtataaagtgcattttaaattcatttgtttccttaacattttcccttcatttcttatcttttcagagtttcttcttcaaggtctcaaggtctgaagcatcccacagaatgatcctactgaataactcccataagctgctggccctatacaaatccttggccaggagcatccctgagtccctgaaggtcagggaacagtgggaggtcagggtatgggagtaggggtgttgaggatgagaaaatagcaggcttgtgattctagtccttcctgactgtttgcagagggttggagctgggaaacaggatgggactgggggcacaggctgcatatcaagagctgctgcttctctttgggaagaggcagctaggtccactctgcaggttttgccactcatttggagaggcagtggagcatggtggctacgaacatggtttggagcctgtctgaatggatatgcattccaaggctgccattttctagtcagatggctttgtggatgtttctttccctttctctgactttacgtttggtttttccatcaatgagatgggaataacgttagcacctacctcttaaagttgctatggacactgaataaatctatacaatataaatgctaagagcattgccaagtgcccagctagtacacagtagctctttggtatcacaaggacagtcctacctgtgagttctgcctgcttgctggtaacttcacgtccatcagtatggtcctctccaggaccatactgctcatctcaccatcactgacttggtctcagtaccttctcttaatctccatttttctcttcctcttcacaaccagatcctcatctctggggatctcaacctctcctggtccctttcatccctccttcaggtgtatggctctgtgtatcacatcaatcacgggaaccccttcaacatggaggtgctggtggattcctggcctgaatatcagatggttattatccggcctcaaaagcaggagatgactgatgacatggattcatacacaaacgtatatcgtatgttctccaaagagcctcaaaaatcagaagaagttttgaaaaattgtgagatcgtaaactggaaacagagactccaaatccaaggtcttcaagaaagtttaggtgaggggataagagtggctacattttcaaagtcagtgaaagtagagcattcgagagcactcctcttggttacggaagatattctgaagctcaatgcctccagtaaaagcaagcttggaagctgggctgagacaggccacccagatgatgaatttgaaagtgaaactcccaactttaagtatgcccagctggatgtctcttattctgggctggtaaatgacaactggaagcgagggaagaatgagaggagcctgcattacatcaagcgctgcatagaagacctgccagcagcctgtatgctcggcccagagggagtcccggtctcatgggtaaccatggacccttcttgtgaagtaggaatggcctacagcatggaaaaataccgaaggacaggcaacatggcacgagtgatggtgcgatacatgaaatatctgcgtcagaagaatattccattttacatctctgtgttggaagaaaatgaagactcccgcagatttgtggggcagtttggtttctttgaggcctcctgtgagtggcaccaatggacttgctacccacagaatctagttccattttagacaatgaagctgcttagtaatctctgccaagccatctcttaatattaaagcagacaccacagaatagatttcttcacttacaaatgcatattgggcacttataatacagcaggaactcttctcacctggagccttgatgttaaaagacacagccatgctcttgaggagcttacaatcctggctggaggcaggggagggtatattctttaaatatgcttaagtgttatagggaaagacggggttaccagtaaacatgtaactagaaagccaggctcagttcttacctctgggaatcagaactctttatgcaacttggttaatagaatctactatctggaagataaatgaaggattttaataaaattttcaatagaataaacctaatctgtatggatactttatcaaaaatgaatgtccctgctatttctggatttatgaggcaatggtacactaaagaatggaatcagttcagtgaatagaaaggtatccaaggtgaagcctgagacgaatggctttcccaggctaccttccatcactgttgtacagaaaagaaatccagagaatcaaatggactggccttgggggtctctgctatggaaatgccattttttgtgtctcctttctcctactctttctcacatcctcttcatgattgaagcatggcacaaggcaaggtgttgcctgcgagtctggttgtaagttcagcctttggtgtttgcactactgctatcataaggggtcagggacattccggggagaagtgaccactaaggtgaggattagagagtgagtagaagtgagccagacaaaaaaagcagaaaatgcagatgatggaaaggacatgtgccatgcactatcataagaacttcctaactgaacactgatactacaattctgaatccctgatcttaaaaaataattatacttcaccaacaaaacttggcctcttttggttccactctgccaccctgccattggaacttggattactgtgaacattgcagctatagcaaaataaaaaataaaaaaaataaataattggcattt

SEQ ID NO: 7939 - protein, 261 aa, Homo sapiens; identical to SEQ ID NO: 7929

SEQ ID NO: 7940 - DNA, 571 bp, Homo sapiens
atttgtggcgctaaaaaaagggatgggcgtgggagattccaggacttgtgctcgctgaagatacaactgttagtccaaggggtgaccctggagatcattaccaaaatttaaaaatttcaccactgggcacacatgttacccttctcgtgatggcatggcaaagcttgatttgcaagagtttcttttggattgtccccaatgattccctttaaaaataggagctccttcaagctcctgtatcagcagtgcttgcacctcataggtgatgatcatgagggggacaaggagcctctagacttaagagacaagttgccagcattctccagatggagtgtttccctccgcagcaccccctgctggtcagtttgacaagcaggtgaacagaagttctcaaatacacaatagtagattctatcaatcaagtttcataaagagttctgattcccagaggacttatggagcaaggatgactgacacaaacacaaaaatcattctgcctgttgaatgaatcataaaatactgtctttgatccaggaggcttgtgtcatctgccagcatttatgaaactgtg

SEQ ID NO: 7941 - protein, 56 aa, Homo sapiens
MIPFKNRSSFKLLYQQCLHLIGDDHEGDKEPLDLRDKLPAFSRWSVSLRSTPCWSV

SEQ ID NO: 7942 - DNA, 1355 bp, Homo sapiens
attgtgtcagaagcagaatctgaagtggagcttctagtatccccaggagcactgagtaaacacagaaggtacctgcgggatccacttgtgtccactgatctctcagagcagctgaggatcaaagagttttttcttgaaggccttcaggtgtatggctctctgtttcacatcaatcacgggaaccccttcaacatggaggtgttggtggactcctggcccgggtatcagatggttattatccgacctcaaaaacaggagatgactgatgacatggattcatacactaatgtatatcgtatattctccaaagaccctcaaaaatcacaagaagttttgaaaaattctgagatcataaactggaaacagaaactccaaatccaaggttttcaagaaagtttaggtgaggggataaaagcagctgcattttcaaattcagtgaaggtagagcattcgagagcactcctctttgttacggaagatatcctgaagctctatgccaccaataaaagcaagcttggaagctgggctgagacaggccacccagatgacgaattggagagcgagactcccaattttaagtatgcccagctgaatgtgtcttattctgggctggtaaatgacaactggaagctagggatgaataagaggagcctgcattacatcaagcgctgcctaggagccctgccagcagtctgtatgctgggcccagagggggtcccggtctcatgggtaaccatggacccttcttgtgaaataggaatgggctacagtgtggaaaaataccgaaggagaggcaacgcgacacggatgatggtgcgatacatgaagtatctgtgtcagaagaatattccattttacggctctgtgctggaagaaaatcaaggcgccatcagaatgaataaggcactaggtttccttgaggcctcctgtcagtggcaccaatggacctgctacccacagaatcttgttccgttgtagacaatgaagctgcttagcaatcttgggcaagccatctcttaatattaaagcagacaccacagaatagctttcttcacttacaaatgttgattgggcatttatgatatggcaggaactccttctcacatggagacctgatgttaaaggacacagccatgctcttgaggagcttacaatccaagctggaggcaggggagggtatagtctttaaatatgcttaagtgttgtagggaaggacagagttaccaataaacatgtaactagaaagccaggctcagttcttacctctgggaatcagaactctttatgaaacttgattgatagaatctactatctggaagataattgaagaactttaataaaattgtcaatagaat

SEQ ID NO: 7943 - protein, 261 aa, Homo sapiens
MEVLVDSWPGYQMVIIRPQKQEMTDDMDSYTNVYRIFSKDPQKSQEVLKNSEIINWKQKLQIQGFQESLGEGIKAAAFSNSVKVEHSRALLFVTEDILKLYATNKSKLGSWAETGHPDDELESETPNFKYAQLNVSYSGLVNDNWKLGMNKRSLHYIKRCLGALPAVCMLGPEGVPVSWVTMDPSCEIGMGYSVEKYRRRGNATRMMVRYMKYLCQKNIPFYGSVLEENQGAIRMNKALGFLEASCQWHQWTCYPQNLVPL

SEQ ID NO: 7944 - DNA, 1351 bp, Homo sapiens
attgtgtcagaagcagaatctgaagtggagcttctagtatccccaggagcactgagtaaacacagaaggtacctgcaggatccacttgtgtccattgatctctcagagcagctgaggatcaaagtttttttcttgaagggcttgaggagtgtatggctctctgtttcacatcaatcacgggaaccccttcaacatggaagtgttggtggactcctggcccgagtatcagatggttattatccgacctcaaaaacaggagatgactgatgacatggattcatacactaatgtatatcgtgtattctccaaagaccctcaaaaatcacaagaagttttgaaaaattctgagatcataaactggaaacagaaactccaaatccaaggttttcaagaaagtttaggtgaggggataagagcagctgcattttcaaattcagtgaaggtagagcattcgagagcactcctctttgttacggaagatatcctgaagctctatgccaccaataaaagcaagcttggaagctgggctgagacaggccacccagatgacgaattggagagcgagactccgaactttaagtatgcccagctgaatgtgtcttattctgggctggtaaatgacaactggaagctagggatgaataagaggagcctgcgttacatcaagcgctgcctaggagccctgccagcagcctgtatgctgggcccagagggggtcccggtctcatgggtaaccatggacccttcttgtgaaataggaatgggctacagtgtggaaaaataccgaaggagaggcaatgggacacggctgatcatgcgatgcatgaagtatctgtgtcagaagaatattccattttacggctctgtgctggaagaaaatcaaggcgtcatcagaaagactagtgcactaggtttccttgaggcctcctgtcagtggcaccaatggaactgctacccacagaatcttgttccattgtagacaatgaagctgcttagcaatcttgggcaagccatctcttaatattaaagcagacaccacagaatagctttcttcacttacaaatgttgattgggcatttgtgatatggcaggaactctttctcacatggagacttgatgttaaaggacacagccatgctcttgaggagcttacaatccaagctggaggcaggggagggtatagtctttaaatatgcttaagtgttgtagggaaggacagagttaccaataaacatgtaactagaaagccaggctcagttcttacctctgggaatcagaactctttatgaaacttggttgatagaatctactatctggaagataaatgaagaactttaataaaattgtcaat

SEQ ID NO: 7945 - protein, 261 aa, Homo sapiens [sequence omitted]

SEQ ID NO: 7946 - DNA, 883 bp, Homo sapiens
ggcgggaaaagttcagctgagagatataaaagagcagtctttccagcacctgcaaatccagagcggcgggcactgacgggcacttgcaccgtgtggacagactctccggttctggggaaatccagtccctgttactccattttggccagaaattcaaggatactgtcatgaagcagacacatgctgacacacctgttgatcattgtctatctggcataagaaagtgtagcagcacctttaagcttaaaagtgaagtcaacaagcatgaaacagcccttgaaatgcagaatccaaatttgaacaataaagaatgttgtttcacctttacgttgaatggaaactccagaaaattagaccgtagtgtgtttacagcatatggtaaacccagcgagagtatctactcagccctgagtgctaatgactatttcagtgaaaggataaagaatcagtttaataagaacattattgtttatgaagaaaagacaatagatggacatataaatttaggaatgcctctcaagtgcctgcctagtgattctcattttaaaattacatttggtcaaagaaagagtagcaaagaagatggacacatattacgccaatgtgaaaatccaaacatggaatgcattctttttcatgttgttgctataggaaggacaagaaagaagattgttaagatcaacgaacttcatgaaaaaggaagtaaactttgtatttatgccttgaagggtgagactattgaaggagccttatgcaaggatggccgttttcggtctgacataggtgaatttgaatggaaactaaaggaaggtcataagaaaatttatggaaaacagtccatggtggatgaagtatctggaaaagtcttagaaatggacatttc

SEQ ID NO: 7947 - protein, 237 aa, Homo sapiens
MKQTHADTPVDHCLSGIRKCSSTFKLKSEVNKHETALEMQNPNLNNKECCFTFTLNGNSRKLDRSVFTAYGKPSESIYSALSANDYFSERIKNQFNKNIIVYEEKTIDGHINLGMPLKCLPSDSHFKITFGQRKSSKEDGHILRQCENPNMECILFHVVAIGRTRKKIVKINELHEKGSKLCIYALKGETIEGALCKDGRFRSDIGEFEWKLKEGHKKIYGKQSMVDEVSGKVLEMD

SEQ ID NO: 7948 - DNA, 982 bp, Homo sapiens
gcgggaaaagttcagctgagagatataaaagagcagtctttccagcacctgcaaatccagagcggcgggcactgacgggcacttgcaccgtgtggacagactctccggttctggggaaatccagtccctgttactccattttggccagaaattcaaggatactgtcatgaagcagacacatgctgacacacctgttgatcattgtctatctggcataagaaagtgtagcagcacctttaagcttaaaagtgaagtcaacaagcatgaaacagcccttgaaatgcagaatccaaatttgaacaataaagaatgttgtttcacctttacgttgaatggaaactccagaaaattagaccgtagtgtgtttacagcatatggtaaacccagcgagagtatctactcagccctgagtgctaatgactatttcagtgaaaggataaagaatcagtttaataagaacattattgtttatgaagaaaagacaatagatggacatataaatttaggaatgcctctcaagtgcctgcctagtgattctcattttaaaattacatttggtcaaagaaagagtagcaaagaagatggacacatattacgccaatgtgaaaatccaaacatggaatgcattctttttcatgttgttgctataggaaggacaagaaagaagattgttaagatcaacgaacttcatgaaaaaggaagtaaactttgtatttatgccttgaagggtgagactattgaaggagccttatgcaaggatggccgttttcggtctgacataggtgaatttgaatggaaactaaaggaaggtcataagaaaatttatggaaaacagtccatggtggatgaagtatctggaaaagtcttagaaatggacatttcaaaaaaaaaagcattacaacagaaagatatccataaaaaaattaaacagaatgaaagtgccactgatgaaattaatcaccagagtctgatacagtctaag

SEQ ID NO: 7949 - protein, 271 aa, Homo sapiens
MKQTHADTPVDHCLSGIRKCSSTFKLKSEVNKHETALEMQNPNLNNKECCFTFTLNGNSRKLDRSVFTAYGKPSESIYSALSANDYFSERIKNQFNKNIIVYEEKTIDGHINLGMPLKCLPSDSHFKITFGQRKSSKEDGHILRQCENPNMECILFHVVAIGRTRKKIVKINELHEKGSKLCIYALKGETIEGALCKDGRFRSDIGEFEWKLKEGHKKIYGKQSMVDEVSGKVLEMDISKKKALQQKDIHKKIKQNESATDEINHQSLIQS

SEQ ID NO: 7950 - DNA, 1040 bp, Homo sapiens
gttcagctgagagatataaaagagcagtctttccagcacctgcaaatccagagcggcgggcactgacgggcacttgcaccgtgtggacagactctccggttctggggaaatccagtccctgttactccattttggccagaaattcaagacatttcaggtggcagaataaattcaatccttgtttctccatcttatcgagtagtagaagttagttacattctctttgaactcatcatgaattccatgaagactgaagaaaacaagtcatttagcgctatggaagatgaccagaggactagacctgaagtttcaaaggatactgtcatgaagcagacacatgctgacacacctgttgatcattgtctatctggcataagaaagtgtagcagcacctttaagcttaaaagtgaagtcaacaagcatgaaacagcccttgaaatgcagaatccaaatttgaacaataaagaatgttgtttcacctttacgttgaatggaaactccagaaaattagaccgtagtgtgtttacagcatatggtaaacccagcgagagtatctactcagccctgagtgctaatgactatttcagtgaaaggataaagaatcagtttaataagaacattattgtttatgaagaaaagacaatagatggacatataaatttaggaatgcctctcaagtgcctgcctagtgattctcattttaaaattacatttggtcaaagaaagagtagcaaagaagatggacacatattacgccaatgtgaaaatccaaacatggaatgcattctttttcatgttgttgctataggaaggacaagaaagaagattgttaagatcaacgaacttcatgaaaaaggaagtaaactttgtatttatgccttgaagggtgagactattgaaggagccttatgcaaggatggccgttttcggtctgacataggtgaatttgaatggaaactaaaggaaggtcataagaaaatttatggaaaacagtccatggtggatgaagtatctggaaaagtcttagaaatggacatttc

SEQ ID NO: 7951 - protein, 267 aa, Homo sapiens
MNSMKTEENKSFSAMEDDQRTRPEVSKDTVMKQTHADTPVDHCLSGIRKCSSTFKLKSEVNKHETALEMQNPNLNNKECCFTFTLNGNSRKLDRSVFTAYGKPSESIYSALSANDYFSERIKNQFNKNIIVYEEKTIDGHINLGMPLKCLPSDSHFKITFGQRKSSKEDGHILRQCENPNMECILFHVVAIGRTRKKIVKINELHEKGSKLCIYALKGETIEGALCKDGRFRSDIGEFEWKLKEGHKKIYGKQSMVDEVSGKVLEMD

SEQ ID NO: 7952 - DNA, 3531 bp, Homo sapiens
gttcagctgagagatataaaagagcagtctttccagcacctgcaaatccagagcggcgggcactgacgggcacttgcaccgtgtggacagactctccggttctggggaaatccagtccctgttactccattttggccagaaattcaagacatttcaggtggcagaataaattcaatccttgtttctccatcttatcgagtagtagaagttagttacattctctttgaactcatcatgaattccatgaagactgaagaaaacaagtcatttagcgctatggaagatgaccagaggactagacctgaagtttcaaaggatactgtcatgaagcagacacatgctgacacacctgttgatcattgtctatctggcataagaaagtgtagcagcacctttaagcttaaaagtgaagtcaacaagcatgaaacagcccttgaaatgcagaatccaaatttgaacaataaagaatgttgtttcacctttacgttgaatggaaactccagaaaattagaccgtagtgtgtttacagcatatggtaaacccagcgagagtatctactcagccctgagtgctaatgactatttcagtgaaaggataaagaatcagtttaataagaacattattgtttatgaagaaaagacaatagatggacatataaatttaggaatgcctctcaagtgcctgcctagtgattctcattttaaaattacatttggtcaaagaaagagtagcaaagaagatggacacatattacgccaatgtgaaaatccaaacatggaatgcattctttttcatgttgttgctataggaaggacaagaaagaagattgttaagatcaacgaacttcatgaaaaaggaagtaaactttgtatttatgccttgaagggtgagactattgaaggagccttatgcaaggatggccgttttcggtctgacataggtgaatttgaatggaaactaaaggaaggtcataagaaaatttatggaaaacagtccatggtggatgaagtatctggaaaagtcttagaaatggacatttcaaaaaaaaaagcattacaacagaaagatatccataaaaaaattaaacagaatgaaagtgccactgatgaaattaatcaccagagtctgatacagtctaagaaaaaagtccacaaaccaaagaaagatggagagaccaaagatgtagaacacagcagagagcaaattctcccacctcaggatctaagccattatattaaagataaaactcgccagacaattcccaggattagaaattattacttttgtagtttgccccgaaaatataggcaaataaactcacaagttagacggaggccgcatctgggtaggcggtatgctattaatctggatgtccaaaaggaggcaattaatctcttaaagaattatcaaacgttgaatgaagccataatgcatcagtatccgaattttaaagaggaggcacagtgggtaagaaaatattttcgggaagaacaaaagagaatgaatctttcaccagctaagcaattcaacatatataaaaaggacttcggaaaaatgactgcaaattctgtttcagttgcaacctgcgaacagcttacatattatagcaagtcagttgggttcatgcaatgggacaataatggaaacacaggtaatgctacttgctttgtcttcaatggtggttatattttcacctgtcgacatgttgtacatcttatggtgggtaaaaacacacatccaagtttgtggccagatataattagcaaatgtgcgaaggtaaccttcacttatacagagttctgccctactcctgacaattggttttccattgagccatggcttaaagtgtccaatgaaaatctagattatgccattttaaaactaaaagaaaatggaaatgcgtttcctccaggactatggcgacagatttctcctcaaccatctactggtttgatttatttaattggtcatcctgaaggccagatcaagaaaatagatggttgtactgtgattcctctaaacgaacgattgaaaaaatatccaaacgattgtcaagatgggttggtagatctctatgataccaccagtaatgtatactgtatgtttacccaaagaagtttcctatcagaggtttggaacacacacacgcttagttatgatacttgtttctctgatgggtcctcaggctccccagtgtttaatgcatctggcaaattggttgctttgcatacctttgggcttttttatcaacgaggatttaatgtgcatgcccttattgaatttggttattctatggattctattctttgtgatattaaaaagacaaatgagagcttgtataaatcattaaatgatgagaaacttgagacctacgatgaagagaaaggtaaacaagagtcatcacttcaagatcatcagattgaacccatggaatgttagaaaagagatgctgtcttcaagaaaatatgccaataattcctggcaaagatttcatgacaaagacacttaaagcaattgcaacaaaagtgaaaattggcaaatgagacctaattaaatcttctgcacagcaaaagaaactatcaacagggtaaacacacaacctacggaatgggagaaaatatttgcaaactatgcatacagcaaagatctaatattcagaatccattaggaacttaaacagattaacaagcaaaaaaaacaagcaaccccattaaaaagtgggcaaaggacatgaacaaacacttttcaaaagaagatatacacatggccaacaaggatatgaaaaaatacctgatatcactaatcattagagaaatgcaaatcaaaaaaatgccatcacactaatcagaatggctgttattaaaatgccaaaaaattacagatgctggcgaggttgcagagaaaggggaatgcttatacactgctagtgggaaaataaattagttcagccattgtggaaagcagttgggtgatttctaaaagaacttaaaacagctaccattcaagccagcaatctcatgactgggtatatgtccaaaggaatataaattgttctaccataaagacatgcacatatatgttcactgcagcactattcacaatagcaaaacatgaaatcaacctaaatgcccatcaatggtagactggataaagaaaatgtgacacatatacaccatagcatactacacagccataaaaaagtacaagatcatgtgctttgcagcaacatggatggaactgaaggtcattatcctaagcgaactaatgcaggaacagaaagccaagtaccacatgttctctcataagtggaagctaaatattgagtacacatggacacaaagaagaaaacaacagatatggggcctacttgagggtggagggtgggaggagggtgaagactgaaaaactgcctatggggtactatgcttattacctgggtgatgaaataatctgaacacaaaaccctggtgacatgcagtttacctatataacaaaactgcacatggactcttaaacctaaataaaagttta

SEQ ID NO: 7953 - protein, 734 aa, Homo sapiens; identical to SEQ ID NO: 876

SEQ ID NO: 7954 - DNA, 573 bp, Homo sapiens
aaatccagagcggcgggcactgacgggcacttgcaccgtgtggacagactctccggttctggggaaatccagtccctgttactccattttggccagaaattcaagacatttcaggtggcagaataaattcaatccttgtttctccatcttatcgagtagtagaagttagttacattctctttgaactcatcatgaattccatgaagactgaagaaaacaagtcatttagcgctatggaagatgaccagaggactagacctgaagtttcaaaggtatatctacttttttacaactcctcagaggagtgatagtctaactatagtgccatatgaggatcttggagataagttcttaaacaatggtcgttataagcccttctcttaggtagtttaaaatatatttggggagctcatacacataagtgcttgtggaaagcaaaatgatagagttaacaatgctaaacgtatgttaagacaacaagatgactaacaaacaatatagacacttaaagtcttggaaagtgtagacaggcaaaaataattagctaatgttttctgaggaaacactgtgtgc

SEQ ID NO: 7955 - protein, 47 aa, Homo sapiens
MTRGLDLKFQRYIYFFTTPQRSDSLTIVPYEDLGDKFLNNGRYKPFS

SEQ ID NO: 7956 - DNA, 579 bp, Homo sapiens
aaatccagagcggcgggcactgacgggcacttgcaccgtgtggacagactctccggttctggggaaatccagtccctgttactccattttggccagaaattcaaggtgtccccagcgcagccaatcggcttccgaagtaggtgagttgctgcctgaagagaaaagacaaactccagtatctttcattccattggccagacgcgccattccccaagtgagttctgttctccaaccaaagtgctggattccaagggactggaagggaaagtccctaaaaatcacgagttcaggcgtctgagacttggtgggaacggaccttcctcttagtgcccaagcctgttctaatttttaaaaactgatgtctattaagacccaatgttaactttatgaaaatggttcctaaggagattcacatctctgtgtccgaattctgtgtgcagcaaacatcatctcaagtgcgttttcccaactacgcttctttccaggataaaatactctaagtgacaaatgttgagtacattatcaggttctctgctgtttaaaaagtatccctgtgctttgaagatactgctataattt

SEQ ID NO: 7957 - protein, 37 aa, Homo sapiens [sequence omitted]

SEQ ID NO: 7958 - DNA, 434 bp, Homo sapiens
gttctccatgagggctccacccctgcagcaaacttctgcctggatatccaggcgtttccatacatcctgtgaaatctaggtggaggttcccaaacctcaattctttacttctgttcacctgcaggcccaacaccatgtgtaaggcaccaaggcttggggcttgcaccctctgagtcaatggcctgagctatatcttggccccttttagccacagctgggacacagggcaccaagttctaagactgcacaaagcagcaagacctggggtttagcccatgaaaccactttttctcctcccatcacaagcctggttacacggttaggtggaaaagacaagttgtatgtagagatcattatcagaaattgctaaactctgtcatcaaaaactctgttggaatggattttaaaatttcttaataaaagatgaaacatga

SEQ ID NO: 7959 - protein, 53 aa, Homo sapiens
PQLGHRAPSSKTAQSSKTWGLAHETTFSPPITSLVTRLGGKDKLYVEIIIRNC

SEQ ID NO: 7960 - DNA, 2158 bp, Homo sapiens
ctgggacgctggcggcagagccactgtggcagcttgagtctcgcgcgcgcaggaagcggaggtggaagttggggcgcaggaatgtggctgtccccgcctgtaaatcatggttggggaggagtcgcggaggcaccaggctggggtctgcagcgcgccatctgctgcagcacacaggaggcgctgaggctagttggagacagagtctcactgtgtcacccaggctggagtgaagtggcatgatcttggcttactgaaacctccatctcccaggttcaagcgattctcatgcctcagccacttgagtagctgggactacaggatttcgccatgttccccaggctggtctcaaactcctgaactcaggcagcccgcctaccttggcctcccaaagtgctaggattacagcccaaatgaccctccaagaccctctggaggcacccgcagtgctccttaatttgcagctctacagaatgagaccagcgtggcagccccctttcaggacagctcccgagacgagacgcgagagcagcccctaaatctcacccagcaaagccgtttcttcctaaccgggctggggagtgccgcgcgctgccagcagatggcgacagaggattagcctgcggaaaccggcctttttatagccaacaagagcaaaagcacactgcaatgtccaaacgaattgcaggcgttttctgctccctgaagcctgggaattaatttatatactcagtcccttttcccttggctggccattgaagtagttgaaccacaggattggactgtccagaatcattagccagagttcactgtgagtggacgtcttttagttctgcttcaacgctataaccaacctttaccaaaagcaacaacaaaacaaaaaactgcagaaaccaatgagttctgttcacaaaggatggctcctcatgtcatcacaccggcaaggaatggacgagcctctgatttttctcttcttggctgactttacaaggttggatgcagtccatgaggatcatgcagcaaagacagaaagtgctggagaagcccaacctgcagggcctcacctttagctggtttgtgtggttccacttcatgtagctgttggaacaccagtctctctaatgtgctctatgggatagctgttaccttccactaatttatgtctaatacctataaacctaaagtatctttttaaaaattttattccgtctttttggaggaaatttttgtgcatgccagatatagtgtcaagcattgggattgctaagatgaacgtaacattgtcctcaccacccattaagtcacaatctagtagatgagtaaaagtaaaaaaaaaaattaaaaaaagagttataaccataatacagaagtgaacaggttgcagtggtagcacagagagggcttcagggatgctgtcacagaggtggtaacatttgagatatagattccaaattcagatgtgtttgctgttgcaaaattccagggtctatgtgcccagttcctgaacattccagtgataatttttacctaaaatttaggtggcaaatgaatcttactataaccacttggaaccactgtgtttctggtccatcttgtgaggcccatctttggttcagagggatggaggcagaagtcatacggcaggtaagctcaagcagtgatacatgacagggctttcagaactggggccatgaagagcaggctttatttgcatgctgtttaaaaacaagattttacaactgatttaccctattaaacacttccatgaataactcagtggagatttatttgcaatagtaggatcaggtgatttgaaatctttagtgtgtgtggttgtagcaggaggagtactgggttccagcatttaataagaggacccatggttttatgaaaatgtccagagatataattttggttaaggttatacctcatctttggttgtacagttgtttcttttagtttcagtacaatctaaaacaggaaatgtctccagggcatgtcagagaacttagtggcagctcctcccatcacaagcctggttacacggttaggtggaaaagacaagttgtatgtagagatcattatcagaaattgctaaactctgtcatcaaaaactctgttggaatggattttaaaatttcttaataaaagatgaaacatg

SEQ ID NO: 7961 - protein, 53 aa, Homo sapiens
MSPGHVRELSGSSSHHKPGYTVRWKRQVVCRDHYQKLLNSVIKNSVGMDFKIS

SEQ ID NO: 7962 - DNA, 1346 bp, Homo sapiens
ggagctgggacgctggcggcagagccactgtggcagcttgagtctcgcgcgcgcaggaagcggaggtggaagttggggcgcaggaatgtggctgtccccgcctgtaaatcatggttggggaggagtcgcggaggcaccaggctggggtctgcagcgcgccatctgctgcagcacacaggaggcgctgaggctagttggagacagagtctcactgtgtcacccaggctggagtgaagtggcatgatcttggcttactgaaacctccatctcccaggttcaagcgattctcatgcctcagccacttgagtagctgggactacaggatttcgccatgttccccaggctggtctcaaactcctgaactcaggcagcccgcctaccttggcctcccaaagtgctaggattacagcccaaatgaccctccaagaccctctggaggcacccgcagtgctccttaatttgcagctctacagaatgagaccagcgtggcagccccctttcaggacagctcccgagacgagacgcgagagcagcccctaaatctcacccagcaaagccgtttcttcctaaccgggctggggagtgccgcgcgctgccagcagatggcgacagaggattagcctgcggaaaccgggtggcaaatgaatcttactataaccacttggaaccactgtgtttctggtccatcttgtgaggcccatctttggttcagagggatggaggcagaagtcatacggcaggtaagctcaagcagtgatacatgacagggctttcagaactggggccatgaagagcaggctttatttgcatgctgtttaaaaacaagattttacaactgatttaccctattaaacacttccatgaataactcagtggagatttatttgcaatagtaggatcaggtgatttgaaatctttagtgtgtgtggttgtagcaggaggagtactgggttccagcatttaataagaggacccatggttttatgaaaatgtccagagatataattttggttaaggttatacctcatctttggttgtacagttgtttcttttagtttcagtacaatctaaaacaggaaatgtcaattcacatggtctggtagagaaagaatgactctaatgctctactattcaggtagaaatgaagaaagaagggtgatcacttccatgagcactgtaagcccttgaatgggcttataggcaaatacttatagttaaaatatgtaactcccattttagtattggatagaatactgtcacattttttcttattaaatctacatttttaccatctttcttgattgattttgccaataaaagttccttacctttttataaaagtcaaa

SEQ ID NO: 7963 - protein, 52 aa, Homo sapiens
MWLSPPVNHGWGGVAEAPGWGLQRAICCSTQEALRLVGDRVSLCHPGWSEVA

SEQ ID NO: 7964 - DNA, 1324 bp, Homo sapiens
ctgggacgctggcggcagagccactgtggcagcttgagtctcgcgcgcgcaggaagcggaggtggaagttggggcgcaggaatgtggctgtccccgcctgtaaatcatggttggggaggagtcgcggaggcaccaggctggggtctgcagcgcgccatctgctgcagcacacaggaggcgctgaggctagttggagacagagtctcactgtgtcacccaggctggagtgaagtggcatgatcttggcttactgaaacctccatctcccaggttcaagcgattctcatgcctcagccacttgagtagctgggactacaggatttcgccatgttccccaggctggtctcaaactcctgaactcaggcagcccgcctaccttggcctcccaaagtgctaggattacagcccaaatgaccctccaagaccctctggaggcacccgcagtgctccttaatttgcagctctacagaatgagaccagcgtggcagccccctttcaggacagctcccgagacgagacgcgagagcagcccctaaatctcacccagcaaagccgtttcttcctaaccgggctggggagtgccgcgcgctgccagcagatggcgacagaggattagcctgcggaaaccggcctttttatagccaacaagagcaaaagcacactgcaatgtccaaacgaattgcaggcgttttctgctccctgaagcctgggaattaatttatatactcagtcccttttcccttggctggccattgaagtagttgaaccacaggattggactgtccagaatcattagccagagttcactgtgagtggacgtcttttagttctgcttcaacgctataaccaacctttaccaaaagcaacaacaaaacaaaaaactgcagaaaccaatgagttctgttcacaaaggatggctcctcatgtcatcacaccggcaaggaatggacgagcctctgatttttctcttcttggctgactttacaaggttggatgcagtccatgaggatcatgcagcaaagacagaaagtgctggagaagcccaacctgcagggcctcacctttagctggtttgtgtggttccacttcatgtagctgttggaacaccagtctctctaatgtgctctatgggatagctgttaccttccactaatttatgtctaatacctataaacctaaagtatctttttaaaaattttattccgtctttttggaggaaatttttgtgcatgccagatatagtgtcaagcattgggattgctaagatgaacgtaacattgtcctcaccacccattaagtcacaatctagtagatgagtaaaagt

SEQ ID NO: 7965 - protein, 52 aa, Homo sapiens; identical to SEQ ID NO: 7963

SEQ ID NO: 7966 - DNA, 949 bp, Homo sapiens
tccttgacgccgcgagcaggaccctgtctcactgaccccgtgcccacggcggtccttgcctgcttctattctcccggtttccccagtcccgagtattggaaagcgagagcgaaagcgaaagcatcctagtcgccgagacagagtctcactgtgtcacccaggctggagtgaagtggcatgatcttggcttactgaaacctccatctcccaggttcaagcgattctcatgcctcagccacttgagtagctgggactacaggatttcgccatgttccccaggctggtctcaaactcctgaactcaggcagcccgcctaccttggcctcccaaagtgctaggattacagcccaaatgaccctccaagaccctctggaggcacccgcagtgctccttaatttgcagctctacagaatgagaccagcgtggcagccccctttcaggacagctcccgagacgagacgcgagagcagcccctaaatctcacccagcaaagccgtttcttcctaaccgggctggggagtgccgcgcgctgccagcagatggcgacagaggattagcctgcggaaaccgggtaaggggagggcggagctgaggtgagaacccacatccctcatgcccagtggcagcaggacgtggaaatggtttgcccagccctcacttctcttggacagagcttgagccttctgggaaactgcttttccctggctgagtgattagcgggggtgttaagttgggaagctggacgttcacttccatgtgctcctctgagaaccatctgttggtctgatggtgctagatctgaagctggtgagcctcttggggcggcctcaagggctaacaagatctcaaatgcccttctctccatcatttgtggtatcctggattattgtgaaaatgtatagggattcctggggaagagttaaggattaaaatataaaggtttaaatat

SEQ ID NO: 7967 - protein, 47 aa, Homo sapiens
MVLDLKLVSLLGRPQGLTRSQMPFSPSFVVSWIIVKMYRDSWGRVKD

SEQ ID NO: 7968 - DNA, 2569 bp, Homo sapiens
tcttccagggcgggcggtgtggtgcacgcattgctgtgctccaactccctcagggcctgtgttgccgcactctgctgctatgagcttcctcaaaagtttcccgccgcctgggccagcggaggggctcctgcggcagcagccagacactgaggctgtgctgaacgggaagggcctcggcactggtaccctttacatcgctgagagccgcctgtcttggttagatggctctggattaggattctcactggaataccccaccattagtttacatgcattatccagggaccgaagtgactgtctaggagagcatttgtatgttatggtgaatgccaaatttgaagtggaggcaatgttcactgcaatgtgcgaatgccaggccttgcatccagatcctgaggatgaggattcagatgactacgatggagaagaatatgatgtggaagcacatgaacaaggacagggggacatccctacattttacacctatgaagaaggattatcccatctaacagcagaaggccaagccacactggagagattagaaggaatgctttctcagtctgtgagcagccagtataatatggctggggtcaggacagaagattcaataagagattatgaagatgggatggaggtggataccacaccaacagttgctggacagtttgaggatgcagatgttgatcactgaaaatgatttatgcaagtttaagattctgctcctaagtgtaggagagaacttggtgcctcttccactctggagtgaagttaatgaaagtctttttccttttccaaaacccaacctgaaccagttctttcttgagacagactatactgagacaacaagttgtcaccagcagaagatagataatatgacctttattaacttgatgaattaacttaaccaagagggtatttgtagtttactatttaccctaaaactttctgtgtctgggtaccctctgagtaggcctataattcctaccttgactgtgtgcatcatttgtaagctagcagatctatgtggtgaaaatgcacaggagcttggtagactgcgggggaaagagagagctcctttcgccatgttttaccagtctgctgttataacctcttaggttgtatcctttaatttccagccttttaggttagtttctgtaacagaacaagtgagtctgggatgaagtcctcaaagtacttcaaatggtaattgttttgtttttgtaatagcttaacaaataaacctaggttttctatattactttgctctcattcttgactaaaaccattaatgagaaatgttttttaaaaaataatgctggcaaatatgagaattttgttggctttatttttgtttacttgttgagaagatgaacatgaaattaataagaaaatatagttatagcttctggcaagtatttagtaaggcaaagatttaacacatttcaggggatttctgccacttccttttagatcagcagtaatttcttatatttatcaactctcaatttttagttttcatagatacctgggtattataaggctgatttgtaattactgatttatacttggacttttgaaatcattatgtgtccttaaaaataaggttatacaagctaaccttcttaacaggatcacatggctaattagtgactaaactgatgtttggtaccactcagcccagtgttcatttcagcactgtcacttggtttcccttatcttgcaaggtagactgaaaaaaaacgaattttcctttttctaaccagactctcagaatttctgagtctgttaacaataggcaagtaaaacagccacttgaaatggaaactaaaatttactgagacctctgtactagccactgtcctgagttctttattatgtattataatattcttaattatcttatgagatacgcttttatcccactttatagttgaggaaactgagttatagagagaggtaaaataacttgcttaaggtcatgtagatagtgaattgtgatttttgagcctgtgctttaaaacatcatacagccttaccacctaccagcagcagaaagcatgcacactctccccactgctgcagggtttcagtgttaacatttcaatggccagtacaagagcttccccagtttctctgctacccatctgagcaacacccataattctatcctagaagtttgtccattcttcagtaatcagtcaggacattctcacaggctaatattagaaattccatttgagttccttttaaaaggaacaaatttataattgtgactttccatgaacataaattgctctgatagcaaaatgtcgagaagattcagagtgtacttggtttcttgttggtgttgctgtggtcaatgcaatatgcaaaaaggcaggagaccaaagcatgtgggcacctctctgggcttatttcctcattagactaagtgactttcaaagattgagctgtaacattcactagatagttagaaccgtagcattgagaaaatagaagctgagaaaaaagagcaggtcaggcttttaaaagataaaatttataatgatcagccagacaatatttattg

SEQ ID NO: 7969 - protein, 203 aa, Homo sapiens
MSFLKSFPPPGPAEGLLRQQPDTEAVLNGKGLGTGTLYIAESRLSWLDGSGLGFSLEYPTISLHALSRDRSDCLGEHLYVMVNAKFEVEAMFTAMCECQALHPDPEDEDSDDYDGEEYDVEAHEQGQGDIPTFYTYEEGLSHLTAEGQATLERLEGMLSQSVSSQYNMAGVRTEDSIRDYEDGMEVDTTPTVAGQFEDADVDH

SEQ ID NO: 7970 - DNA, 2462 bp, Homo sapiens
ctcttccagggcgggcggtgtggtgcacgcattgctgtgctccaactccctcagggcctgtgttgccgcactctgctgctatgagcttcctcaaaagtttcccgccgcctgggccagcggaggggctcctgcggcagcagccagacactgaggctgtgctgaacgggaagggcctcggcactggtaccctttacatcgctgagagccgcctgtcttggttagatggctctggattaggattctcactggaataccccaccattagtttacatgcattatccagggaccgaagtgactgtctaggagagcatttgtatgttatggtgaatgccaaatttgaagaacaaggacagggggacatccctacattttacacctatgaagaaggattatcccatctaacagcagaaggccaagccacactggagagattagaaggaatgctttctcagtctgtgagcagccagtataatatggctggggtcaggacagaagattcaataagagattatgaagatgggatggaggtggataccacaccaacagttgctggacagtttgaggatgcagatgttgatcactgaaaatgatttatgcaagtttaagattctgctcctaagtgtaggagagaacttggtgcctcttccactctggagtgaagttaatgaaagtctttttccttttccaaaacccaacctgaaccagttctttcttgagacagactatactgagacaacaagttgtcaccagcagaagatagataatatgacctttattaacttgatgaattaacttaaccaagagggtatttgtagtttactatttaccctaaaactttctgtgtctgggtaccctctgagtaggcctataattcctaccttgactgtgtgcatcatttgtaagctagcagatctatgtggtgaaaatgcacaggagcttggtagactgcgggggaaagagagagctcctttcgccatgttttaccagtctgctgttataacctcttaggttgtatcctttaatttccagccttttaggttagtttctgtaacagaacaagtgagtctgggatgaagtcctcaaagtacttcaaatggtaattgttttgtttttgtaatagcttaacaaataaacctaggttttctatattactttgctctcattcttgactaaaaccattaatgagaaatgttttttaaaaaataatgctggcaaatatgagaattttgttggctttatttttgtttacttgttgagaagatgaacatgaaattaataagaaaatatagttatagcttctggcaagtatttagtaaggcaaagatttaacacatttcaggggatttctgccacttccttttagatcagcagtaatttcttatatttatcaactctcaatttttagttttcatagatacctgggtattataaggctgatttgtaattactgatttatacttggacttttgaaatcattatgtgtccttaaaaataaggttatacaagctaaccttcttaacaggatcacatggctaattagtgactaaactgatgtttggtaccactcagcccagtgttcatttcagcactgtcacttggtttcccttatcttgcaaggtagactgaaaaaaaacgaattttcctttttctaaccagactctcagaatttctgagtctgttaacaataggcaagtaaaacagccacttgaaatggaaactaaaatttactgagacctctgtactagccactgtcctgagttctttattatgtattataatattcttaattatcttatgagatacgcttttatcccactttatagttgaggaaactgagttatagagagaggtaaaataacttgcttaaggtcatgtagatagtgaattgtgatttttgagcctgtgctttaaaacatcatacagccttaccacctaccagcagcagaaagcatgcacactctccccactgctgcagggtttcagtgttaacatttcaatggccagtacaagagcttccccagtttctctgctacccatctgagcaacacccataattctatcctagaagtttgtccattcttcagtaatcagtcaggacattctcacaggctaatattagaaattccatttgagttccttttaaaaggaacaaatttataattgtgactttccatgaacataaattgctctgatagcaaaatgtcgagaagattcagagtgtacttggtttcttgttggtgttgctgtggtcaatgcaatatgcaaaaaggcaggagaccaaagcatgtgggcacctctctgggcttatttcctcattagactaagtgactttcaaagattgagctgtaacattcactagatagttagaaccgtagcattgagaaaatagaagctgagaaaaaagagcaggtcaggcttttaaaagataaaatttataatgatcagccagacaatatttattg

SEQ ID NO: 7971 - protein, 167 aa, Homo sapiens
MSFLKSFPPPGPAEGLLRQQPDTEAVLNGKGLGTGTLYIAESRLSWLDGSGLGFSLEYPTISLHALSRDRSDCLGEHLYVMVNAKFEEQGQGDIPTFYTYEEGLSHLTAEGQATLERLEGMLSQSVSSQYNMAGVRTEDSIRDYEDGMEVDTTPTVAGQFEDADVDH

SEQ ID NO: 7972 - DNA, 2510 bp, Homo sapiens
cggggtgactgcctcttccagggcgggcggtgtggtgcacgcattgctgtgctccaactccctcagggcctgtgttgccgcactctgctgctatgagcttcctcaaaagtttcccgccgcctgggccagcggaggggctcctgcggcagcagccagacactgaggctgtgctgaacgggaagggcctcggcactggtaccctttacatcgctgagagccgcctgtcttggttagatggctctggattaggattctcactggaataccccaccattagtttacatgcattatccagggaccgaagtgactgtctaggagagcatttgtatgttatggtgaatgccaaatttgaagaagaatcaaaagaacctgttgctgatgaagaagaggaagacagtgatgatgatgttgaacctattactgaatttagatttgtgcctagtgataaatcagcgttggaggcaatgttcactgcaatgtgcgaatgccaggccttgcatccagatcctgaggatgaggattcagatgactacgatggagaagaatatgatgtggaagcacatgatgggatggaggtggataccacaccaacagttgctggacagtttgaggatgcagatgttgatcactgaaaatgatttatgcaagtttaagattctgctcctaagtgtaggagagaacttggtgcctcttccactctggagtgaagttaatgaaagtctttttccttttccaaaacccaacctgaaccagttctttcttgagacagactatactgagacaacaagttgtcaccagcagaagatagataatatgacctttattaacttgatgaattaacttaaccaagagggtatttgtagtttactatttaccctaaaactttctgtgtctgggtaccctctgagtaggcctataattcctaccttgactgtgtgcatcatttgtaagctagcagatctatgtggtgaaaatgcacaggagcttggtagactgcgggggaaagagagagctcctttcgccatgttttaccagtctgctgttataacctcttaggttgtatcctttaatttccagccttttaggttagtttctgtaacagaacaagtgagtctgggatgaagtcctcaaagtacttcaaatggtaattgttttgtttttgtaatagcttaacaaataaacctaggttttctatattactttgctctcattcttgactaaaaccattaatgagaaatgttttttaaaaaataatgctggcaaatatgagaattttgttggctttatttttgtttacttgttgagaagatgaacatgaaattaataagaaaatatagttatagcttctggcaagtatttagtaaggcaaagatttaacacatttcaggggatttctgccacttccttttagatcagcagtaatttcttatatttatcaactctcaatttttagttttcatagatacctgggtattataaggctgatttgtaattactgatttatacttggacttttgaaatcattatgtgtccttaaaaataaggttatacaagctaaccttcttaacaggatcacatggctaattagtgactaaactgatgtttggtaccactcagcccagtgttcatttcagcactgtcacttggtttcccttatcttgcaaggtagactgaaaaaaaacgaattttcctttttctaaccagactctcagaatttctgagtctgttaacaataggcaagtaaaacagccacttgaaatggaaactaaaatttactgagacctctgtactagccactgtcctgagttctttattatgtattataatattcttaattatcttatgagatacgcttttatcccactttatagttgaggaaactgagttatagagagaggtaaaataacttgcttaaggtcatgtagatagtgaattgtgatttttgagcctgtgctttaaaacatcatacagccttaccacctaccagcagcagaaagcatgcacactctccccactgctgcagggtttcagtgttaacatttcaatggccagtacaagagcttccccagtttctctgctacccatctgagcaacacccataattctatcctagaagtttgtccattcttcagtaatcagtcaggacattctcacaggctaatattagaaattccatttgagttccttttaaaaggaacaaatttataattgtgactttccatgaacataaattgctctgatagcaaaatgtcgagaagattcagagtgtacttggtttcttgttggtgttgctgtggtcaatgcaatatgcaaaaaggcaggagaccaaagcatgtgggcacctctctgggcttatttcctcattagactaagtgactttcaaagattgagctgtaacattcactagatagttagaaccgtagcattgagaaaatagaagctgagaaaaaagagcaggtcaggcttttaaaagataaaatttataatgatcagccagacaatatttattg

SEQ ID NO: 7973 - protein, 179 aa, Homo sapiens
MSFLKSFPPPGPAEGLLRQQPDTEAVLNGKGLGTGTLYIAESRLSWLDGSGLGFSLEYPTISLHALSRDRSDCLGEHLYVMVNAKFEEESKEPVADEEEEDSDDDVEPITEFRFVPSDKSALEAMFTAMCECQALHPDPEDEDSDDYDGEEYDVEAHDGMEVDTTPTVAGQFEDADVDH

SEQ ID NO: 7974 - DNA, 2684 bp, Homo sapiens
cggggtgactgcctcttccagggcgggcggtgtggtgcacgcattgctgtgctccaactccctcagggcctgtgttgccgcactctgctgctatgagcttcctcaaaagtttcccgccgcctgggccagcggaggggctcctgcggcagcagccagacactgaggctgtgctgaacgggaagggcctcggcactggtaccctttacatcgctgagagccgcctgtcttggttagatggctctggattaggattctcactggaataccccaccattagtttacatgcattatccagggaccgaagtgactgtctaggagagcatttgtatgttatggtgaatgccaaatttgaagaagaatcaaaagaacctgttgctgatgaagaagaggaagacagtgatgatgatgttgaacctattactgaatttagatttgtgcctagtgataaatcagcgttggaggcaatgttcactgcaatgtgcgaatgccaggccttgcatccagatcctgaggatgaggattcagatgactacgatggagaagaatatgatgtggaagcacatgaacaaggacagggggacatccctacattttacacctatgaagaaggattatcccatctaacagcagaaggccaagccacactggagagattagaaggaatgctttctcagtctgtgagcagccagtataatatggctggggtcaggacagaagattcaataagagattatgaagatgggatggaggtggataccacaccaacagttgctggacagtttgaggatgcagatgttgatcactgaaaatgatttatgcaagtttaagattctgctcctaagtgtaggagagaacttggtgcctcttccactctggagtgaagttaatgaaagtctttttccttttccaaaacccaacctgaaccagttctttcttgagacagactatactgagacaacaagttgtcaccagcagaagatagataatatgacctttattaacttgatgaattaacttaaccaagagggtatttgtagtttactatttaccctaaaactttctgtgtctgggtaccctctgagtaggcctataattcctaccttgactgtgtgcatcatttgtaagctagcagatctatgtggtgaaaatgcacaggagcttggtagactgcgggggaaagagagagctcctttcgccatgttttaccagtctgctgttataacctcttaggttgtatcctttaatttccagccttttaggttagtttctgtaacagaacaagtgagtctgggatgaagtcctcaaagtacttcaaatggtaattgttttgtttttgtaatagcttaacaaataaacctaggttttctatattactttgctctcattcttgactaaaaccattaatgagaaatgttttttaaaaaataatgctggcaaatatgagaattttgttggctttatttttgtttacttgttgagaagatgaacatgaaattaataagaaaatatagttatagcttctggcaagtatttagtaaggcaaagatttaacacatttcaggggatttctgccacttccttttagatcagcagtaatttcttatatttatcaactctcaatttttagttttcatagatacctgggtattataaggctgatttgtaattactgatttatacttggacttttgaaatcattatgtgtccttaaaaataaggttatacaagctaaccttcttaacaggatcacatggctaattagtgactaaactgatgtttggtaccactcagcccagtgttcatttcagcactgtcacttggtttcccttatcttgcaaggtagactgaaaaaaaacgaattttcctttttctaaccagactctcagaatttctgagtctgttaacaataggcaagtaaaacagccacttgaaatggaaactaaaatttactgagacctctgtactagccactgtcctgagttctttattatgtattataatattcttaattatcttatgagatacgcttttatcccactttatagttgaggaaactgagttatagagagaggtaaaataacttgcttaaggtcatgtagatagtgaattgtgatttttgagcctgtgctttaaaacatcatacagccttaccacctaccagcagcagaaagcatgcacactctccccactgctgcagggtttcagtgttaacatttcaatggccagtacaagagcttccccagtttctctgctacccatctgagcaacacccataattctatcctagaagtttgtccattcttcagtaatcagtcaggacattctcacaggctaatattagaaattccatttgagttccttttaaaaggaacaaatttataattgtgactttccatgaacataaattgctctgatagcaaaatgtcgagaagattcagagtgtacttggtttcttgttggtgttgctgtggtcaatgcaatatgcaaaaaggcaggagaccaaagcatgtgggcacctctctgggcttatttcctcattagactaagtgactttcaaagattgagctgtaacattcactagatagttagaaccgtagcattgagaaaatagaagctgagaaaaaagagcaggtcaggcttttaaaagataaaatttataatgatcagccagacaatatttattg

SEQ ID NO: 7975 - protein, 237 aa, Homo sapiens; identical to SEQ ID NO: 878

SEQ ID NO: 7976 - DNA, 1257 bp, Homo sapiens
tcttccagggcgggcggtgtggtgcacgcattgctgtgctccaactccctcagggcctgtgttgccgcactctgctgctatgagcttcctcaaaagtttcccgccgcctgggccagcggaggggctcctgcggcagcagccagacactgaggctgtgctgaacgggaagggcctcggcactggtaccctttacatcgctgagagccgcctgtcttggttagatggctctggattaggattctcactggaataccccaccattagtttacatgcattatccagggaccgaagtgactgtctaggagagcatttgtatgttatggtgaatgccaaatttgaagtggaggcaatgttcactgcaatgtgcgaatgccaggccttgcatccagatcctgaggatgaggattcagatgactacgatggagaagaatatgatgtggaagcacatgaacaaggacagggggacatccctacattttacacctatgaagaaggattatcccatctaacagcagaaggccaagccacactggagagattagaaggaatgctttctcagtctgtgagcagccagtataatatggctggggtcaggacagaagattcaataagagattatgaagatgggatggaggtggataccacaccaacagttgctggacagtttgaggatgcagatgttgatcactgaaaatgatttatgcaagtttaagattctgctcctaagtgtaggagagaacttggtgcctcttccactctggagtgaagttaatgaaagtctttttccttttccaaaacccaacctgaaccagttctttcttgagacagactatactgagacaacaagttgtcaccagcagaagatagataatatgacctttattaacttgatgaattaacttaaccaagagggtatttgtagtttactatttaccctaaaactttctgtgtctgggtaccctctgagtaggcctataattcctaccttgactgtgtgcatcatttgtaagctagcagatctatgtggtgaaaatgcacaggagcttggtagactgcgggggaaagagagagctcctttcgccatgttttaccagtctgctgttataacctcttaggttgtatcctttaatttccagccttttaggttagtttctgtaacagaacaagtgagtctgggatgaagtcctcaaagtacttcaaatggtaattgttttgtttttgtaatagcttaacaaataaacctaggttttctatatt

SEQ ID NO: 7977 - protein, 203 aa, Homo sapiens; identical to SEQ ID NO: 7969

SEQ ID NO: 7978 - DNA, 1150 bp, Homo sapiens
ctcttccagggcgggcggtgtggtgcacgcattgctgtgctccaactccctcagggcctgtgttgccgcactctgctgctatgagcttcctcaaaagtttcccgccgcctgggccagcggaggggctcctgcggcagcagccagacactgaggctgtgctgaacgggaagggcctcggcactggtaccctttacatcgctgagagccgcctgtcttggttagatggctctggattaggattctcactggaataccccaccattagtttacatgcattatccagggaccgaagtgactgtctaggagagcatttgtatgttatggtgaatgccaaatttgaagaacaaggacagggggacatccctacattttacacctatgaagaaggattatcccatctaacagcagaaggccaagccacactggagagattagaaggaatgctttctcagtctgtgagcagccagtataatatggctggggtcaggacagaagattcaataagagattatgaagatgggatggaggtggataccacaccaacagttgctggacagtttgaggatgcagatgttgatcactgaaaatgatttatgcaagtttaagattctgctcctaagtgtaggagagaacttggtgcctcttccactctggagtgaagttaatgaaagtctttttccttttccaaaacccaacctgaaccagttctttcttgagacagactatactgagacaacaagttgtcaccagcagaagatagataatatgacctttattaacttgatgaattaacttaaccaagagggtatttgtagtttactatttaccctaaaactttctgtgtctgggtaccctctgagtaggcctataattcctaccttgactgtgtgcatcatttgtaagctagcagatctatgtggtgaaaatgcacaggagcttggtagactgcgggggaaagagagagctcctttcgccatgttttaccagtctgctgttataacctcttaggttgtatcctttaatttccagccttttaggttagtttctgtaacagaacaagtgagtctgggatgaagtcctcaaagtacttcaaatggtaattgttttgtttttgtaatagcttaacaaataaacctaggttttctatatt

SEQ ID NO: 7979 - protein, 167 aa, Homo sapiens; identical to SEQ ID NO: 7971

SEQ ID NO: 7980 - DNA, 1372 bp, Homo sapiens
cggggtgactgcctcttccagggcgggcggtgtggtgcacgcattgctgtgctccaactccctcagggcctgtgttgccgcactctgctgctatgagcttcctcaaaagtttcccgccgcctgggccagcggaggggctcctgcggcagcagccagacactgaggctgtgctgaacgggaagggcctcggcactggtaccctttacatcgctgagagccgcctgtcttggttagatggctctggattaggattctcactggaataccccaccattagtttacatgcattatccagggaccgaagtgactgtctaggagagcatttgtatgttatggtgaatgccaaatttgaagaagaatcaaaagaacctgttgctgatgaagaagaggaagacagtgatgatgatgttgaacctattactgaatttagatttgtgcctagtgataaatcagcgttggaggcaatgttcactgcaatgtgcgaatgccaggccttgcatccagatcctgaggatgaggattcagatgactacgatggagaagaatatgatgtggaagcacatgaacaaggacagggggacatccctacattttacacctatgaagaaggattatcccatctaacagcagaaggccaagccacactggagagattagaaggaatgctttctcagtctgtgagcagccagtataatatggctggggtcaggacagaagattcaataagagattatgaagatgggatggaggtggataccacaccaacagttgctggacagtttgaggatgcagatgttgatcactgaaaatgatttatgcaagtttaagattctgctcctaagtgtaggagagaacttggtgcctcttccactctggagtgaagttaatgaaagtctttttccttttccaaaacccaacctgaaccagttctttcttgagacagactatactgagacaacaagttgtcaccagcagaagatagataatatgacctttattaacttgatgaattaacttaaccaagagggtatttgtagtttactatttaccctaaaactttctgtgtctgggtaccctctgagtaggcctataattcctaccttgactgtgtgcatcatttgtaagctagcagatctatgtggtgaaaatgcacaggagcttggtagactgcgggggaaagagagagctcctttcgccatgttttaccagtctgctgttataacctcttaggttgtatcctttaatttccagccttttaggttagtttctgtaacagaacaagtgagtctgggatgaagtcctcaaagtacttcaaatggtaattgttttgtttttgtaatagcttaacaaataaacctaggttttctatatt

SEQ ID NO: 7981 - protein, 237 aa, Homo sapiens; identical to SEQ ID NO: 878

SEQ ID NO: 7982 - DNA, 1198 bp, Homo sapiens
cggggtgactgcctcttccagggcgggcggtgtggtgcacgcattgctgtgctccaactccctcagggcctgtgttgccgcactctgctgctatgagcttcctcaaaagtttcccgccgcctgggccagcggaggggctcctgcggcagcagccagacactgaggctgtgctgaacgggaagggcctcggcactggtaccctttacatcgctgagagccgcctgtcttggttagatggctctggattaggattctcactggaataccccaccattagtttacatgcattatccagggaccgaagtgactgtctaggagagcatttgtatgttatggtgaatgccaaatttgaagaagaatcaaaagaacctgttgctgatgaagaagaggaagacagtgatgatgatgttgaacctattactgaatttagatttgtgcctagtgataaatcagcgttggaggcaatgttcactgcaatgtgcgaatgccaggccttgcatccagatcctgaggatgaggattcagatgactacgatggagaagaatatgatgtggaagcacatgatgggatggaggtggataccacaccaacagttgctggacagtttgaggatgcagatgttgatcactgaaaatgatttatgcaagtttaagattctgctcctaagtgtaggagagaacttggtgcctcttccactctggagtgaagttaatgaaagtctttttccttttccaaaacccaacctgaaccagttctttcttgagacagactatactgagacaacaagttgtcaccagcagaagatagataatatgacctttattaacttgatgaattaacttaaccaagagggtatttgtagtttactatttaccctaaaactttctgtgtctgggtaccctctgagtaggcctataattcctaccttgactgtgtgcatcatttgtaagctagcagatctatgtggtgaaaatgcacaggagcttggtagactgcgggggaaagagagagctcctttcgccatgttttaccagtctgctgttataacctcttaggttgtatcctttaatttccagccttttaggttagtttctgtaacagaacaagtgagtctgggatgaagtcctcaaagtacttcaaatggtaattgttttgtttttgtaatagcttaacaaataaacctaggttttctatatt

SEQ ID NO: 7983 - protein, 179 aa, Homo sapiens; identical to SEQ ID NO: 7973

SEQ ID NO: 7984 - DNA, 970 bp, Homo sapiens
cggggtgactgcctcttccagggcgggcggtgtggtgcacgcattgctgtgctccaactccctcagggcctgtgttgccgcactctgctgctatgagcttcctcaaaagtttcccgccgcctgggccagcggaggggctcctgcggcagcagccagacactgaggctgtgctgaacgggaagggcctcggcactggtaccctttacatcgctgagagccgcctgtcttggttagatggctctggattaggattctcactggaataccccaccattagtttacatgcattatccagggaccgaagtgactgtctaggagagcatttgtatgttatggtgaatgccaaatttgaagaagaatcaaaagaacctgttgctgatgaagaagaggaagacagtgatgatgatgttgaacctattactgaatttagatttgtgcctagtgataaatcagcgttggaggcaatgttcactgcaatgtgcgaatgccaggccttgcatccagatcctgaggatgaggattcagatgactacgatggagaagaatatgatgtggaagcacatgaacaaggacagggggacatccctacattttacacctatgaagaaggattatcccatctaacagcagaaggccaagccacactggagagattagaaggaatgctttctcagtctgtgagcagccagtataatatggctggggtcaggacagaagattcaataagagattatgaagatgggatggaggtggataccacaccaacagttgctggacagtttgaggatgcagatgttgatcactgaaaatgatttatgcaagtttaagaaaccagccttttaaagttccagttagcttccaagttactgctattgtgaaaactgtataacattgcttcttatactgaccatgaattgtgatactggacctgtgctttcttctcacatcctgccagtggaactatcagaaa

SEQ ID NO: 7985 - protein, 237 aa, Homo sapiens; identical to SEQ ID NO: 878

SEQ ID NO: 7986 - DNA, 8556 bp, Homo sapiens
ctggtttatcaacttgacgagaatcatttcaaaattttaggaaaaaaatttatgtctcagtaaaactttgtttagaattaggtttttcagtagcaaggataaggtgaagggattaaaaatgtacgtaaaattagtagtcaatgaattctggaatgcagtctgtataatcctattcagagattatgctatttactgaatatagctttggttgtgtttaaatctgcactagtattaggtgctccttaaaagttgaaaatatatagccaataaggtataaagaagaattgacagataaatctaaacagtttctttgtatagtactaacttctgaaatgttcagtggtggcatttgataaagtaagttgtaatatgatcacattgaggaatgttatataattattaaactcaatttttataaaaggcatcattttataaaagtatcataagaaagtgccaatgtttcaatgaataaattgaggcaacatgataccaacttagtgaaaaatatacaagaccagaaggaagtaacctaaaatattactagtgattgcctctgggtaataggatatgggctttttgtctttctatatttttcattttcccactgccgtgttcctggtacctcagtgaaatgaagtgctcagttcttttaacagttgtcagtttttaaaacaaatatagtcttctggaaatgttttaggtagcattttcaattttatgtttttaagccatctcttgaatttgaataaattatttgaactgcataaatatttgcaatccattgagaacaccaaaacaaaaagtaaaaagcagaaacctaaatttttctaaattttttttaatatctagaagttgtatctcaaagtttttgtaattttcttcattgtcagattttattttttactgtcaaatatccaatgacagaggccacctcttttaaaatagaaactttaaatggaaatatacattatactaagtcttatattttatagccttgaaagtttctattcatgtaattaagctttttctgatttttagaggaacagaaagaaagtgaaaagatgaaaagtgaggagcagcctatggatttagaaaaccgttctacagccaatgttctagaagagactactgtgaaaaaagaaaaagaagatgaaaaggaacttgtgaaactgccagtcatagtgaagctagaaaaacctttgccagaaaatgaagaaaaaaagattatcaaagaagaaagtgattccttcaaggaaaatgtcaaacccattaaagttgaggtgaaggaatgtagagcagatcctaaagataccaaaagtagcatggagaagccagtggcacaggagcctgaaaggatcgaatttggtggcaatattaaatcttctcacgaaattactgagaaatctactgaagaaactgagaaacttaaaaatgaccagcaggccaagataccactaaaaaaacgagaaattaaactgagtgatgattttgacagtccagtcaagggacctttgtgtaaatcagttactccaacaaaagagtttttgaaagatgaaataaaacaagaggaagagacttgtaaaaggatctctacaatcactgctttgggtcatgaagggaaacagctggtaaatggagaagttagtgatgaaagggtagctccaaattttaagacagaaccaatagagacaaagttttatgagacaaaggaagagagctatagcccctctaaggacagaaatatcatcacggagggaaatggaacagagtccttaaattctgtcataacaagtatgaaaacaggtgagcttgagaaagaaacagcccctttgaggaaagatgcagatagttcaatatcagtcttagagatccatagtcaaaaagcacaaatagaggaacccgatcctccagaaatggaaacttctcttgattcttctgagatggcaaaagatctctcttcaaaaactgctttatcttccaccgagtcgtgtaccatgaaaggtgaagagaagtctcccaaaactaagaaggataagcgcccaccaatcctagaatgtcttgaaaagttagagaagtccaaaaagacttttcttgataaggacgcacaaagattgagtccaataccagaagaagttccaaagagtactctagagtcagaaaagcctggctctcctgaggcagctgaaacttctccaccatctaatatcattgaccactgtgagaaactagcctcagaaaaagaagtggtagaatgccagagtacaagtactgttggtggccagtctgtgaaaaaagtagacctagaaaccctaaaagaggattctgagttcacaaaggtagaaatggataatctggacaatgcccagacctctggcatagaggagccttctgagacaaagggttctatgcaaaaaagcaaattcaaatataagttggttcctgaagaagaaaccactgcctcagaaaatacagagataacctctgaaaggcagaaagagggcatcaaattaacaatcaggatatcaagtcggaaaaagaagcccgattctccccccaaagttctagaaccagaaaacaagcaagagaagacagaaaaggaagaggagaaaacaaatgtgggtcgtactttaagaagatctccaagaatatctagacccactgcaaaagtggctgagatcagagatcagaaagctgataaaaaaagaggggaaggagaagatgaggtggaagaagagtcaacagctttgcaaaaaactgacaaaaaggaaattttgaaaaaatcagagaaagatacaaattctaaagtaagcaaggtaaaacccaaaggcaaagttcgatggactggttctcggacacgtggcagatggaaatattccagcaatgatgaaagtgaagggtctggcagtgaaaaatcatctgcagcttcagaagaggaggaagaaaaggaaagtgaagaagccatcctagcagatgatgatgaaccatgcaaaaaatgtggccttccaaaccatcctgagctaattcttctgtgtgactcttgcgatagtggataccatactgcctgccttcgccctcctctgatgatcatcccagatggagaatggttctgcccaccttgccaacataaactgctctgtgaaaaattagaggaacagttgcaggatttggatgttgccttaaagaagaaagagcgtgccgaacgaagaaaagaacgcttggtgtatgttggtatcagtattgaaaacatcattcctccacaagagccagacttttctgaagatcaagaagaaaagaaaaaagattcaaaaaaatccaaagcaaacttgcttgaaaggaggtcaacaagaacaaggaaatgtataagctacagatttgatgagtttgatgaagcaattgatgaagctattgaagatgacatcaaagaagccgatggaggaggagttggccgaggaaaagatatctccaccatcacaggtcatcgtgggaaagacatctctactattttggatgaagaaagaaaagaaaataaacgaccccagagggcagctgctgctcgaaggaagaaacgccggcgattaaatgatctggacagtgatagcaacctggatgaagaagagagcgaggatgaattcaagatcagtgatggatctcaagatgagtttgttgtgtctgatgaaaacccagatgaaagtgaagaagatccgccatctaatgatgacagtgacactgacttttgtagccgtagactgaggcgacacccctctcggccaatgaggcagagcaggcgtttgcgaagaaagaccccaaagaaaaaatattccgatgatgatgaagaggaggaatctgaggagaatagtagagactctgaaagtgacttcagtgatgattttagtgatgattttgtagaaactcggcgaaggcggtcaaggagaaatcagaaaagacaaattaactacaaagaagactcagaaagtgacggttcccagaagagtttgcgacgtggtaaagaaataaggcgagtacacaagcgaagactttccagctcagagagtgaagagagctatttgtccaagaactctgaagatgatgagctagctaaagaatcaaagcggtcagttcgaaagcggggccgaagcacagacgagtattcagaagcagatgaggaggaggaggaagaggaaggcaaaccatcccgcaaacggctacaccggattgagacggatgaggaggagagttgtgacaatgctcatggagatgcaaatcagcctgcccgtgacagccagcctagggtcctgccctcagaacaagagagcaccaagaagccctaccggatagaaagtgatgaggaagaggactttgaaaatgtaggcaaagtggggagcccattggactatagcttagtggacttaccttcaaccaatggacagagccctggcaaagccattgagaacttgattggcaagcctactgagaagtctcagacccccaaggacaacagcacagccagtgcaagcctagcctccaatgggacaagtggtgggcaggaggcaggagcaccagaagaggaggaagatgagcttttgagagtgactgaccttgttgattatgtctgtaacagtgaacagttataagactttttttccatttttgtgctaatttattccacggtagctctcacaccagcgggccagttattaaaagctgtttaatttttcctagaaaactccactacagaatgacttttagaagaaaaatttcaacaaatcctgaagtctttctgtgaagtgaccagttctgaactttgaagataaataattgctgtaaattccttttgattttctttttccaggttcatggtccttggtaatttcattcatggaaaaaaatcttattataataacaacaaagatttgtatatttttgactttatatttcctgagctctcctgactttgtgaaaaagggtggatgaaaatgcattccgaatctgtgagggcccaaaacagaatttaggggtgggtgaaagcacttgtgctttagctttttcatattaaatatatattatatttaaacattcatggcatagatgatgatttacagacaatttaaaagttcaagtctgtactgttacagtttgagaattgtagataacatcatacataagtcatttagtaacagcctttgtgaaatgaacttgtttactattggagataaccacacttaataaagaagagacagtgaaagtaccatcataattaacctaaatttttgttatagcagagtttcttgtttaaaaaaaaataaaatcatctgaaaagcatttgtacagtaaaatgtataatgaagctttgccaaccagactgtgctagcaacaaatttttttaaataagctttatgcagtggtaataaggtggcctcaaatatattgtgtctgatggagagttattagtgaaatgaatgtggtctttcttaaggcctgggtggactgtaaactttgccaatagtataactcttgtcttctggccacttgatgtttaaatatctgaaatatcattttgaaaaaaatacatctatatataacatacatgaagagatgctaagctgacagtgatattttagcacatttgaagactgggaagagattttcaggtgaattttaactggtctattcttgcccttagtatctacttcaaattgaagtctacaaacaaagcagttcctttgggaggtttttagtttgagttttagcgtgtgtgtgtgtttgtgtgtgtgcgtgtgcgtgtgtgtgtgtgttggaatttcctatctgcctggatatattagcagagtttgaatgtagttttggcctttggccattagacttctattaaaattcattaatagtcatacaaccaacatagagttgaatgagaactgccgatgtaattaataggcatgacatccatttcaaacatctcaacactttaaagaaaagccctttgtttcaagaaaaaagggtttgtaactaactaaatacctaacatgtaattgacactaaaatatgaactttgtcttatttagtttctgttatagctgtaaaatttcaggcagagccataacattgtacagagtgtagcacttgtgattaaacctagcctgttaaatcctgaaaccttcaaccattacttctgtgaatactttagccctgggatttgggtttttctgttccggtgttgtgtctgttgccggcaatggacacaccatatctgctgctggcccaaggaacgtcattaatttttctttccaaattaagtattatgtgctagtcagtgtatagtaaagcacttctcttttttattactaaaaagctggcattagatttgcattataaatacctctctaggaactttatactccttttccttcttcaacaggtattgcccttaaatcttatcttttggccttgaaagtttatagctattgtttttcagttgttcgttgttttgttttgtttcactttagttctgtagtacctgcccattaatatttttgctttgattctagcaatgtgtatgtatctgtataaaaaataaaataatgaaagcaacctaaaaataggatgcaccaatagcatgtggttccaagtaagttgtgatttttattttgagacagtgttccactggaagggagggaagggcttacattcacagacagtaaagcagggctgtgtaaggagctacatttacttaacagtctcctttccagctaggtttgttttatttatttgcaagtcagctaagaattaaccttttaaaccatctaaaacaggcaagcaatataaagatttctactagtgcaaggtaagtggtttgaatatacaagtgccctttcctgccacccagtctcactaccgttttagtcctgcagctgggtaaagccactattgtgtggaaactctcccatgtgccctgtctctacctctggacacaccagctccttcttccacctattctattcctcagttaagccaagtgatcagaagtagtattaaatgggtagataattttaacaggatgcctaatgtgaaataaggagttatttttactcttctactatagaaagcctaaggtaattcttaccatctcaaagactgagtattccatttaggtttggagaccacttgtgctgtgctgcctgatatttaccaaacttgaataagtgttcgtcaacttgatagtgaatgtaccccttctcaccttatattttgattaaatcaattaactataggtcatctaccaagaatgtaatccaagcggttgataaaacattattaggcagatagattattgattattaaattttgagcagtgcaaaaacggttttgctgcttggagttcagattcagtccctcaaagagtttatgatcactgaaatacactctgaaggtattctgaagaagttaaaaaattttagaaaacgaaatgttctgtatacaaagacaatacagtcactacgaactgcagaaagtataggaaagcagtaattgatgtagagtttagacagtcttggatcttttttagagcactaaccatggatttagactcaaaatagctgctacataatagagccctttaataatttaaaccccccttgttgaaatacaagttggactcccagtgtcaaactctagactgtagctaatgtattaaagggagatgtagattaatattcagtatatttagtttgcaatttctgaaaaggtttgaaaactagtcagcttttcacacagcagaagctttgaactgaaatatgtgtgaaaaggacgcagactgaaaacgttttggttttgtacatcagtgctgatgaaattagtgtaaaacattttccatcattggcacattactgcaaaatgatggcagagatattttcaagaatgtacatcaagttatatttccttgacatccttttttcaattggtcaaggttacagattcagaggataaagggtagtttcatttagaataaattcatgtctactggcaatctatatataaaagtgacctgcccaagaaccaaaaactttaaatgctaatgaagcttttgaaaaataatttttaaacaaattaattttaaaagggtgttacacgtacccagtttttactttttagttgatgaaacccatcctataatatacatttgagcaaagtacacatattaagaaaaacatggacatttacttgtttaatagtcaaaatgatgaggaaatgttagctgtttttaagtgggactggtggggtgtcctttgtcacaaggaatgcttttttagcttgtttgtgggcataagagatgttaaccctttgctgattctaccacacaactgtaaagaacctaatgaatctacaagtttaatattcagaaaaagctaggaactccgctctttaccagtacagtggaacaggcccgttattcaaggtgatgcctcacagctatagaacaactattcaaagacccagagttaaatggtacatgtgtatatgtgtgtgtgtgtgtgcacacgcacacacttcagataagtatca

SEQ ID NO: 7987 - protein, 1189 aa, Homo sapiens
MKSEEQPMDLENRSTANVLEETTVKKEKEDEKELVKLPVIVKLEKPLPENEEKKIIKEESDSFKENVKPIKVEVKECRADPKDTKSSMEKPVAQEPERIEFGGNIKSSHEITEKSTEETEKLKNDQQAKIPLKKREIKLSDDFDSPVKGPLCKSVTPTKEFLKDEIKQEEETCKRISTITALGHEGKQLVNGEVSDERVAPNFKTEPIETKFYETKEESYSPSKDRNIITEGNGTESLNSVITSMKTGELEKETAPLRKDADSSISVLEIHSQKAQIEEPDPPEMETSLDSSEMAKDLSSKTALSSTESCTMKGEEKSPKTKKDKRPPILECLEKLEKSKKTFLDKDAQRLSPIPEEVPKSTLESEKPGSPEAAETSPPSNIIDHCEKLASEKEVVECQSTSTVGGQSVKKVDLETLKEDSEFTKVEMDNLDNAQTSGIEEPSETKGSMQKSKFKYKLVPEEETTASENTEITSERQKEGIKLTIRISSRKKKPDSPPKVLEPENKQEKTEKEEEKTNVGRTLRRSPRISRPTAKVAEIRDQKADKKRGEGEDEVEEESTALQKTDKKEILKKSEKDTNSKVSKVKPKGKVRWTGSRTRGRWKYSSNDESEGSGSEKSSAASEEEEEKESEEAILADDDEPCKKCGLPNHPELILLCDSCDSGYHTACLRPPLMIIPDGEWFCPPCQHKLLCEKLEEQLQDLDVALKKKERAERRKERLVYVGISIENIIPPQEPDFSEDQEEKKKDSKKSKANLLERRSTRTRKCISYRFDEFDEAIDEAIEDDIKEADGGGVGRGKDISTITGHRGKDISTILDEERKENKRPQRAAAARRKKRRRLNDLDSDSNLDEEESEDEFKISDGSQDEFVVSDENPDESEEDPPSNDDSDTDFCSRRLRRHPSRPMRQSRRLRRKTPKKKYSDDDEEEESEENSRDSESDFSDDFSDDFVETRRRRSRRNQKRQINYKEDSESDGSQKSLRRGKEIRRVHKRRLSSSESEESYLSKNSEDDELAKESKRSVRKRGRSTDEYSEADEEEEEEEGKPSRKRLHRIETDEEESCDNAHGDANQPARDSQPRVLPSEQESTKKPYRIESDEEEDFENVGKVGSPLDYSLVDLPSTNGQSPGKAIENLIGKPTEKSQTPKDNSTASASLASNGTSGGQEAGAPEEEEDELLRVTDLVDYVCNSEQL

SEQ ID NO: 7988 - DNA, 8550 bp, Homo sapiens
tttcattccccctgtcacacgaggcagtggcaagcccgaaggggaggagagaagggggcggaaagagggcggaaagtgaaaggcgccgagggccgctctgtctcccgtctgactcggttctcgactgctccgggccgccgatgtattgtgggatcgcggagccgtccctgagacgctgggatccgcagaggagcccacttgagagcgcctcctgtcgtctgtaaggttgccttgccatccctcggcaccacaacttcccccgcccccccatcgcctcctcctccatcctccagttcaaaatggcgacggcggcggcagcggcggcggtgatggctcctccgggctgcccgggttcgtgccccaacttcgccgtagtctgctccttcttggagcgctacgggccgctgctagacctgcctgagttgccgttccctgagctggagcgggtgctgcaggcgccgccgccggacgtcggcaacggagaagtaccaaaagaattggtggagctccatttgaagctgatgaggaaaattggcaaatctgttactgcagacagatgggaaaaatatttgatcaagatatgccaagagtttaacagtacctgggcatgggagatggagaagaagggctatcttgaaatgagtgttgaatgcaaactagcactcttaaagtacctctgtgagtgtcagtttgatgacaatctcaaattcaagaatattattaatgaggaggatgccgatactatgcgtctccagccaattggtcgagacaaagatggcctcatgtactggtaccaattggatcaagatcacaatgtcagaatgtacatagaagaacaagatgatcaagatggctcttcatggaaatgcattgtcagaaatcgaaacgagttggctgagactcttgcactcctgaaagcacaaattgatcctgtactattgaaaaactctagccaacaagacaactcttctcgggaaagtcccagcttagaggatgaggagactaaaaaagaggaagaaacacctaaacaagaggaacagaaagaaagtgaaaagatgaaaagtgaggagcagcctatggatttagaaaaccgttctacagccaatgttctagaagagactactgtgaaaaaagaaaaagaagatgaaaaggaacttgtgaaactgccagtcatagtgaagctagaaaaacctttgccagaaaatgaagaaaaaaagattatcaaagaagaaagtgattccttcaaggaaaatgtcaaacccattaaagttgaggtgaaggaatgtagagcagatcctaaagataccaaaagtagcatggagaagccagtggcacaggagcctgaaaggatcgaatttggtggcaatattaaatcttctcacgaaattactgagaaatctactgaagaaactgagaaacttaaaaatgaccagcaggccaagataccactaaaaaaacgagaaattaaactgagtgatgattttgacagtccagtcaagggacctttgtgtaaatcagttactccaacaaaagagtttttgaaagatgaaataaaacaagaggaagagacttgtaaaaggatctctacaatcactgctttgggtcatgaagggaaacagctggtaaatggagaagttagtgatgaaagggtagctccaaattttaagacagaaccaatagagacaaagttttatgagacaaaggaagagagctatagcccctctaaggacagaaatatcatcacggagggaaatggaacagagtccttaaattctgtcataacaagtatgaaaacaggtgagcttgagaaagaaacagcccctttgaggaaagatgcagatagttcaatatcagtcttagagatccatagtcaaaaagcacaaatagaggaacccgatcctccagaaatggaaacttctcttgattcttctgagatggcaaaagatctctcttcaaaaactgctttatcttccaccgagtcgtgtaccatgaaaggtgaagagaagtctcccaaaactaagaaggataagcgcccaccaatcctagaatgtcttgaaaagttagagaagtccaaaaagacttttcttgataaggacgcacaaagattgagtccaataccagaagaagttccaaagagtactctagagtcagaaaagcctggctctcctgaggcagctgaaacttctccaccatctaatatcattgaccactgtgagaaactagcctcagaaaaagaagtggtagaatgccagagtacaagtactgttggtggccagtctgtgaaaaaagtagacctagaaaccctaaaagaggattctgagttcacaaaggtagaaatggataatctggacaatgcccagacctctggcatagaggagccttctgagacaaagggttctatgcaaaaaagcaaattcaaatataagttggttcctgaagaagaaaccactgcctcagaaaatacagagataacctctgaaaggcagaaagagggcatcaaattaacaatcaggatatcaagtcggaaaaagaagcccgattctccccccaaagttctagaaccagaaaacaagcaagagaagacagaaaaggaagaggagaaaacaaatgtgggtcgtactttaagaagatctccaagaatatctagacccactgcaaaagtggctgagatcagagatcagaaagctgataaaaaaagaggggaaggagaagatgaggtggaagaagagtcaacagctttgcaaaaaactgacaaaaaggaaattttgaaaaaatcagagaaagatacaaattctaaagtaagcaaggtaaaacccaaaggcaaagttcgatggactggttctcggacacgtggcagatggaaatattccagcaatgatgaaagtgaagggtctggcagtgaaaaatcatctgcagcttcagaagaggaggaagaaaaggaaagtgaagaagccatcctagcagatgatgatgaaccatgcaaaaaatgtggccttccaaaccatcctgagctaattcttctgtgtgactcttgcgatagtggataccatactgcctgccttcgccctcctctgatgatcatcccagatggagaatggttctgcccaccttgccaacataaactgctctgtgaaaaattagaggaacagttgcaggatttggatgttgccttaaagaagaaagagcgtgccgaacgaagaaaagaacgcttggtgtatgttggtatcagtattgaaaacatcattcctccacaagagccagacttttctgaagatcaagaagaaaagaaaaaagattcaaaaaaatccaaagcaaacttgcttgaaaggaggtcaacaagaacaaggaaatgtataagctacagatttgatgagtttgatgaagcaattgatgaagctattgaagatgacatcaaagaagccgatggaggaggagttggccgaggaaaagatatctccaccatcacaggtcatcgtgggaaagacatctctactattttggatgaagaaagaaaagaaaataaacgaccccagagggcagctgctgctcgaaggaagaaacgccggcgattaaatgatctggacagtgatagcaacctggatgaagaagagagcgaggatgaattcaagatcagtgatggatctcaagatgagtttgttgtgtctgatgaaaacccagatgaaagtgaagaagatccgccatctaatgatgacagtgacactgacttttgtagccgtagactgaggcgacacccctctcggccaatgaggcagagcaggcgtttgcgaagaaagaccccaaagaaaaaatattccgatgatgatgaagaggaggaatctgaggagaatagtagagactctgaaagtgacttcagtgatgattttagtgatgattttgtagaaactcggcgaaggcggtcaaggagaaatcagaaaagacaaattaactacaaagaagactcagaaagtgacggttcccagaagagtttgcgacgtggtaaagaaataaggcgagtacacaagcgaagactttccagctcagagagtgaagagagctatttgtccaagaactctgaagatgatgagctagctaaagaatcaaagcggtcagttcgaaagcggggccgaagcacagacgagtattcagaagcagatgaggaggaggaggaagaggaaggcaaaccatcccgcaaacggctacaccggattgagacggatgaggaggagagttgtgacaatgctcatggagatgcaaatcagcctgcccgtgacagccagcctagggtcctgccctcagaacaagagagcaccaagaagccctaccggatagaaagtgatgaggaagaggactttgaaaatgtaggcaaagtggggagcccattggactatagcttagtggacttaccttcaaccaatggacagagccctggcaaagccattgagaacttgattggcaagcctactgagaagtctcagacccccaaggacaacagcacagccagtgcaagcctagcctccaatgggacaagtggtgggcaggaggcaggagcaccagaagaggaggaagatgagcttttgagagtgactgaccttgttgattatgtctgtaacagtgaacagttataagactttttttccatttttgtgctaatttattccacggtagctctcacaccagcgggccagttattaaaagctgtttaatttttcctagaaaactccactacagaatgacttttagaagaaaaatttcaacaaatcctgaagtctttctgtgaagtgaccagttctgaactttgaagataaataattgctgtaaattccttttgattttctttttccaggttcatggtccttggtaatttcattcatggaaaaaaatcttattataataacaacaaagatttgtatatttttgactttatatttcctgagctctcctgactttgtgaaaaagggtggatgaaaatgcattccgaatctgtgagggcccaaaacagaatttaggggtgggtgaaagcacttgtgctttagctttttcatattaaatatatattatatttaaacattcatggcatagatgatgatttacagacaatttaaaagttcaagtctgtactgttacagtttgagaattgtagataacatcatacataagtcatttagtaacagcctttgtgaaatgaacttgtttactattggagataaccacacttaataaagaagagacagtgaaagtaccatcataattaacctaaatttttgttatagcagagtttcttgtttaaaaaaaaataaaatcatctgaaaagcatttgtacagtaaaatgtataatgaagctttgccaaccagactgtgctagcaacaaatttttttaaataagctttatgcagtggtaataaggtggcctcaaatatattgtgtctgatggagagttattagtgaaatgaatgtggtctttcttaaggcctgggtggactgtaaactttgccaatagtataactcttgtcttctggccacttgatgtttaaatatctgaaatatcattttgaaaaaaatacatctatatataacatacatgaagagatgctaagctgacagtgatattttagcacatttgaagactgggaagagattttcaggtgaattttaactggtctattcttgcccttagtatctacttcaaattgaagtctacaaacaaagcagttcctttgggaggtttttagtttgagttttagcgtgtgtgtgtgtttgtgtgtgtgcgtgtgcgtgtgtgtgtgtgttggaatttcctatctgcctggatatattagcagagtttgaatgtagttttggcctttggccattagacttctattaaaattcattaatagtcatacaaccaacatagagttgaatgagaactgccgatgtaattaataggcatgacatccatttcaaacatctcaacactttaaagaaaagccctttgtttcaagaaaaaagggtttgtaactaactaaatacctaacatgtaattgacactaaaatatgaactttgtcttatttagtttctgttatagctgtaaaatttcaggcagagccataacattgtacagagtgtagcacttgtgattaaacctagcctgttaaatcctgaaaccttcaaccattacttctgtgaatactttagccctgggatttgggtttttctgttccggtgttgtgtctgttgccggcaatggacacaccatatctgctgctggcccaaggaacgtcattaatttttctttccaaattaagtattatgtgctagtcagtgtatagtaaagcacttctcttttttattactaaaaagctggcattagatttgcattataaatacctctctaggaactttatactccttttccttcttcaacaggtattgcccttaaatcttatcttttggccttgaaagtttatagctattgtttttcagttgttcgttgttttgttttgtttcactttagttctgtagtacctgcccattaatatttttgctttgattctagcaatgtgtatgtatctgtataaaaaataaaataatgaaagcaacctaaaaataggatgcaccaatagcatgtggttccaagtaagttgtgatttttattttgagacagtgttccactggaagggagggaagggcttacattcacagacagtaaagcagggctgtgtaaggagctacatttacttaacagtctcctttccagctaggtttgttttatttatttgcaagtcagctaagaattaaccttttaaaccatctaaaacaggcaagcaatataaagatttctactagtgcaaggtaagtggtttgaatatacaagtgccctttcctgccacccagtctcactaccgttttagtcctgcagctgggtaaagccactattgtgtggaaactctcccatgtgccctgtctctacctctggacacaccagctccttcttccacctattctattcctcagttaagccaagtgatcagaagtagtattaaatgggtagataattttaacaggatgcctaatgtgaaataaggagttatttttactcttctactatagaaagcctaaggtaattcttaccatctcaaagactgagtattccatttaggtttggagaccacttgtgctgtgctgcctgatatttaccaaacttgaataagtgttcgtcaacttgatagtgaatgtaccccttctcaccttatattttgattaaatcaattaactataggtcatctaccaagaatgtaatccaagcggttgataaaacattattaggcagatagattattgattattaaattttgagcagtgcaaaaacggttttgctgcttggagttcagattcagtccctcaaagagtttatgatcactgaaatacactctgaaggtattctgaagaagttaaaaaattttagaaaacgaaatgttctgtatacaaagacaatacagtcactacgaactgcagaaagtataggaaagcagtaattgatgtagagtttagacagtcttggatcttttttagagcactaaccatggatttagactcaaaatagctgctacataatagagccctttaataatttaaaccccccttgttgaaatacaagttggactcccagtgtcaaactctagactgtagctaatgtattaaagggagatgtagattaatattcagtatatttagtttgcaatttctgaaaaggtttgaaaactagtcagcttttcacacagcagaagctttgaactgaaatatgtgtgaaaaggacgcagactgaaaacgttttggttttgtacatcagtgctgatgaaattagtgtaaaacattttccatcattggcacattactgcaaaatgatggcagagatattttcaagaatgtacatcaagttatatttccttgacatccttttttcaattggtcaaggttacagattcagaggataaagggtagtttcatttagaataaattcatgtctactggcaatctatatataaaagtgacctgcccaagaaccaaaaactttaaatgctaatgaagcttttgaaaaataatttttaaacaaattaattttaaaagggtgttacacgtacccagtttttactttttagttgatgaaacccatcctataatatacatttgagcaaagtacacatattaagaaaaacatggacatttacttgtttaatagtcaaaatgatgaggaaatgttagctgtttttaagtgggactggtggggtgtcctttgtcacaaggaatgcttttttagcttgtttgtgggcataagagatgttaaccctttgctgattctaccacacaactgtaaagaacctaatgaatctacaagtttaatattcagaaaaagctaggaactccgctctttaccagtacagtggaacaggcccgttattcaaggtgatgcctcacagctatagaacaactattcaaagacccagagttaaatggtacatgtgtatatgtgtgtgtgtgtgtgcacacgcacacacttcagataagtatca

SEQ ID NO: 7989 - protein, 1441 aa, Homo sapiens; identical to SEQ ID NO: 880

SEQ ID NO: 7990 - DNA, 6607 bp, Homo sapiens
ctggtttatcaacttgacgagaatcatttcaaaattttaggaaaaaaatttatgtctcagtaaaactttgtttagaattaggtttttcagtagcaaggataaggtgaagggattaaaaatgtacgtaaaattagtagtcaatgaattctggaatgcagtctgtataatcctattcagagattatgctatttactgaatatagctttggttgtgtttaaatctgcactagtattaggtgctccttaaaagttgaaaatatatagccaataaggtataaagaagaattgacagataaatctaaacagtttctttgtatagtactaacttctgaaatgttcagtggtggcatttgataaagtaagttgtaatatgatcacattgaggaatgttatataattattaaactcaatttttataaaaggcatcattttataaaagtatcataagaaagtgccaatgtttcaatgaataaattgaggcaacatgataccaacttagtgaaaaatatacaagaccagaaggaagtaacctaaaatattactagtgattgcctctgggtaataggatatgggctttttgtctttctatatttttcattttcccactgccgtgttcctggtacctcagtgaaatgaagtgctcagttcttttaacagttgtcagtttttaaaacaaatatagtcttctggaaatgttttaggtagcattttcaattttatgtttttaagccatctcttgaatttgaataaattatttgaactgcataaatatttgcaatccattgagaacaccaaaacaaaaagtaaaaagcagaaacctaaatttttctaaattttttttaatatctagaagttgtatctcaaagtttttgtaattttcttcattgtcagattttattttttactgtcaaatatccaatgacagaggccacctcttttaaaatagaaactttaaatggaaatatacattatactaagtcttatattttatagccttgaaagtttctattcatgtaattaagctttttctgatttttagaggaacagaaagaaagtgaaaagatgaaaagtgaggagcagcctatggatttagaaaaccgttctacagccaatgttctagaagagactactgtgaaaaaagaaaaagaagatgaaaaggaacttgtgaaactgccagtcatagtgaagctagaaaaacctttgccagaaaatgaagaaaaaaagattatcaaagaagaaagtgattccttcaaggaaaatgtcaaacccattaaagttgaggtgaaggaatgtagagcagatcctaaagataccaaaagtagcatggagaagccagtggcacaggagcctgaaaggatcgaatttggtggcaatattaaatcttctcacgaaattactgagaaatctactgaagaaactgagaaacttaaaaatgaccagcaggccaagataccactaaaaaaacgagaaattaaactgagtgatgattttgacagtccagtcaagggacctttgtgtaaatcagttactccaacaaaagagtttttgaaagatgaaataaaacaagaggaagagacttgtaaaaggatctctacaatcactgctttgggtcatgaagggaaacagctggtaaatggagaagttagtgatgaaagggtagctccaaattttaagacagaaccaatagagacaaagttttatgagacaaaggaagagagctatagcccctctaaggacagaaatatcatcacggagggaaatggaacagagtccttaaattctgtcataacaagtatgaaaacaggtgagcttgagaaagaaacagcccctttgaggaaagatgcagatagttcaatatcagtcttagagatccatagtcaaaaagcacaaatagaggaacccgatcctccagaaatggaaacttctcttgattcttctgagatggcaaaagatctctcttcaaaaactgctttatcttccaccgagtcgtgtaccatgaaaggtgaagagaagtctcccaaaactaagaaggataagcgcccaccaatcctagaatgtcttgaaaagttagagaagtccaaaaagacttttcttgataaggacgcacaaagattgagtccaataccagaagaagttccaaagagtactctagagtcagaaaagcctggctctcctgaggcagctgaaacttctccaccatctaatatcattgaccactgtgagaaactagcctcagaaaaagaagtggtagaatgccagagtacaagtactgttggtggccagtctgtgaaaaaagtagacctagaaaccctaaaagaggattctgagttcacaaaggtagaaatggataatctggacaatgcccagacctctggcatagaggagccttctgagacaaagggttctatgcaaaaaagcaaattcaaatataagttggttcctgaagaagaaaccactgcctcagaaaatacagagataacctctgaaaggcagaaagagggcatcaaattaacaatcaggatatcaagtcggaaaaagaagcccgattctccccccaaagttctagaaccagaaaacaagcaagagaagacagaaaaggaagaggagaaaacaaatgtgggtcgtactttaagaagatctccaagaatatctagacccactgcaaaagtggctgagatcagagatcagaaagctgataaaaaaagaggggaaggagaagatgaggtggaagaagagtcaacagctttgcaaaaaactgacaaaaaggaaattttgaaaaaatcagagaaagatacaaattctaaagtaagcaaggtaaaacccaaaggcaaagttcgatggactggttctcggacacgtggcagatggaaatattccagcaatgatgaaagtgaagggtctggcagtgaaaaatcatctgcagcttcagaagaggaggaagaaaaggaaagtgaagaagccatcctagcagatgatgatgaaccatgcaaaaaatgtggccttccaaaccatcctgagctaattcttctgtgtgactcttgcgatagtggataccatactgcctgccttcgccctcctctgatgatcatcccagatggagaatggttctgcccaccttgccaacataaactgctctgtgaaaaattagaggaacagttgcaggatttggatgttgccttaaagaagaaagagcgtgccgaacgaagaaaagaacgcttggtgtatgttggtatcagtattgaaaacatcattcctccacaagagccagacttttctgaagatcaagaagaaaagaaaaaagattcaaaaaaatccaaagcaaacttgcttgaaaggaggtcaacaagaacaaggaaatgtataagctacagatttgatgagtttgatgaagcaattgatgaagctattgaagatgacatcaaagaagccgatggaggaggagttggccgaggaaaagatatctccaccatcacaggtcatcgtgggaaagacatctctactattttggatgaagaaagaaaagaaaataaacgaccccagagggcagctgctgctcgaaggaagaaacgccggcgattaaatgatctggacagtgatagcaacctggatgaagaagagagcgaggatgaattcaagatcagtgatggatctcaagatgagtttgttgtgtctgatgaaaacccagatgaaagtgaagaagatccgccatctaatgatgacagtgacactgacttttgtagccgtagactgaggcgacacccctctcggccaatgaggcagagcaggcgtttgcgaagaaagaccccaaagaaaaaatattccgatgatgatgaagaggaggaatctgaggagaatagtagagactctgaaagtgacttcagtgatgattttagtgatgattttgtagaaactcggcgaaggcggtcaaggagaaatcagaaaagacaaattaactacaaagaagactcagaaagtgacggttcccagaagagtttgcgacgtggtaaagaaataaggcgagtacacaagcgaagactttccagctcagagagtgaagagagctatttgtccaagaactctgaagatgatgagctagctaaagaatcaaagcggtcagttcgaaagcggggccgaagcacagacgagtattcagaagcagatgaggaggaggaggaagaggaaggcaaaccatcccgcaaacggctacaccggattgagacggatgaggaggagagttgtgacaatgctcatggagatgcaaatcagcctgcccgtgacagccagcctagggtcctgccctcagaacaagagagcaccaagaagccctaccggatagaaagtgatgaggaagaggactttgaaaatgtaggcaaagtggggagcccattggactatagcttagtggacttaccttcaaccaatggacagagccctggcaaagccattgagaacttgattggcaagcctactgagaagtctcagacccccaaggacaacagcacagccagtgcaagcctagcctccaatgggacaagtggtgggcaggaggcaggagcaccagaagaggaggaagatgagcttttgagagtgactgaccttgttgattatgtctgtaacagtgaacagttataagactttttttccatttttgtgctaatttattccacggtagctctcacaccagcgggccagttattaaaagctgtttaatttttcctagaaaactccactacagaatgacttttagaagaaaaatttcaacaaatcctgaagtctttctgtgaagtgaccagttctgaactttgaagataaataattgctgtaaattccttttgattttctttttccaggttcatggtccttggtaatttcattcatggaaaaaaatcttattataataacaacaaagatttgtatatttttgactttatatttcctgagctctcctgactttgtgaaaaagggtggatgaaaatgcattccgaatctgtgagggcccaaaacagaatttaggggtgggtgaaagcacttgtgctttagctttttcatattaaatatatattatatttaaacattcatggcatagatgatgatttacagacaatttaaaagttcaagtctgtactgttacagtttgagaattgtagataacatcatacataagtcatttagtaacagcctttgtgaaatgaacttgtttactattggagataaccacacttaataaagaagagacagtgaaagtaccatcataattaacctaaatttttgttatagcagagtttcttgtttaaaaaaaaataaaatcatctgaaaagcatttgtacagtaaaatgtataatgaagctttgccaaccagactgtgctagcaacaaatttttttaaataagctttatgcagtggtaataaggtggcctcaaatatattgtgtctgatggagagttattagtgaaatgaatgtggtctttcttaaggcctgggtggactgtaaactttgccaatagtataactcttgtcttctggccacttgatgtttaaatatctgaaatatcattttgaaaaaaatacatctatatataacatacatgaagagatgctaagctgacagtgatattttagcacatttgaagactgggaagagattttcaggtgaattttaactggtctattcttgcccttagtatctacttcaaattgaagtctacaaacaaagcagttcctttgggaggtttttagtttgagttttagcgtgtgtgtgtgtttgtgtgtgtgcgtgtgcgtgtgtgtgtgtgttggaatttcctatctgcctggatatattagcagagtttgaatgtagttttggcctttggccattagacttctattaaaattcattaatagtcatacaaccaacatagagttgaatgagaactgccgatgtaattaataggcatgacatccatttcaaacatctcaacactttaaagaaaagccctttgtttcaagaaaaaagggtttgtaactaactaaatacctaacatgtaattgacactaaaatatgaactttgtcttatttagtttctgttatagctgtaaaatttcaggcagagccataacattgtacagagtgtagcacttgtgattaaacctagcctgttaaatcctgaaaccttcaaccattacttctgtgaatactttagccctgggatttgggtttttctgttccggtgttgtgtctgttgccggcaatggacacaccatatctgctgctggcccaaggaacgtcattaatttttctttccaaattaagtattatgtgctagtcagtgtatagtaaagcacttctcttttttattactaaaaagctggcattagatttgcattataaatacctctctaggaactttatactccttttccttcttcaacaggtattgcccttaaatcttatcttttggccttgaaagtttatagctattgtttttcagttgttcgttgttttgttttgtttcactttagttctgtagtacctgcccattaatatttttgctttgattctagcaatgtgtatgtatctgtataaaaaataaaataatgaaagcaacctaaaaataggatgcaccaat

SEQ ID NO: 7991 - protein, 1189 aa, Homo sapiens; identical to SEQ ID NO: 7987

SEQ ID NO: 7992 - DNA, 6601 bp, Homo sapiens
tttcattccccctgtcacacgaggcagtggcaagcccgaaggggaggagagaagggggcggaaagagggcggaaagtgaaaggcgccgagggccgctctgtctcccgtctgactcggttctcgactgctccgggccgccgatgtattgtgggatcgcggagccgtccctgagacgctgggatccgcagaggagcccacttgagagcgcctcctgtcgtctgtaaggttgccttgccatccctcggcaccacaacttcccccgcccccccatcgcctcctcctccatcctccagttcaaaatggcgacggcggcggcagcggcggcggtgatggctcctccgggctgcccgggttcgtgccccaacttcgccgtagtctgctccttcttggagcgctacgggccgctgctagacctgcctgagttgccgttccctgagctggagcgggtgctgcaggcgccgccgccggacgtcggcaacggagaagtaccaaaagaattggtggagctccatttgaagctgatgaggaaaattggcaaatctgttactgcagacagatgggaaaaatatttgatcaagatatgccaagagtttaacagtacctgggcatgggagatggagaagaagggctatcttgaaatgagtgttgaatgcaaactagcactcttaaagtacctctgtgagtgtcagtttgatgacaatctcaaattcaagaatattattaatgaggaggatgccgatactatgcgtctccagccaattggtcgagacaaagatggcctcatgtactggtaccaattggatcaagatcacaatgtcagaatgtacatagaagaacaagatgatcaagatggctcttcatggaaatgcattgtcagaaatcgaaacgagttggctgagactcttgcactcctgaaagcacaaattgatcctgtactattgaaaaactctagccaacaagacaactcttctcgggaaagtcccagcttagaggatgaggagactaaaaaagaggaagaaacacctaaacaagaggaacagaaagaaagtgaaaagatgaaaagtgaggagcagcctatggatttagaaaaccgttctacagccaatgttctagaagagactactgtgaaaaaagaaaaagaagatgaaaaggaacttgtgaaactgccagtcatagtgaagctagaaaaacctttgccagaaaatgaagaaaaaaagattatcaaagaagaaagtgattccttcaaggaaaatgtcaaacccattaaagttgaggtgaaggaatgtagagcagatcctaaagataccaaaagtagcatggagaagccagtggcacaggagcctgaaaggatcgaatttggtggcaatattaaatcttctcacgaaattactgagaaatctactgaagaaactgagaaacttaaaaatgaccagcaggccaagataccactaaaaaaacgagaaattaaactgagtgatgattttgacagtccagtcaagggacctttgtgtaaatcagttactccaacaaaagagtttttgaaagatgaaataaaacaagaggaagagacttgtaaaaggatctctacaatcactgctttgggtcatgaagggaaacagctggtaaatggagaagttagtgatgaaagggtagctccaaattttaagacagaaccaatagagacaaagttttatgagacaaaggaagagagctatagcccctctaaggacagaaatatcatcacggagggaaatggaacagagtccttaaattctgtcataacaagtatgaaaacaggtgagcttgagaaagaaacagcccctttgaggaaagatgcagatagttcaatatcagtcttagagatccatagtcaaaaagcacaaatagaggaacccgatcctccagaaatggaaacttctcttgattcttctgagatggcaaaagatctctcttcaaaaactgctttatcttccaccgagtcgtgtaccatgaaaggtgaagagaagtctcccaaaactaagaaggataagcgcccaccaatcctagaatgtcttgaaaagttagagaagtccaaaaagacttttcttgataaggacgcacaaagattgagtccaataccagaagaagttccaaagagtactctagagtcagaaaagcctggctctcctgaggcagctgaaacttctccaccatctaatatcattgaccactgtgagaaactagcctcagaaaaagaagtggtagaatgccagagtacaagtactgttggtggccagtctgtgaaaaaagtagacctagaaaccctaaaagaggattctgagttcacaaaggtagaaatggataatctggacaatgcccagacctctggcatagaggagccttctgagacaaagggttctatgcaaaaaagcaaattcaaatataagttggttcctgaagaagaaaccactgcctcagaaaatacagagataacctctgaaaggcagaaagagggcatcaaattaacaatcaggatatcaagtcggaaaaagaagcccgattctccccccaaagttctagaaccagaaaacaagcaagagaagacagaaaaggaagaggagaaaacaaatgtgggtcgtactttaagaagatctccaagaatatctagacccactgcaaaagtggctgagatcagagatcagaaagctgataaaaaaagaggggaaggagaagatgaggtggaagaagagtcaacagctttgcaaaaaactgacaaaaaggaaattttgaaaaaatcagagaaagatacaaattctaaagtaagcaaggtaaaacccaaaggcaaagttcgatggactggttctcggacacgtggcagatggaaatattccagcaatgatgaaagtgaagggtctggcagtgaaaaatcatctgcagcttcagaagaggaggaagaaaaggaaagtgaagaagccatcctagcagatgatgatgaaccatgcaaaaaatgtggccttccaaaccatcctgagctaattcttctgtgtgactcttgcgatagtggataccatactgcctgccttcgccctcctctgatgatcatcccagatggagaatggttctgcccaccttgccaacataaactgctctgtgaaaaattagaggaacagttgcaggatttggatgttgccttaaagaagaaagagcgtgccgaacgaagaaaagaacgcttggtgtatgttggtatcagtattgaaaacatcattcctccacaagagccagacttttctgaagatcaagaagaaaagaaaaaagattcaaaaaaatccaaagcaaacttgcttgaaaggaggtcaacaagaacaaggaaatgtataagctacagatttgatgagtttgatgaagcaattgatgaagctattgaagatgacatcaaagaagccgatggaggaggagttggccgaggaaaagatatctccaccatcacaggtcatcgtgggaaagacatctctactattttggatgaagaaagaaaagaaaataaacgaccccagagggcagctgctgctcgaaggaagaaacgccggcgattaaatgatctggacagtgatagcaacctggatgaagaagagagcgaggatgaattcaagatcagtgatggatctcaagatgagtttgttgtgtctgatgaaaacccagatgaaagtgaagaagatccgccatctaatgatgacagtgacactgacttttgtagccgtagactgaggcgacacccctctcggccaatgaggcagagcaggcgtttgcgaagaaagaccccaaagaaaaaatattccgatgatgatgaagaggaggaatctgaggagaatagtagagactctgaaagtgacttcagtgatgattttagtgatgattttgtagaaactcggcgaaggcggtcaaggagaaatcagaaaagacaaattaactacaaagaagactcagaaagtgacggttcccagaagagtttgcgacgtggtaaagaaataaggcgagtacacaagcgaagactttccagctcagagagtgaagagagctatttgtccaagaactctgaagatgatgagctagctaaagaatcaaagcggtcagttcgaaagcggggccgaagcacagacgagtattcagaagcagatgaggaggaggaggaagaggaaggcaaaccatcccgcaaacggctacaccggattgagacggatgaggaggagagttgtgacaatgctcatggagatgcaaatcagcctgcccgtgacagccagcctagggtcctgccctcagaacaagagagcaccaagaagccctaccggatagaaagtgatgaggaagaggactttgaaaatgtaggcaaagtggggagcccattggactatagcttagtggacttaccttcaaccaatggacagagccctggcaaagccattgagaacttgattggcaagcctactgagaagtctcagacccccaaggacaacagcacagccagtgcaagcctagcctccaatgggacaagtggtgggcaggaggcaggagcaccagaagaggaggaagatgagcttttgagagtgactgaccttgttgattatgtctgtaacagtgaacagttataagactttttttccatttttgtgctaatttattccacggtagctctcacaccagcgggccagttattaaaagctgtttaatttttcctagaaaactccactacagaatgacttttagaagaaaaatttcaacaaatcctgaagtctttctgtgaagtgaccagttctgaactttgaagataaataattgctgtaaattccttttgattttctttttccaggttcatggtccttggtaatttcattcatggaaaaaaatcttattataataacaacaaagatttgtatatttttgactttatatttcctgagctctcctgactttgtgaaaaagggtggatgaaaatgcattccgaatctgtgagggcccaaaacagaatttaggggtgggtgaaagcacttgtgctttagctttttcatattaaatatatattatatttaaacattcatggcatagatgatgatttacagacaatttaaaagttcaagtctgtactgttacagtttgagaattgtagataacatcatacataagtcatttagtaacagcctttgtgaaatgaacttgtttactattggagataaccacacttaataaagaagagacagtgaaagtaccatcataattaacctaaatttttgttatagcagagtttcttgtttaaaaaaaaataaaatcatctgaaaagcatttgtacagtaaaatgtataatgaagctttgccaaccagactgtgctagcaacaaatttttttaaataagctttatgcagtggtaataaggtggcctcaaatatattgtgtctgatggagagttattagtgaaatgaatgtggtctttcttaaggcctgggtggactgtaaactttgccaatagtataactcttgtcttctggccacttgatgtttaaatatctgaaatatcattttgaaaaaaatacatctatatataacatacatgaagagatgctaagctgacagtgatattttagcacatttgaagactgggaagagattttcaggtgaattttaactggtctattcttgcccttagtatctacttcaaattgaagtctacaaacaaagcagttcctttgggaggtttttagtttgagttttagcgtgtgtgtgtgtttgtgtgtgtgcgtgtgcgtgtgtgtgtgtgttggaatttcctatctgcctggatatattagcagagtttgaatgtagttttggcctttggccattagacttctattaaaattcattaatagtcatacaaccaacatagagttgaatgagaactgccgatgtaattaataggcatgacatccatttcaaacatctcaacactttaaagaaaagccctttgtttcaagaaaaaagggtttgtaactaactaaatacctaacatgtaattgacactaaaatatgaactttgtcttatttagtttctgttatagctgtaaaatttcaggcagagccataacattgtacagagtgtagcacttgtgattaaacctagcctgttaaatcctgaaaccttcaaccattacttctgtgaatactttagccctgggatttgggtttttctgttccggtgttgtgtctgttgccggcaatggacacaccatatctgctgctggcccaaggaacgtcattaatttttctttccaaattaagtattatgtgctagtcagtgtatagtaaagcacttctcttttttattactaaaaagctggcattagatttgcattataaatacctctctaggaactttatactccttttccttcttcaacaggtattgcccttaaatcttatcttttggccttgaaagtttatagctattgtttttcagttgttcgttgttttgttttgtttcactttagttctgtagtacctgcccattaatatttttgctttgattctagcaatgtgtatgtatctgtataaaaaataaaataatgaaagcaacctaaaaataggatgcaccaat

SEQ ID NO: 7993 - protein, 1441 aa, Homo sapiens; identical to SEQ ID NO: 880

SEQ ID NO: 7994 - DNA, 5318 bp, Homo sapiens
ctggtttatcaacttgacgagaatcatttcaaaattttaggaaaaaaatttatgtctcagtaaaactttgtttagaattaggtttttcagtagcaaggataaggtgaagggattaaaaatgtacgtaaaattagtagtcaatgaattctggaatgcagtctgtataatcctattcagagattatgctatttactgaatatagctttggttgtgtttaaatctgcactagtattaggtgctccttaaaagttgaaaatatatagccaataaggtataaagaagaattgacagataaatctaaacagtttctttgtatagtactaacttctgaaatgttcagtggtggcatttgataaagtaagttgtaatatgatcacattgaggaatgttatataattattaaactcaatttttataaaaggcatcattttataaaagtatcataagaaagtgccaatgtttcaatgaataaattgaggcaacatgataccaacttagtgaaaaatatacaagaccagaaggaagtaacctaaaatattactagtgattgcctctgggtaataggatatgggctttttgtctttctatatttttcattttcccactgccgtgttcctggtacctcagtgaaatgaagtgctcagttcttttaacagttgtcagtttttaaaacaaatatagtcttctggaaatgttttaggtagcattttcaattttatgtttttaagccatctcttgaatttgaataaattatttgaactgcataaatatttgcaatccattgagaacaccaaaacaaaaagtaaaaagcagaaacctaaatttttctaaattttttttaatatctagaagttgtatctcaaagtttttgtaattttcttcattgtcagattttattttttactgtcaaatatccaatgacagaggccacctcttttaaaatagaaactttaaatggaaatatacattatactaagtcttatattttatagccttgaaagtttctattcatgtaattaagctttttctgatttttagaggaacagaaagaaagtgaaaagatgaaaagtgaggagcagcctatggatttagaaaaccgttctacagccaatgttctagaagagactactgtgaaaaaagaaaaagaagatgaaaaggaacttgtgaaactgccagtcatagtgaagctagaaaaacctttgccagaaaatgaagaaaaaaagattatcaaagaagaaagtgattccttcaaggaaaatgtcaaacccattaaagttgaggtgaaggaatgtagagcagatcctaaagataccaaaagtagcatggagaagccagtggcacaggagcctgaaaggatcgaatttggtggcaatattaaatcttctcacgaaattactgagaaatctactgaagaaactgagaaacttaaaaatgaccagcaggccaagataccactaaaaaaacgagaaattaaactgagtgatgattttgacagtccagtcaagggacctttgtgtaaatcagttactccaacaaaagagtttttgaaagatgaaataaaacaagaggaagagacttgtaaaaggatctctacaatcactgctttgggtcatgaagggaaacagctggtaaatggagaagttagtgatgaaagggtagctccaaattttaagacagaaccaatagagacaaagttttatgagacaaaggaagagagctatagcccctctaaggacagaaatatcatcacggagggaaatggaacagagtccttaaattctgtcataacaagtatgaaaacaggtgagcttgagaaagaaacagcccctttgaggaaagatgcagatagttcaatatcagtcttagagatccatagtcaaaaagcacaaatagaggaacccgatcctccagaaatggaaacttctcttgattcttctgagatggcaaaagatctctcttcaaaaactgctttatcttccaccgagtcgtgtaccatgaaaggtgaagagaagtctcccaaaactaagaaggataagcgcccaccaatcctagaatgtcttgaaaagttagagaagtccaaaaagacttttcttgataaggacgcacaaagattgagtccaataccagaagaagttccaaagagtactctagagtcagaaaagcctggctctcctgaggcagctgaaacttctccaccatctaatatcattgaccactgtgagaaactagcctcagaaaaagaagtggtagaatgccagagtacaagtactgttggtggccagtctgtgaaaaaagtagacctagaaaccctaaaagaggattctgagttcacaaaggtagaaatggataatctggacaatgcccagacctctggcatagaggagccttctgagacaaagggttctatgcaaaaaagcaaattcaaatataagttggttcctgaagaagaaaccactgcctcagaaaatacagagataacctctgaaaggcagaaagagggcatcaaattaacaatcaggatatcaagtcggaaaaagaagcccgattctccccccaaagttctagaaccagaaaacaagcaagagaagacagaaaaggaagaggagaaaacaaatgtgggtcgtactttaagaagatctccaagaatatctagacccactgcaaaagtggctgagatcagagatcagaaagctgataaaaaaagaggggaaggagaagatgaggtggaagaagagtcaacagctttgcaaaaaactgacaaaaaggaaattttgaaaaaatcagagaaagatacaaattctaaagtaagcaaggtaaaacccaaaggcaaagttcgatggactggttctcggacacgtggcagatggaaatattccagcaatgatgaaagtgaagggtctggcagtgaaaaatcatctgcagcttcagaagaggaggaagaaaaggaaagtgaagaagccatcctagcagatgatgatgaaccatgcaaaaaatgtggccttccaaaccatcctgagctaattcttctgtgtgactcttgcgatagtggataccatactgcctgccttcgccctcctctgatgatcatcccagatggagaatggttctgcccaccttgccaacataaactgctctgtgaaaaattagaggaacagttgcaggatttggatgttgccttaaagaagaaagagcgtgccgaacgaagaaaagaacgcttggtgtatgttggtatcagtattgaaaacatcattcctccacaagagccagacttttctgaagatcaagaagaaaagaaaaaagattcaaaaaaatccaaagcaaacttgcttgaaaggaggtcaacaagaacaaggaaatgtataagctacagatttgatgagtttgatgaagcaattgatgaagctattgaagatgacatcaaagaagccgatggaggaggagttggccgaggaaaagatatctccaccatcacaggtcatcgtgggaaagacatctctactattttggatgaagaaagaaaagaaaataaacgaccccagagggcagctgctgctcgaaggaagaaacgccggcgattaaatgatctggacagtgatagcaacctggatgaagaagagagcgaggatgaattcaagatcagtgatggatctcaagatgagtttgttgtgtctgatgaaaacccagatgaaagtgaagaagatccgccatctaatgatgacagtgacactgacttttgtagccgtagactgaggcgacacccctctcggccaatgaggcagagcaggcgtttgcgaagaaagaccccaaagaaaaaatattccgatgatgatgaagaggaggaatctgaggagaatagtagagactctgaaagtgacttcagtgatgattttagtgatgattttgtagaaactcggcgaaggcggtcaaggagaaatcagaaaagacaaattaactacaaagaagactcagaaagtgacggttcccagaagagtttgcgacgtggtaaagaaataaggcgagtacacaagcgaagactttccagctcagagagtgaagagagctatttgtccaagaactctgaagatgatgagctagctaaagaatcaaagcggtcagttcgaaagcggggccgaagcacagacgagtattcagaagcagatgaggaggaggaggaagaggaaggcaaaccatcccgcaaacggctacaccggattgagacggatgaggaggagagttgtgacaatgctcatggagatgcaaatcagcctgcccgtgacagccagcctagggtcctgccctcagaacaagagagcaccaagaagccctaccggatagaaagtgatgaggaagaggactttgaaaatgtaggcaaagtggggagcccattggactatagcttagtggacttaccttcaaccaatggacagagccctggcaaagccattgagaacttgattggcaagcctactgagaagtctcagacccccaaggacaacagcacagccagtgcaagcctagcctccaatgggacaagtggtgggcaggaggcaggagcaccagaagaggaggaagatgagcttttgagagtgactgaccttgttgattatgtctgtaacagtgaacagttataagactttttttccatttttgtgctaatttattccacggtagctctcacaccagcgggccagttattaaaagctgtttaatttttcctagaaaactccactacagaatgacttttagaagaaaaatttcaacaaatcctgaagtctttctgtgaagtgaccagttctgaactttgaagataaataattgctgtaaattccttttgattttctttttccaggttcatggtccttggtaatttcattcatggaaaaaaatcttattataataacaacaaagatttgtatatttttgactttatatttcctgagctctcctgactttgtgaaaaagggtggatgaaaatgcattccgaatctgtgagggcccaaaacagaatttaggggtgggtgaaagcacttgtgctttagctttttcatattaaatatatattatatttaaacattcatggcatagatgatgatttacagacaatttaaaagttcaagtctgtactgttacagtttgagaattgtagataacatcatacataagtcatttagtaacagcctttgtgaaatgaacttgtttactattggagataaccacacttaataaagaagagacagtgaaagtaccatcataattaacctaaatttttgttatagcagagtttcttgtttaaaaaaaaataaaatcatctgaaaagc

SEQ ID NO: 7995 - protein, 1189 aa, Homo sapiens; identical to SEQ ID NO: 7987

SEQ ID NO: 7996 - DNA, 5312 bp, Homo sapiens
tttcattccccctgtcacacgaggcagtggcaagcccgaaggggaggagagaagggggcggaaagagggcggaaagtgaaaggcgccgagggccgctctgtctcccgtctgactcggttctcgactgctccgggccgccgatgtattgtgggatcgcggagccgtccctgagacgctgggatccgcagaggagcccacttgagagcgcctcctgtcgtctgtaaggttgccttgccatccctcggcaccacaacttcccccgcccccccatcgcctcctcctccatcctccagttcaaaatggcgacggcggcggcagcggcggcggtgatggctcctccgggctgcccgggttcgtgccccaacttcgccgtagtctgctccttcttggagcgctacgggccgctgctagacctgcctgagttgccgttccctgagctggagcgggtgctgcaggcgccgccgccggacgtcggcaacggagaagtaccaaaagaattggtggagctccatttgaagctgatgaggaaaattggcaaatctgttactgcagacagatgggaaaaatatttgatcaagatatgccaagagtttaacagtacctgggcatgggagatggagaagaagggctatcttgaaatgagtgttgaatgcaaactagcactcttaaagtacctctgtgagtgtcagtttgatgacaatctcaaattcaagaatattattaatgaggaggatgccgatactatgcgtctccagccaattggtcgagacaaagatggcctcatgtactggtaccaattggatcaagatcacaatgtcagaatgtacatagaagaacaagatgatcaagatggctcttcatggaaatgcattgtcagaaatcgaaacgagttggctgagactcttgcactcctgaaagcacaaattgatcctgtactattgaaaaactctagccaacaagacaactcttctcgggaaagtcccagcttagaggatgaggagactaaaaaagaggaagaaacacctaaacaagaggaacagaaagaaagtgaaaagatgaaaagtgaggagcagcctatggatttagaaaaccgttctacagccaatgttctagaagagactactgtgaaaaaagaaaaagaagatgaaaaggaacttgtgaaactgccagtcatagtgaagctagaaaaacctttgccagaaaatgaagaaaaaaagattatcaaagaagaaagtgattccttcaaggaaaatgtcaaacccattaaagttgaggtgaaggaatgtagagcagatcctaaagataccaaaagtagcatggagaagccagtggcacaggagcctgaaaggatcgaatttggtggcaatattaaatcttctcacgaaattactgagaaatctactgaagaaactgagaaacttaaaaatgaccagcaggccaagataccactaaaaaaacgagaaattaaactgagtgatgattttgacagtccagtcaagggacctttgtgtaaatcagttactccaacaaaagagtttttgaaagatgaaataaaacaagaggaagagacttgtaaaaggatctctacaatcactgctttgggtcatgaagggaaacagctggtaaatggagaagttagtgatgaaagggtagctccaaattttaagacagaaccaatagagacaaagttttatgagacaaaggaagagagctatagcccctctaaggacagaaatatcatcacggagggaaatggaacagagtccttaaattctgtcataacaagtatgaaaacaggtgagcttgagaaagaaacagcccctttgaggaaagatgcagatagttcaatatcagtcttagagatccatagtcaaaaagcacaaatagaggaacccgatcctccagaaatggaaacttctcttgattcttctgagatggcaaaagatctctcttcaaaaactgctttatcttccaccgagtcgtgtaccatgaaaggtgaagagaagtctcccaaaactaagaaggataagcgcccaccaatcctagaatgtcttgaaaagttagagaagtccaaaaagacttttcttgataaggacgcacaaagattgagtccaataccagaagaagttccaaagagtactctagagtcagaaaagcctggctctcctgaggcagctgaaacttctccaccatctaatatcattgaccactgtgagaaactagcctcagaaaaagaagtggtagaatgccagagtacaagtactgttggtggccagtctgtgaaaaaagtagacctagaaaccctaaaagaggattctgagttcacaaaggtagaaatggataatctggacaatgcccagacctctggcatagaggagccttctgagacaaagggttctatgcaaaaaagcaaattcaaatataagttggttcctgaagaagaaaccactgcctcagaaaatacagagataacctctgaaaggcagaaagagggcatcaaattaacaatcaggatatcaagtcggaaaaagaagcccgattctccccccaaagttctagaaccagaaaacaagcaagagaagacagaaaaggaagaggagaaaacaaatgtgggtcgtactttaagaagatctccaagaatatctagacccactgcaaaagtggctgagatcagagatcagaaagctgataaaaaaagaggggaaggagaagatgaggtggaagaagagtcaacagctttgcaaaaaactgacaaaaaggaaattttgaaaaaatcagagaaagatacaaattctaaagtaagcaaggtaaaacccaaaggcaaagttcgatggactggttctcggacacgtggcagatggaaatattccagcaatgatgaaagtgaagggtctggcagtgaaaaatcatctgcagcttcagaagaggaggaagaaaaggaaagtgaagaagccatcctagcagatgatgatgaaccatgcaaaaaatgtggccttccaaaccatcctgagctaattcttctgtgtgactcttgcgatagtggataccatactgcctgccttcgccctcctctgatgatcatcccagatggagaatggttctgcccaccttgccaacataaactgctctgtgaaaaattagaggaacagttgcaggatttggatgttgccttaaagaagaaagagcgtgccgaacgaagaaaagaacgcttggtgtatgttggtatcagtattgaaaacatcattcctccacaagagccagacttttctgaagatcaagaagaaaagaaaaaagattcaaaaaaatccaaagcaaacttgcttgaaaggaggtcaacaagaacaaggaaatgtataagctacagatttgatgagtttgatgaagcaattgatgaagctattgaagatgacatcaaagaagccgatggaggaggagttggccgaggaaaagatatctccaccatcacaggtcatcgtgggaaagacatctctactattttggatgaagaaagaaaagaaaataaacgaccccagagggcagctgctgctcgaaggaagaaacgccggcgattaaatgatctggacagtgatagcaacctggatgaagaagagagcgaggatgaattcaagatcagtgatggatctcaagatgagtttgttgtgtctgatgaaaacccagatgaaagtgaagaagatccgccatctaatgatgacagtgacactgacttttgtagccgtagactgaggcgacacccctctcggccaatgaggcagagcaggcgtttgcgaagaaagaccccaaagaaaaaatattccgatgatgatgaagaggaggaatctgaggagaatagtagagactctgaaagtgacttcagtgatgattttagtgatgattttgtagaaactcggcgaaggcggtcaaggagaaatcagaaaagacaaattaactacaaagaagactcagaaagtgacggttcccagaagagtttgcgacgtggtaaagaaataaggcgagtacacaagcgaagactttccagctcagagagtgaagagagctatttgtccaagaactctgaagatgatgagctagctaaagaatcaaagcggtcagttcgaaagcggggccgaagcacagacgagtattcagaagcagatgaggaggaggaggaagaggaaggcaaaccatcccgcaaacggctacaccggattgagacggatgaggaggagagttgtgacaatgctcatggagatgcaaatcagcctgcccgtgacagccagcctagggtcctgccctcagaacaagagagcaccaagaagccctaccggatagaaagtgatgaggaagaggactttgaaaatgtaggcaaagtggggagcccattggactatagcttagtggacttaccttcaaccaatggacagagccctggcaaagccattgagaacttgattggcaagcctactgagaagtctcagacccccaaggacaacagcacagccagtgcaagcctagcctccaatgggacaagtggtgggcaggaggcaggagcaccagaagaggaggaagatgagcttttgagagtgactgaccttgttgattatgtctgtaacagtgaacagttataagactttttttccatttttgtgctaatttattccacggtagctctcacaccagcgggccagttattaaaagctgtttaatttttcctagaaaactccactacagaatgacttttagaagaaaaatttcaacaaatcctgaagtctttctgtgaagtgaccagttctgaactttgaagataaataattgctgtaaattccttttgattttctttttccaggttcatggtccttggtaatttcattcatggaaaaaaatcttattataataacaacaaagatttgtatatttttgactttatatttcctgagctctcctgactttgtgaaaaagggtggatgaaaatgcattccgaatctgtgagggcccaaaacagaatttaggggtgggtgaaagcacttgtgctttagctttttcatattaaatatatattatatttaaacattcatggcatagatgatgatttacagacaatttaaaagttcaagtctgtactgttacagtttgagaattgtagataacatcatacataagtcatttagtaacagcctttgtgaaatgaacttgtttactattggagataaccacacttaataaagaagagacagtgaaagtaccatcataattaacctaaatttttgttatagcagagtttcttgtttaaaaaaaaataaaatcatctgaaaagc

SEQ ID NO: 7997 - protein, 1441 aa, Homo sapiens; identical to SEQ ID NO: 880

SEQ ID NO: 7998 - DNA, 1052 bp, Homo sapiens
ataccatgacatcaccacagtcttaaaacttgtactgttacgtagcaacttccatttctgcaagttgcaaaattaataatataaatatagagacgttctttgccgagagtcgtcggggtttcctgcttcaacagtgcttggacggaacccggtgctcgtcccccaccccagccggccgcccatagccagccctccctcacctcttcacggcaccctcagaccgccccaaggcccctgccgccgccccagcgccacgcagccactgccaccgccgccacctctccttagtcgccgccatgaggaccacgtccacctcacaggtgcgccagaactaccaccaggactcagaggccgccatcaaccgccagatcaacctagagctctgtgcctcctacgtttacctgtccatgtcttactgctttgaccgtgatgatgtggctttgaagaactttgccaaatactttcttcaccaatctcatgaggagagggagcatgctgagaaactgatgaagctgcagaaccaacgaggtggccgaatcttccttcaggatatcaaaaaaccagactgtgatgactgggagagcgggctgaatgtgatggagtgtgcattacatttggaaaaaaatgtgaatcagtcactactggaactgcacaaattggccactgacaaaaatgacccccatttgtgtgacttcattgagacacattacctgaatgagcaggtgaaagccatcaaagaattggatgaccatgtgaccaacttgcacaagatgggagcactcgaatctggcttggcagaatatctctttgacaagcacaccctgggagacagtgataatgaaagctaagcctcggctaatttccccgtagccgtggggtgacttccctggtcaccaaggcagtgcatgcatgttggggtttcctttaccttttctataagttgtaccaaaacatccacctaagttctttgatttgtgccattccttcagatgaagaaatttggtacccccccccaaaaaaagtaataataataatataaatatatgtattag

SEQ ID NO: 7999 - protein, 183 aa, Homo sapiens [sequence omitted]

SEQ ID NO: 8000 - DNA, 614 bp, Homo sapiens
ttttcattccctaagaataaatgtgtactgattaatctcatgggagattgtttcataagcatgtatcattacattattttccttgtaattaatttgctaaacggaggtgaacaaagtagtcctaaactaaaatttatttaccatttctcctttaaatacaaagacaaatatgatctattcatgacattataccactgtttctgttatttcccatattaacttggcgtagttgtttaaaacattcttttcttctttgtagatgaagaaaatatgacagtgaaataacgattactattgatcagtcatagttgtttaaaataatgtctaatgggctgggtgcggtggttcacacctgtaatctcagcactttgggaagccgaggtgggcagattatgcggtcaggagatcaagaccatcctggccaacatggtgaaaccccatctctactaaaataaaaaaaaaaaattagctgggtttggtggcacacacctgtaatcccagctactcgggaggctgtggctggagaatcgcttgaaccagcaggtggaggttgcagtgagccaagatcacgccactgttctccagcctgggcaacacagcgaggctccgtctcc

SEQ ID NO: 8001 - protein, 44 aa, Homo sapiens
MSNGLGAVVHTCNLSTLGSRGGQIMRSGDQDHPGQHGETPSLLK

SEQ ID NO: 8002 - DNA, 2984 bp, Homo sapiens
attgtgggatcgcggagccgtccctgagacgctgggatccgcagaggagcccacttgagagcgcctcctgtcgtctgtaaggttgccttgccatccctcggcaccacaacttcccccgcccccccatcgcctcctcctccatcctccagttcaaaatggcgacggcggcggcagcggcggcggtgatggctcctccgggctgcccgggttcgtgccccaacttcgccgtagtctgctccttcttggagcgctacgggccgctgctagacctgcctgagttgccgttccctgagctggagcgggtgctgcaggcgccgccgccggacgtcggcaacggagaagtaccaaaagaattggtggagctccatttgaagctgatgaggaaaattggcaaatctgttactgcagacagatgggaaaaatatttgatcaaggtaactagtatttgtaaatttcctgctctattactgaaatattactctagcataaattgatattatgttttataatacacataatttttaattagtttactaaaagtaagactatggctccaaaatccacatgactgcaagtatgtgattctcttcttttgctactacttagtagcagtcttgagtcctgaagttagatttcagaagtgttatatctcttttgtgcctaacactgtgctcaggacttttcatgtcttttctcatttaattcttaaaatcaccctgatcacatcaagtaagaaactaataaggctcagggatgttgtcatttttactttagttcacatagtatgcatagacttatttagtggttcccctagactctgttatatagaacagaggtccccaacccctgggccacagaccaatagtggtcatccccattcctctccttaccatgtgagctctgcttcctctgagatcagctgcggcatagattctcataggagtgcaaaccctatcgtgaactgcacatgcgaaggatctaggttgtgcactccttatgagaatctactgactgatgatccgtcactatctcccatcacttccagatggggccatctagttgattcaaatgtaatgcatttgaatcatccccaaaccatctccctcccacccaccacccccagtctgtggacaaattatcttccgcaaaactggtccctgatgccagaaaggttgaggaccactgatacagaaacatgccatctttttcgttcctcagaatttttgcatatatggtatcttctgcctggagtaccttcccaccagtttgttttcctagccaacttatttgtcctttaggtctcagctcaagtagtactgtctccttgagtccttctctcaggaagatgttccttcatggatttatgtttaaccctattttagaaactgtcatatggttttatattgaatgttcattatgtaccaggcgctgtttagtgcttcctttgcattatctcaactttaaaatactgattatcctcattttactcacaaggaaattgattttgagaaactaaatagagtaacttgtctggtctcacattgctaaaaacgacagagccagcattcaaatccaggacttggtgaatccagtactttaaaatatcactgatgaaatgttcctcacatttgtcttttgtgtatattgtaagtttcttgaaggcttcttttaatctttttttttttttttttaaagacagtctcactctgtcacccaggctagagtgcagtggtgctgtctcggctcactgcaacgtccacctcctgggttcaagcaattctcttgcttcagcctcctgagtagctgggactacaggtgcgtgccaccatgcctggctaattttttttgtattattagtagagacagggtttcaccatattggccaggctagtctcgaactcctgacctcgtgatccgcccacctcggcctcccaaagtgctgggattacaggcgtgagccaccgtgcccggcggcttcttttaatcttttatgcatcagtattagatggatcaattaatcactgagacaattttagttttctttcccttgactgccagtaagcttaactttgttatatttatttattagttataatcattagctagttttctgatggaatttttaccttccctgttacatggctcttacagtgctctcgtctttctccttgtggcatcattgtacatatgtattactgaaagctgtttcttttccttttgaagtaaatggaatataattaatataaaattctgtttaaatccagagcaagtatctggcatctgctaggccttgttgctttgctcatagcagacattaccaacctaagccttcctgctaagcctagacttagcagactacattattacacaaatcagtcagcattggcatctatttgtcatctattgttagtaattccctaagacagctgaactaagacctatagaatgagcagaaattttgttaggaaataaccagtagcttagccctactgtaatagaaagtaccttgagaaaatgacagtgagtggaggcctaacagtcatgtgttcaggaggttactgtgataatccaactgagcaataaggagacctgaattaaggttttggcactagggatggaaaggagggggtggatgtaagagctatttggaaggtaaaatcaacaactattgataattgatagtgagagagaaagagagagaggtgtctaggaactgagcttaaccaagggcattcatttgttattgtgctgtatcttgcatttgctaacgtacattcatccgtagtagacaggacctcaaaaatctaggcggatgactttttactttgacagcggaattacccttctaaaaataaggaaacccagctaggcacagtggctcacatgtgtaatcctagcactttgggaggctgaggcaggtagattgcttgagctcaggagttcgagaccagcctgggcaacatggcaaaatcccatctctacaa

SEQ ID NO: 8003 - protein, 112 aa, Homo sapiens
MATAAAAAAVMAPPGCPGSCPNFAVVCSFLERYGPLLDLPELPFPELERVLQAPPPDVGNGEVPKELVELHLKLMRKIGKSVTADRWEKYLIKVTSICKFPALLLKYYSSIN

SEQ ID NO: 8004 - DNA, 743 bp, Homo sapiens
gttcaaaatggcgacggcggcggcagcggcggcggtgatggctcctccgggctgcccgggttcgtgccccaacttcgccgtagtctgctccttcttggagcgctacgggccgctgctagacctgcctgagttgccgttccctgagctggagcgggtgctgcaggcgccgccgccggacgtcggcaacggagaagtcggtcaggaagccgtgcagcagctatggctttgaaggttaccggaaaaacacgcgtggagctggaggtggcagttcaccgaaattgaatcactctaacgagccgcaacataaaatccctggaaaaggtgtgtgctgacttcatcagaggagcagaggcaaagaatctccaagtgaaaggaccagttcgaatacctaccaagactttgagaatcactacagaaaaagtccttgtggtgaaggttctaagacgtgggatcctttccagatgagaatccacaagcgactcattgacttgcacagtccttctgagattgttaagcagattgcttccatcagtttgagccgggagttgaggtgaaagtcaccattgcagatgcttaagtcaactattttaataaattgattaccagttgttaaaaaaaaattataaatggcagacttgatcccattcatcattagactactttcatgttttgctcagaattaagtaagttttaatattcatttaaaaatacttatcaaataaatttggtttctctcaaagtaa

SEQ ID NO: 8005 - protein, 73 aa, Homo sapiens
MATAAAAAAVMAPPGCPGSCPNFAVVCSFLERYGPLLDLPELPFPELERVLQAPPPDVGNGEVGQEAVQQLWL

SEQ ID NO: 8006 - DNA, 582 bp, Homo sapiens
gttcaactgcagggcgtattcccggagggcagttggggagcgcagatcccgaagcagcgctgggagcgtaagtgcgggcagagcactgcgccgtttgggaacgcaactttgaggagacagtgcggtggacttcagtgaagttccttatgacttcccctgaaattgcttccttatcatgggggcaaatgaaagtaaaaggctctaatacaacctataaggactgcaaagtatggccagggggtagtcggacttgggattggagagaaacaggaactgagcattctcctggtgtgcagcctgcagatgtgaaggaagttgttgagaagggtgtacagactcttgtgattggccgagggatgagtgaggccttgaagggtcttactctgccacccaggctggagtgcagtggcacgatcataactcactgaagcctcaaactcctgggcgcaagtgatcttcctgcctcagcctcctgaggagtggggattacaggcacgtgccaccacgccaggagctggactgagcatcaaacatgtctgtgagctggcaatgagtcacctaagtacttttttgtatcaaatc

SEQ ID NO: 8007 - protein, 93 aa, Homo sapiens
MTSPEIASLSWGQMKVKGSNTTYKDCKVWPGGSRTWDWRETGTEHSPGVQPADVKEVVEKGVQTLVIGRGMSEALKGLTLPPRLECSGTIITH

SEQ ID NO: 8008 - DNA, 588 bp, Homo sapiens
gtattcccggagggcagttggggagcgcagatcccgaagcagcgctgggagcgtaagtgcgggcagagcactgcgccgtttgggaacgcaactttgaggagacagtgcggtggttctggaggctgggaagtccaagaccagttggctcgcatctgacttcagtgaagttccttatgacttcccctgaaattgcttccttatcatgggggcaaatgaaagtaaaaggctctaatacaacctataaggactgcaaagtatggccagggggtagtcggacttgggattggagagaaacaggaactgagcattctcctggtgtgcagcctgcagatgtgaaggaagttgttgagaagggtgtacagactcttgtgattggccgagggatgagtgaggccttgaaggtgccttcatcaactgtggagtacctcaagaaacatggcattgatgtgcgggtcctccagacagagcaggcagtgaaggagtataatgccttggttgcccaaggggtcagggtgggaggtgtcttccattccacctgctgatggagccttaagaggagaataaatcactaagtgcctatgcctgtga

SEQ ID NO: 8009 - protein, 122 aa, Homo sapiens; identical to SEQ ID NO: 884

SEQ ID NO: 8010 - DNA, 534 bp, Homo sapiens
ggcagttggggagcgcagatcccgaagcagcgctgggagcgtaagtgcgggcagagcactgcgccgtttgggaacgcaactttgaggagacagtgcggtggacttcagtgaagttccttatgacttcccctgaaattgcttccttatcatgggggcaaatgaaagtaaaaggctctaatacaacctataaggactgcaaagtatggccagggggtagtcggacttgggattggagagaaacaggaactgagcattctcctggtgtgcagcctgcagatgtgaaggaagttgttgagaagggtgtacagactcttgtgattggccgagggatgagtgaggccttgaaggtgccttcatcaactgtggagtacctcaagaaacatggcattgatgtgcgggtcctccagacagagcaggcagtgaaggagtataatgccttggttgcccaaggggtcagggtgggaggtgtcttccattccacctgctgatggagccttaagaggagaataaatcactaagtgcctatgcctgtga

SEQ ID NO: 8011 - protein, 122 aa, Homo sapiens; identical to SEQ ID NO: 884

SEQ ID NO: 8012 - DNA, 455 bp, Homo sapiens
gcagttggggagcgcagatcccgaagcagcgctgggagcgtaagtgcgggcagagcactgcgccgtttgggaacgcaactttgaggagacagtgcggtggagatgaggtttcaccatgttggccagtctggtcttgaactcctgacctcaagtgatccacccacttcggcctctcagaagtgctgggattacaggcatgagccaccacgcctggccagttctggaggctgggaagtccaagaccagttggctcgcatctggtgagagccttcttgctgcatcatcctatagtggaagtcatcacatggtggaagcaccaagagagggccatacttgtccttttataatgaacctactactcctgcaataacagcataatctattcatgagggtggaaccctcatggcctaatcagctcttaaaggtcccacctcttaatgttgttataatggcag

SEQ ID NO: 8013 - protein, 57 aa, Homo sapiens
MSHHAWPVLEAGKSKTSWLASGESLLAASSYSGSHHMVEAPREGHTCPFIMNLLLLQ

SEQ ID NO: 8014 - DNA, 589 bp, Homo sapiens
gcagatcccgaagcagcgctgggagcgtaagtgcgggcagagcactgcgccgtttgggaacgcaactttgaggagacagtgcggtggttctggaggctgggaagtccaagaccagttggctcgcatctgacttcagtgaagttccttatgacttcccctgaaattgcttccttatcatgggggcaaatgaaagtaaaaggctctaatacaacctataaggactgcaaagtatggccagggggtagtcggacttgggattggagagaaacaggaactgagcattctcctggtgtgcagcctgcagatgtgaaggaagttgttgagaagggtgtacagactcttgtgattggccgagggatgagtgaggccttgaaggctccaacccagcagctgccatcaggtgttcatgtcagggctgtggtacaattccacctggctacagcttcatggcacatccttgagagatgcaaaacaggagctggactgagcatcaaacatgtctgtgagctggcaatgagtcacctaagtacttttttgtatcaaatctatgatgccatcattcttaagatgcacctttattttatgaaat

SEQ ID NO: 8015 - protein, 146 aa, Homo sapiens
MTSPEIASLSWGQMKVKGSNTTYKDCKVWPGGSRTWDWRETGTEHSPGVQPADVKEVVEKGVQTLVIGRGMSEALKAPTQQLPSGVHVRAVVQFHLATASWHILERCKTGAGLSIKHVCELAMSHLSTFLYQIYDAIILKMHLYFM

SEQ ID NO: 8016 - DNA, 612 bp, Homo sapiens
gtaagtgcgggcagagcactgcgccgtttgggaacgcaactttgaggagacagtgcggtggagatgaggtttcaccatgttggccagtctggtcttgaactcctgacctcaagtgatccacccacttcggcctctcagaagtgctgggattacaggcatgagccaccacgcctggccagacttcagtgaagttccttatgacttcccctgaaattgcttccttatcatgggggcaaatgaaagtaaaaggctctaatacaacctataaggactgcaaagtatggccagggggtagtcggacttgggattggagagaaacaggaactgagcattctcctggtgtgcagcctgcagatgtgaaggaagttgttgagaagggtgtacagactcttgtgattggccgagggatgagtgaggccttgaaggtgccttcatcaactgtggagtacctcaagaaacatggcattgatgtgcgggtcctccagacagagcaggcagtgaaggagtataatgccttggttgcccaaggggtcagggtgggaggtgtcttccattccacctgctgatggagccttaagaggagaataaatcactaagtgcctatgcctgtga

SEQ ID NO: 8017 - protein, 122 aa, Homo sapiens; identical to SEQ ID NO: 884

SEQ ID NO: 8018 - DNA, 425 bp, Homo sapiens
gcgggcagagcactgcgccgtttgggaacgcaactttgaggagacagtgcggtggttctggaggctgggaagtccaagaccagttggctcgcatctgacttcagtgaagttccttatgacttcccctgaaattgcttccttatcatgggggcaaatgaaagtaaaaggctctaatacaacctataaggactgcaaagtatggccagggggtagtcggacttgggattggagagaaacaggaactgaggtgccttcatcaactgtggagtacctcaagaaacatggcattgatgtgcgggtcctccagacagagcaggcagtgaaggagtataatgccttggttgcccaaggggtcagggtgggaggtgtcttccattccacctgctgatggagccttaagaggagaataaatcactaagtgccta

SEQ ID NO: 8019 - protein, 90 aa, Homo sapiens
MTSPEIASLSWGQMKVKGSNTTYKDCKVWPGGSRTWDWRETGTEVPSSTVEYLKKHGIDVRVLQTEQAVKEYNALVAQGVRVGGVFHSTC

SEQ ID NO: 8020 - DNA, 585 bp, Homo sapiens
cattatactccttcactgcctgctctgtctggaggacccgcacatcaatgccatgtttcttgaggtactccacagttgatgaaggcacctgggaaggtggaaaagagatgagtacagggtcttgctctgttgcctaagctggagtgcaatggcacaatcagcttaccacagcctcaaaatcctgggctcaagtgattttcccacctcaggctcctgagcagctaggactacaggtgtgcatcaccatgtctggctataaaaaagaattttgtagagatggggtctcactatgtttcccaggatggtctcaaattcctggcctcaagtgatcctccggccttggtctccaaaagtgctgggattacaagcatgaacaactgtgcccagacttgattttctttcttaagccccacatttgaactgatggtcttgactttttgatacatgtttttgtaaagcacacaagtttttaattttgatgaggtctattaatttatttttccttttgttgcttgtggatttggtgttatttctaagaatccattgccatatccaaggtcttaaagatttacccttgttttcttc

SEQ ID NO: 8021 - protein, 38 aa, Homo sapiens
MGSHYVSQDGLKFLASSDPPALVSKSAGITSMNNCAQT

SEQ ID NO: 8022 - DNA, 628 bp, Homo sapiens
gggaagtccaagaccagttggctcgcatctggtgagagccttcttgctgcatcatcctatagtggaagtcatcacatggtggaagcaccaagagagggccatacttgtccttttataatgaacctactactcctgcaataacagcataatctattcatgagggtggaaccctcatggcctaatcagctcttaaagacttcagtgaagttccttatgacttcccctgaaattgcttccttatcatgggggcaaatgaaagtaaaaggctctaatacaacctataaggactgcaaagtatggccagggggtagtcggacttgggattggagagaaacaggaactgagcattctcctggtgtgcagcctgcagatgtgaaggaagttgttgagaagggtgtacagactcttgtgattggccgagggatgagtgaggccttgaaggtgccttcatcaactgtggagtacctcaagaaacatggcattgatgtgcgggtcctccagacagagcaggcagtgaaggagtataatgccttggttgcccaaggggtcagggtgggaggtgtcttccattccacctgctgatggagccttaagaggagaataaatcactaagtgcctatgcctgtga

SEQ ID NO: 8023 - protein, 141 aa, Homo sapiens
MRVEPSWPNQLLKTSVKFLMTSPEIASLSWGQMKVKGSNTTYKDCKVWPGGSRTWDWRETGTEHSPGVQPADVKEVVEKGVQTLVIGRGMSEALKVPSSTVEYLKKHGIDVRVLQTEQAVKEYNALVAQGVRVGGVFHSTC

SEQ ID NO: 8024 - DNA, 13557 bp, Homo sapiens
taggaatattactaaccaccagtgccctttggcctttgctgtcagcttcctcggtgcccatcactggaggaggcctcctcaagaccactcggccctgagtgcggcgaggaccctgtttgtggatgtggaggagcgcgggccggaggccatggacgtgaaggagaggaagccttaccgctcgctgacccggcgccgcgacgccgagcgccgctacaccagctcgtccgcggacagcgaggagggcaaagccccgcagaaatcgtacagctccagcgagaccctgaaggcctacgaccaggacgcccgcctagcctatggcagccgcgtcaaggacattgtgccgcaggaggccgaggaattctgccgcacaggtgccaacttcaccctgcgggagctggggctggaagaagtaacgccccctcacgggaccctgtaccggacagacattggcctcccccactgcggctactccatgggggctggctctgatgccgacatggaggctgacacggtgctgtcccctgagcaccccgtgcgtctgtggggccggagcacacggtcagggcgcagctcctgcctgtccagccgggccaattccaatctcacactcaccgacaccgagcatgaaaacactgagactgatcatccgggcggcctgcagaaccacgcgcggctccggacgccgccgccgccgctctcgcacgcccacacccccaaccagcaccacgcggcctccattaactccctgaaccggggcaacttcacgccgaggagcaaccccagcccggcccccacggaccactcgctctccggagagccccctgccggcggcgcccaggagcctgcccacgcccaggagaactggctgctcaacagcaacatccccctggagaccagaaacctaggcaagcagccattcctagggacattgcaggacaacctcattgagatggacattctcggcgcctcccgccatgatggggcttacagtgacgggcacttcctcttcaagcctggaggcacctccccgctcttctgcaccacatcaccagggtacccactgacgtccagcacagtgtactctcctccgccccgacccctgccccgcagcaccttcgcccggccggcctttaacctcaagaagccctccaagtactgtaactggaagtgcgcagccctgagcgccatcgtcatctcagccactctggtcatcctgctggcatactttgtggccatgcacctgtttggcctaaactggcacctgcagccgatggaggggcagatgtatgagatcacggaggacacagccagcagttggcctgtgccaaccgacgtctccctatacccctcagggggcactggcttagagacccctgacaggaaaggcaaaggaaccacagaaggaaagcccagtagtttctttccagaggacagtttcatagattctggagaaattgatgtgggaaggcgagcttcccagaagattcctcctggcactttctggagatctcaagtgttcatagaccatcctgtgcatctgaaattcaatgtgtctctgggaaaggcagccctggttggcatttatggcagaaaaggcctccctccttcacatacacagtttgactttgtggagctgctggatggcaggaggctcctaacccaggaggcgcggagcctagaggggaccccgcgccagtctcggggaactgtgcccccctccagccatgagacaggcttcatccagtatttggattcaggaatctggcacttggctttttacaatgacggaaaggagtcagaagtggtttcctttctcaccactgccattgagtcggtggataactgccccagcaactgctatggcaatggtgactgcatctctgggacctgccactgcttcctgggtttcctgggccccgactgtggcagagcctcctgccccgtgctctgtagcggaaatggccaatacatgaaaggcagatgcttgtgccacagtggctggaaaggcgctgagtgcgatgtgcccaccaaccagtgtatcgatgtggcctgcagcaaccatggcacctgcatcacgggcacctgcatctgcaaccctggctacaagggcgagagctgtgaggaagtggactgcatggaccccacatgttcaggccggggtgtctgcgtgagaggcgaatgccactgctctgtgggatggggaggcaccaactgcgagacccccagggccacatgcttagaccagtgttcaggccacggaaccttcctcccggacaccgggctttgcagctgtgacccaagctggactggacacgactgttctatcgagatctgtgctgccgactgtggtggccatggcgtgtgcgtagggggcacctgccgctgcgaggatggctggatgggggcagcctgcgaccagcgggcctgccacccgcgctgtgccgagcatgggacctgccgcgacggcaagtgcgagtgcagccctggctggaatggcgaacactgcaccatcgctcactatctggatagggtagttaaagagggttgccctgggttgtgcaatggcaacggcagatgtaccttagacctgaatggttggcactgcgtctgccagctgggctggagaggagctggctgtgacacttccatggagactgcctgcggtgacagcaaagacaatgatggagatggcctggtggactgcatggaccctgactgctgcctccagcccctgtgccatatcaacccgctgtgccttggctcccctaaccctctggacatcatccaggagacacaggtccctgtgtcacagcagaacctacactccttctatgaccgcatcaagttcctcgtgggcagggacagcacgcacataatccccggggagaacccctttgatggagggcatgcttgtgttattcgtggccaagtgatgacatcagatggaacccccctggttggtgtgaacatcagttttgtcaataaccctctctttggatatacaatcagcaggcaagatggcagctttgacttggtgacaaatggcggcatctccatcatcctgcggttcgagcgggcacctttcatcacacaggagcacaccctgtggctgccatgggatcgcttctttgtcatggaaaccatcatcatgagacatgaggagaatgagattcccagctgtgacctgagcaattttgcccgccccaacccagtcgtctctccatccccactgacgtccttcgccagctcctgtgcagagaaaggccccattgtgccggaaattcaggctttgcaggaggaaatctctatctctggctgcaagatgaggctgagctacctgagcagccggacccctggctacaaatctgtcctgaggatcagcctcacccacccgaccatccccttcaacctcatgaaggtgcacctcatggtagcggtggagggccgcctcttcaggaagtggttcgctgcagccccagacctgtcctattatttcatttgggacaagacagacgtctacaaccagaaggtgtttgggctttcagaagcctttgtttccgtgggttatgaatatgaatcctgcccagatctaatcctgtgggaaaaaagaacaacagtgctgcagggctatgaaattgacgcgtccaagcttggaggatggagcctagacaaacatcatgccctcaacattcaaagtggcatcctgcacaaagggaatggggagaaccagtttgtgtctcagcagcctcctgtcattgggagcatcatgggcaatgggcgccggagaagcatctcctgccccagctgcaacggccttgctgacggcaacaagctcctggccccagtggccctcacctgtggctctgacgggagcctctatgtgggtgatttcaactacattagaaggatcttcccctctggaaatgtcaccaacatcctagagctgagaaataaagatttcagacatagtcacagtccagcacacaaatactacctggccacagaccccatgagtggggccgtcttcctttctgacagcaacagccggcgggtctttaaaatcaagtccactgtggtggtgaaggaccttgtcaagaactctgaggtggttgcggggacaggtgaccagtgcctcccctttgatgacactcgctgcggggatggtgggaaggccacagaagccacactcaccaatcccaggggcattacagtggacaagtttgggctgatctacttcgtggatggcaccatgatcagacgcatcgatcagaatgggatcatctccaccctgctcggctctaatgatctcacatcagcccggccactcagctgtgattctgtcatggatatttcccaggttcacctggagtggcccacagacttagccatcaacccaatggacaactcactttatgtcctcgacaacaatgtggtcctgcaaatctctgaaaaccaccaggtgcgcattgtcgccgggaggcccatgcactgccaggtccctggcattgaccacttcctgctaagcaaggtggccatccacgcaaccctggagtcagccaccgctttggctgtttcacacaatggggtcctgtatattgctgagactgatgagaaaaagatcaaccgcatcaggcaggtcaccactagtggagagatctcactcgttgctggggcccccagtggctgtgactgtaaaaatgatgccaactgtgattgtttttctggagacgatggttatgccaaggatgcaaagttaaataccccatcttccttggctgtgtgtgctgatggggagctctacgtggccgaccttgggaacatccgaattcggtttatccggaagaacaagcctttcctcaacacccagaacatgtatgagctgtcttcaccaattgaccaggagctctatctgtttgataccaccggcaagcacctgtacacccaaagcctgcccacaggagactacctgtacaacttcacctacactggggacggcgacatcacactcatcacagacaacaatggcaacatggtaaatgtccgccgagactctactgggatgcccctctggctggtggtcccagatggccaggtgtactgggtgaccatgggcaccaacagtgcactcaagagtgtgaccacacaaggacacgagttggccatgatgacataccatggcaattccggccttctggcaaccaaaagcaatgaaaacggatggacaacattttatgagtacgacagctttggccgcctgacaaatgtgaccttccctactggccaggtgagcagtttccgaagtgatacagacagttcagtgcatgtccaggtagagacctccagcaaggatgatgtcaccataaccaccaacctgtctgcctcaggcgccttctacacactgctgcaagaccaagtccggaacagctactacatcggggccgatggctccttgcggctgctgctggccaacggcatggaggtggcgctgcagactgagccccacttgctggctggcaccgtcaaccccaccgtgggcaagaggaatgtcacgctgcccatcgacaacggcctcaacctggtggagtggcgccagcgcaaagagcaggctcggggccaggtcactgtctttgggcgccggctgcgggttcacaaccgaaatctcctatctctggactttgatcgcgtaacacgcacagagaagatctatgatgaccaccgcaagttcacccttcggattctgtacgaccaggcggggcggcccagcctctggtcacccagcagcaggctgaatggtgtcaacgtgacatactcccctgggggttacattgctggcatccagaggggcatcatgtctgaaagaatggaatacgaccaggcgggccgcatcacatccaggatcttcgctgatgggaagacatggagctacacatacttagagaagtccatggtgctgctactacacagccagaggcagtatatctttgagttcgacaagaatgaccgcctctcttctgtgacgatgcccaacgtggcgcggcagacactagagaccatccgctcagtgggctactacagaaacatctatcagccccctgagggcaatgcctcagtcatacaggacttcactgaggatgggcacctccttcacaccttctacctgggcactggccgcagggtgatatacaagtatggcaaactgtcaaagctggcagagacgctctatgacaccaccaaggtcagtttcacctatgacgagacggcaggcatgctgaagaccatcaacctacagaatgagggcttcacctgcaccatccgctaccgtcagattgggcccctgattgaccgacagatcttccgcttcactgaggaaggcatggtcaacgcccgttttgactacaactatgacaacagcttccgggtgaccagcatgcaggctgtgatcaacgagaccccactgcccattgatctctatcgctatgatgatgtgtcaggcaagacagagcagtttgggaagtttggtgtcatttactatgacattaaccagatcatcaccacagctgtcatgacccacaccaagcattttgatgcatatggcaggatgaaggaagtgcagtatgagatcttccgctcgctcatgtactggatgaccgtccagtatgataacatggggcgagtagtgaagaaggagctgaaggtaggaccctacgccaataccactcgctactcctatgagtatgatgctgacggccagctgcagacagtctccatcaatgacaagccactctggcgctacagctacgacctcaatgggaacctgcacttactgagccctgggaacagtgcacggctcacaccactacggtatgacatccgcgaccgcatcactcggctgggtgacgtgcaatacaagatggatgaggatggcttcctgaggcagcggggcggtgatatctttgagtacaactcagctggcctgctcatcaaggcctacaaccgggctggcagctggagtgtcaggtaccgctacgatggcctggggcggcgcgtgtccagcaagagcagccacagccaccacctgcagttcttctatgcagacctgaccaaccccaccaaggtcacccacctgtacaaccactccagctctgagatcacctccctctactacgacttgcaaggacacctctttgccatggagctgagcagtggtgatgagttttacatagcttgtgacaacatcgggacccctcttgctgtctttagtggaacaggtttgatgatcaagcaaatcctgtacacagcctatggggagatctacatggataccaaccccaactttcagatcatcataggctaccatggtggcctctatgatccactcaccaagcttgtccacatgggccggcgagattatgatgtgctggccggacgctggactagcccagaccacgagctgtggaagcaccttagtagcagcaacgtcatgccttttaatctctatatgttcaaaaacaacaaccccatcagcaactcccaggacatcaagtgcttcatgacagatgttaacagctggctgctcacctttggattccagctacacaacgtgatccctggttatcccaaaccagacatggatgccatggaaccctcctacgagctcatccacacacagatgaaaacgcaggagtgggacaacagcaagtctatcctcggggtacagtgtgaagtacagaagcagctcaaggcctttgtcaccttagaacggtttgaccagctctatggctccacaatcaccagctgccagcaggctccaaagaccaagaagtttgcatccagcggctcagtctttggcaagggggtcaagtttgccttgaaggatggccgagtgaccacagacatcatcagtgtggccaatgaggatgggcgaagggttgctgccatcttgaaccatgcccactacctagagaacctgcacttcaccattgatggggtggatacccattactttgtgaaaccaggaccttcagaaggtgacctggccatcctgggcctcagtggggggcggcgaaccctggagaatggggtcaacgtcactgtgtcccagatcaacacagtacttaatggcaggactagacgctacacagacatccagctccagtacggggcactgtgcttgaacacacgctacgggacaacgttggatgaggagaaggcacgggtcctggagctggcccggcagagagccgtgcgccaagcgtgggcccgcgagcagcagagactgcgggaaggggaggaaggcctgcgggcctggacagagggggagaagcagcaggtgctgagcacagggcgggtgcaaggctacgacggctttttcgtgatctctgtcgagcagtacccagaactgtcagacagcgccaacaacatccacttcatgagacagagcgagatgggccggaggtgacagagaggaccaaggacttcttgccaaagacagctactcttttgtggccgcatacctgactgtgttgtacttttaaaaaaatgattttttaacaagtgcagaaacaaaaagatactggttgcattgtaactcatgcaacatccttttttttagaaaagaaaaacacagatttggccttcgcacattttttgcaaagaacagaaggtatttttttctgtagtgtgatcacaatgaaaactttattgtcttttgttccctttttccttgaggatttttcccttgtcgtttggggtatgtatctcctctctgagatgcatctcctggggtgtgtcctcgtctgtccctaggtacccagtgtgatgtgggacatgaatgtctgtgctaacttgtctcatgtgcaaccctttcttcttcgactggggtcgggcaggagtaaagggagtgatgggccagtacaacaccccttccaagggggcctgggaggagggtctgtaggacctgaggctccttggcagggctcctgcagaagagtggtggatttcttctcaccttgttctctgcctccagaggatcatagatggcttcatcttgctccagggaatttcatggtgttgttcagcaccttttttaagctgccccaaactcctgttcaagctttctattttgatgctgaatgaaaccccctaccacttttgcaaatcctgtgtagttgtcggtgccacccccatgctgggatagagaaagtgtctcccaggtcctttcccccagaccagtgacataacatcctgggctcagagtcccatcctcccgggagggaaagcacccaggatgcctgtgattggttggtcctccatgatgttcctgttcatctcctcctttctcccaaagccagatgtgagaacgagcactgcacagcaagccttcaatgtgggcaccatgtccacagaacagaaggccacccatggcaaaggcatggcagtggtggcgagggcaccagcctgccttccgaggcaaagccctctctctatgactttgagtatcttccctccaccactcagccgccaccactgagacgtaggaatgtggagggaggtgcttggtggcctttgattctggaaaaatgcttaacaaaaaaagccagccaaagagaggaaggcataagctaagcatccttctaaccagttcccaaagtcccatctgcctccatgtaccagctgatcgcagagctggactggggcaggctgggcttccaggaaattcctgaagttctgaaacagcttcccctctagagaagcccacccaatgtgttttttagtgacaggaagaaaggagggaagagctgatgtggtgtggcctgcccatatcatacaaccccaccaggagcagggcagttcccaaggtgggtgcccgtagatctgggaggccaggctggcatgattcctgtgaagaactgtgcctgtgtcgtcagggagaggcctgagccctctcagaagcagggacagcccacacctgaagagcacgcccaagctgaggcagcagccagcaggctgggggagcagtgagggcagggggagtcacagccagagctgggagccccttgttcaaggattccattcctggttcatccgcctaattaccattgtcattaccactcacaggaggctctgggagatgggaggggaagccaaatgcttccttttaagctgggcttcttagaaaatggaacttttatgggttacatttacattaagtgtggaaaatgaattctgagtctgagctattccccgtggaaaccttgttggactgataagctcatggcacctctatagccttactcacatagtcttcagaatattacacaagttaatgaaactgagaaggtctgactgcatgaggatcggagcagcatgtagtctgggttctgcctggcagagggaggcaaccaaaacttcttggggagaggagatttcgccttaacgtcatcccactgggattagaggatgtgtttcgctaagtgctcttcctgtttccaaaaaaaaagccaccctgctgcagcagtgcgctttggcctgcttgtccactggttgcccattgcccctggatccagagctctactgagtcagatacagtgctctgcaggcctgctgtgggaggcatgagctggagatgggggctcccatctggcaggatcattcttggatgagatggaaaacagtttggcctgaagaacacaagttttgtcctccagaagggacttacgcctctcaaaatgtactcttcataccaagggcccttgggcaaagtgctcctgcccagttgatcagtcccatcctggctgcctgacatcagtgaagacctgctggggatgtctgctcagaggtcaggaacggcatgcggtccacaggaaccagctccctacgcttcccccacgccctgtccctcctccacagccccctccccaaaggaatagggtggacttttagggatcaaaaacagaattattgggtgtttcatttatttttttctttctactgagtgtttgtttctttaaaggatcttatatttttcctgtgctacataccaccacagcagcccagcttctgtggggagagaagttgaaggatcccgaagctttagaaaaaggatctcagctgtggcacaggcagtgttatgcgcctcactgccacattggtgctgttgtattgaaggtggtgcttctggccttggcccttttgagttggtttccatttgggctgcaggtgactcagtgactccctcctcaagctgtcctcctgctaagaccagcagtcacaaacccatggcaagggtgagtgtgaaggcctaaccctgtgcctatgtaataggctccaagcatcgactcccatcctgagaggaccggcccttttgacactcaccaaccaaatctgttcattcgatagagtgaccaggcctccctcacctgcccaggtgtatgatcctacagttcctgccttctctcctaccccgcacagctgccaactggtcctacatcctcagcccctctgccaccaccttaaataggactttactgattccccaactttgtttttttgtaggatgagatttcctttttatcccacccccccacaccccaaacagacattgctggagggcagactggaggaaggggaaggcatgcaggtaaattactgccttgtcagcctctgaccctcatctctcagaattgttggctgagaattaacccaaggaccacaccagtgcctgatttctacttagggagagaggattggaaacgatccctaagaaactgactgagggtgagaatggccaggaggtgtgtgtccaaataaccaggagggggcacagaagatgatggcaaggcagactgggcagtgttttgtagacacagaacaaagaatcagaatttgaaaaaagaagaaaaacaaatcttcgcagctgcaactttaaagtatcacctttatagatggcagggatttccattatgcaaatggaatctaagatttcaatgtgaaatcttagaatgcagttttaccacttgcagtcttgtatttgtggtggccatgtggtgagggcggtgatgctgagctttctgcccaggaggaatgagctttcaagctctcagcagggtgtcaggcttggggatttgagcatccactgctcaaagtccaggctattctccagtcctcacggcagccactaagcccaggagccagacctggcccggggacacatctcctgagggatcccagaaagaacccagtctttcctttcccttggggtccttgttagaatgaaaacctctctatttaaggcacatcattcccagctaggtttatacacttgtctatattttactggaggaaagggaattaaaaaagaactctgcagttcaaggccctttcatttaaccttccaaaaacagcaaactcattttaaagactcattgctgaggtgatagagagaaaccttatcctctccaaccttcacattcacaaaaaccatccttgtgtacttgactgccctagacagtggtgactcttaggtttcattacgaatgtggaatatcagagtgtgggaaggcccaggcgagggccaatgttgtgtttcttaccccctctggaatgccaaaggcaaggtactaggtgacctcctggtccccaagaaaatgtgatttattctgagggcgaacagccaagggaggactagtctggagcacgctcggccgtcctggcaggagctgagcctcaggtgtctggcggtgccccagcagccctggattcacccaacaccagaatcccacttttctaaatccacctgttgttctgagcacctctgaacccgcagcttcggcaaaaggagtctgtaccaagctgcttctggatgaccaacactggagactctggccttaccatgtggaaatcattttcctgaagtctggaactaattttgagaagtttttttctcaacacttttgtgtttctaacactgtatcttgactgtgtaaataccaacaaggctgtaaataaatgcagatgtagataccttctagaaaaaaaaaagcataaaaacaaaaccagaagtgatcccgtgtagccttcgttgacaaataaagactattttgtgtttacaggtgtctggtggcctttgcttggagataaaggcttcctcttgcctgtcccagcccccgagccatcctgggtttgcacttccctgctggctgctatcaggatgacctgggagaggactcagtcctaggccccagggtccctctaaatccctccaggctgcagctctgtcaagagggatgtccagagggtctctaagaccctgaagcttgactttgcaattgcatgacaggaataaatatcacagctcctctgacatcactagtgcagcgtggctccccatcccactgctgccctcgttcagggacaggctgaaggggccaacgaacccaaccctcccagaggagggagccttgctccaccactgggcacacagagtcatccaccatgccactgccttccacaagggatgtgagccgttgcactttaaaaataaatgactgtatattcatc

SEQ ID NO: 8025 - protein, 2769 aa, Homo sapiens
MDVKERKPYRSLTRRRDAERRYTSSSADSEEGKAPQKSYSSSETLKAYDQDARLAYGSRVKDIVPQEAEEFCRTGANFTLRELGLEEVTPPHGTLYRTDIGLPHCGYSMGAGSDADMEADTVLSPEHPVRLWGRSTRSGRSSCLSSRANSNLTLTDTEHENTETDHPGGLQNHARLRTPPPPLSHAHTPNQHHAASINSLNRGNFTPRSNPSPAPTDHSLSGEPPAGGAQEPAHAQENWLLNSNIPLETRNLGKQPFLGTLQDNLIEMDILGASRHDGAYSDGHFLFKPGGTSPLFCTTSPGYPLTSSTVYSPPPRPLPRSTFARPAFNLKKPSKYCNWKCAALSAIVISATLVILLAYFVAMHLFGLNWHLQPMEGQMYEITEDTASSWPVPTDVSLYPSGGTGLETPDRKGKGTTEGKPSSFFPEDSFIDSGEIDVGRRASQKIPPGTFWRSQVFIDHPVHLKFNVSLGKAALVGIYGRKGLPPSHTQFDFVELLDGRRLLTQEARSLEGTPRQSRGTVPPSSHETGFIQYLDSGIWHLAFYNDGKESEVVSFLTTAIESVDNCPSNCYGNGDCISGTCHCFLGFLGPDCGRASCPVLCSGNGQYMKGRCLCHSGWKGAECDVPTNQCIDVACSNHGTCITGTCICNPGYKGESCEEVDCMDPTCSGRGVCVRGECHCSVGWGGTNCETPRATCLDQCSGHGTFLPDTGLCSCDPSWTGHDCSIEICAADCGGHGVCVGGTCRCEDGWMGAACDQRACHPRCAEHGTCRDGKCECSPGWNGEHCTIAHYLDRVVKEGCPGLCNGNGRCTLDLNGWHCVCQLGWRGAGCDTSMETACGDSKDNDGDGLVDCMDPDCCLQPLCHINPLCLGSPNPLDIIQETQVPVSQQNLHSFYDRIKFLVGRDSTHIIPGENPFDGGHACVIRGQVMTSDGTPLVGVNISFVNNPLFGYTISRQDGSFDLVTNGGISIILRFERAPFITQEHTLWLPWDRFFVMETIIMRHEENEIPSCDLSNFARPNPVVSPSPLTSFASSCAEKGPIVPEIQALQEEISISGCKMRLSYLSSRTPGYKSVLRISLTHPTIPFNLMKVHLMVAVEGRLFRKWFAAAPDLSYYFIWDKTDVYNQKVFGLSEAFVSVGYEYESCPDLILWEKRTTVLQGYEIDASKLGGWSLDKHHALNIQSGILHKGNGENQFVSQQPPVIGSIMGNGRRRSISCPSCNGLADGNKLLAPVALTCGSDGSLYVGDFNYIRRIFPSGNVTNILELRNKDFRHSHSPAHKYYLATDPMSGAVFLSDSNSRRVFKIKSTVVVKDLVKNSEVVAGTGDQCLPFDDTRCGDGGKATEATLTNPRGITVDKFGLIYFVDGTMIRRIDQNGIISTLLGSNDLTSARPLSCDSVMDISQVHLEWPTDLAINPMDNSLYVLDNNVVLQISENHQVRIVAGRPMHCQVPGIDHFLLSKVAIHATLESATALAVSHNGVLYIAETDEKKINRIRQVTTSGEISLVAGAPSGCDCKNDANCDCFSGDDGYAKDAKLNTPSSLAVCADGELYVADLGNIRIRFIRKNKPFLNTQNMYELSSPIDQELYLFDTTGKHLYTQSLPTGDYLYNFTYTGDGDITLITDNNGNMVNVRRDSTGMPLWLVVPDGQVYWVTMGTNSALKSVTTQGHELAMMTYHGNSGLLATKSNENGWTTFYEYDSFGRLTNVTFPTGQVSSFRSDTDSSVHVQVETSSKDDVTITTNLSASGAFYTLLQDQVRNSYYIGADGSLRLLLANGMEVALQTEPHLLAGTVNPTVGKRNVTLPIDNGLNLVEWRQRKEQARGQVTVFGRRLRVHNRNLLSLDFDRVTRTEKIYDDHRKFTLRILYDQAGRPSLWSPSSRLNGVNVTYSPGGYIAGIQRGIMSERMEYDQAGRITSRIFADGKTWSYTYLEKSMVLLLHSQRQYIFEFDKNDRLSSVTMPNVARQTLETIRSVGYYRNIYQPPEGNASVIQDFTEDGHLLHTFYLGTGRRVIYKYGKLSKLAETLYDTTKVSFTYDETAGMLKTINLQNEGFTCTIRYRQIGPLIDRQIFRFTEEGMVNARFDYNYDNSFRVTSMQAVINETPLPIDLYRYDDVSGKTEQFGKFGVIYYDINQIITTAVMTHTKHFDAYGRMKEVQYEIFRSLMYWMTVQYDNMGRVVKKELKVGPYANTTRYSYEYDADGQLQTVSINDKPLWRYSYDLNGNLHLLSPGNSARLTPLRYDIRDRITRLGDVQYKMDEDGFLRQRGGDIFEYNSAGLLIKAYNRAGSWSVRYRYDGLGRRVSSKSSHSHHLQFFYADLTNPTKVTHLYNHSSSEITSLYYDLQGHLFAMELSSGDEFYIACDNIGTPLAVFSGTGLMIKQILYTAYGEIYMDTNPNFQIIIGYHGGLYDPLTKLVHMGRRDYDVLAGRWTSPDHELWKHLSSSNVMPFNLYMFKNNNPISNSQDIKCFMTDVNSWLLTFGFQLHNVIPGYPKPDMDAMEPSYELIHTQMKTQEWDNSKSILGVQCEVQKQLKAFVTLERFDQLYGSTITSCQQAPKTKKFASSGSVFGKGVKFALKDGRVTTDIISVANEDGRRVAAILNHAHYLENLHFTIDGVDTHYFVKPGPSEGDLAILGLSGGRRTLENGVNVTVSQINTVLNGRTRRYTDIQLQYGALCLNTRYGTTLDEEKARVLELARQRAVRQAWAREQQRLREGEEGLRAWTEGEKQQVLSTGRVQGYDGFFVISVEQYPELSDSANNIHFMRQSEMGRR

SEQ ID NO: 8026 - DNA, 3361 bp, Homo sapiens
atggttggttgcatcggttctcacgtccgcccgcagaaggtgacggttctttgcactacgtcctccctagcacctgacgctgccagacgtttcaactttggacttttcgactcaacttatggtgagtgtggtattatccgctgtggttttaattggccttcttctgattattaatgaattaaagcatcatttcaataaacagatatttattggccatttagatttctcgtgtgtttgtgaaatacctttccatttacccattatttaattgggttccttttcttcttgatttgtagcagttcctcgcgtattttagtagttttatttgtggcaaagatctcctcccccgggtggcctctgccctccggcgctgggaagtccgggcggcgaggcagcctctcccggggcgttcgggctcctccggctctgccccgatgtcgttattacggccgtttgcagcctccgtgccagggccgggggtgcggttcgggacgcgggatcctaggtcgggtcctgccccgcccatgtggcgccggcgtctgtgttgtctgcggtctccagggcagcgccggggcgggcgggggcccgggcggcggcggcggcggcgcgggaggatgcggggcccgtccgggtcgcggccgcggaggagcgccgggcaggtaacgcttttgtgaaccacaactttaaatatcagccagctgctcctatcaacacgagtatcccctgttaattttttgcatttttcaagatgagtaaacgtaaactaattcccaagctctctattcaatctcctgtccttcataccaacttaaatgtccagtccacacacccacctttgaagaaagaagacttacatcggatttcaaaagactccttggaatctgattcagaaagcctcacgcaagagattatgtgccattctgagtttgatgatcgaatccggggcaacggtatggagcccgacagcttagacgaggaggaaagccctcgatggggaagcctgcacgagatggaagaggaagcaagtggaaaagcagctcagatggctcgcgagcaaaaccaccatacctgggaccagggcgccaataacaggcaacaaccaatagaagacaaatattcagacctccgctatgacccgaactggaagagtaagaaggaggaagggcagctgctgtctgtggaagcgttgccggagtccacggacagctctttagaaaatctgcctttggctcccctctacccttcccaggagacgtcaatggaactctccgggggaaaaggcgagcagaaagagagtccacagagtgcagcttctttacttggtagtgaatttttaagcccaaactatgagcatggtgcccgtcgcagcaagccgttttcagagctgagcgacagtgacctggaggagaagtcgagcagcctttctccgtacgtgaagagctcaagttcacataacgaggttttcctgccgggatcacgtggccctcggcgaaggaaatccaaacaacattttgtggaaaaaaacaagctcactttgggattacccaccccgaaaacggactcttatcttcaacttcacaataaaaaaagaggggaatctcatccagaacagatctcctaccccgtcagagtaacagacaagacgtctattcagaatgccaaggaaatggaaaatgctgccatcgatcctgaagataaatggcatcaaagagcacaacagctaaagaattaccaggaacactggtctcaatatgaaagtacaaaatcaagcaatgtaccaagagggcaaccttctgacatggtgaatgaccatcaaccttccagaagaccagccaagctcaagattcgaaagcagtgtaaacaccagaatggcctgaagtcttccacaacggaagaggtgactgccagtcaggggaaccagaataaccctcccaggcagcaacaaaaccaaaataagcctcttgatacttcaacaaagcctgaatcgattgtgattatgcatgcctctaacaatgatgtacaagcctcaagggcacttagaagccacaatctcaaagaaacctccaatacatttgctccaccaaaacaggcttttgacaaggtcttatctaaaaactctactggatgtgactctgggctgaatgttaataaagaaagaggacacaaagaccaagaagagaaaagattttcatatcagcagctacacaccctttctgacatggatttgaacaaccttaatgaactttctaagagacacgtgctcctgagccagaaaggctctcagtttgtttatcacataaatactcatggatcaaccaaaaataagaaacaactcaaacagccttatacagagacaaaatacaggaacttagaaatgttatggaaattccattcttcttctgacagccagacggttagagcttctccagattcatggctcacccagataatggagcagcatcagcaagccttggtgcagctgaccgacgtgcagcccagtgaaggggccttatccagcgtcacgcttccacctatactgtcaagggtagaaagtgaatcccaactcagttcagagagaagccaaagaaaccaagtgaaaattagccgtagcaattctgaaggctatctgtttcaactggaaaagggaaaaaagcataagaaaagaagcagcagtaagaacaccaagctgaaaggttatcagaaaagagacgtgaagcttggaggcctcggacctgactttgagtccatcagagacaaaacgcaaaaattaatacagcaaaaggaatatgcaaaacaagtcaaggagtacaacatgaagacactatccattctatcaaaaccacaaacagaaaaaactcaaaagaaatctgctatccctcggcagaaggctttggaatacgctaagaccatccccaaacccaaaccatcaaatctgactcatcaagcatcaaaggaacaaaaaaatccaacctatgctgggaaagaagaaagtttacctgaaatctcactgctggaaatactgcagaacagacacgaaagggaaaaacaggctgtggctgctttcaaagtccttcacatcgtatagacaacatttgataggaaggagaccaaaaatggtccaggaatgaacgtggagaaaagaaacgccaaccaccttctctgcgttgagagtaatggcctattattatcatctatctgccgtccatgtttgctttctgcaggatttaaaatatgaggcccaattggattatggtgccatattttactttctaggaagaaaattttttaaattatttattttcaaatcagttagaattggagctgaataataactagagaataaagcttttgttttatattg

SEQ ID NO: 8027 - protein, 778 aa, Homo sapiens; identical to SEQ ID NO: 886

SEQ ID NO: 8028 - DNA, 700 bp, Homo sapiens
aggccagaaaggatgtcatcacgctaaatgaccagttgacacgaagagaaaactggtgcgttaaggtcaaactattacttactttacatgctcaatacatactcaggggacccaattttagaacagttatctgaactggatgcagcaagtaacgtttgatcacaccaatagaaacactatgaaataacactatacgccaagatgatgacgacaacagaaataacaatgttttctacacatggaatgctcgcggtgtgccagcatctgtcctaggcccttagttctcagaaacatgactcatttaaaagaaaaatcaactctatcttggaggagaaatgaaggtcaagagtaaaaaaactaactaagctgacttagcaggcaaggaaatcatccttttcaaacctcaaagtggggatgactgagagaaactgtcgtctggagcctgggaaaaaaggaagttgaactctttcatagatctgccatgaggatgctgattccctgacttttgctgttttggtagaacacagtggctgaatcaccccagtgagatccctgggcaagtaaagcatacttctacattatctctttcaaagtggaatgggacacaacctctgccagctatttttttttttttgtgaaccattctattaataccaatcaaatcgagaaaatgatcaaatgaaattgcattttgagcatc

SEQ ID NO: 8029 - protein, 37 aa, Homo sapiens
MECSRCASICPRPLVLRNMTHLKEKSTLSWRRNEGQE

SEQ ID NO: 8030 - DNA, 750 bp, Homo sapiens
aaggaaatggaaaatgctgccatcgatcctgaagataaatggcatcaaagagcacaacagctaaagaacaccaagctgaaaggttatcagaaaagagacgtgaagcttggaggcctcggacctgactttgagtccatcagagacaaaacgcaaaaattaatacagcaaaaggaatatgcaaaacaagtcaaggagtacaacatgaagacactatccattctatcaaaaccacaaacagaaaaaactcaaaagaaatctgctatccctcggcagaaggctttggaatacgctaagaccatccccaaacccaaaccatcaaatctgactcatcaagcatcaaaggaacaaaaaaatccaacctatgctgggaaagaagaaagtttacctgaaatctcactgctggaaatactgcagaacagacacgaaagggaaaaacaggctgtggctgctttcaaagtccttcacatcgtatagacaacatttgataggaaggagaccaaaaatggtccaggaatgaacgtggagaaaagaaacgccaaccaccttctctgcgttgagagtaatggcctattattatcatctatctgccgtccatgtttgctttctgcaggatttaaaatatgaggcccaattggattatggtgccatattttactttctaggaagaaaattttttaaattatttattttcaaatcagttagaattggagctgaataataactagagaataaagcttttgttttatattg

SEQ ID NO: 8031 - protein, 155 aa, Homo sapiens
MENAAIDPEDKWHQRAQQLKNTKLKGYQKRDVKLGGLGPDFESIRDKTQKLIQQKEYAKQVKEYNMKTLSILSKPQTEKTQKKSAIPRQKALEYAKTIPKPKPSNLTHQASKEQKNPTYAGKEESLPEISLLEILQNRHEREKQAVAAFKVLHIV

SEQ ID NO: 8032 - DNA, 1100 bp, Homo sapiens
aaatacaggaacttagaaatgttatggaaattccattcttcttctgacagccagacggttagagcttctccagattcatggctcacccagataatggagcagcatcagcaagccttggtgcagctgaccgacgtgcagcccagtgaaggggccttatccagcgtcacgcttccacctatactgtcaagggtagaaagtgaatcccaactcagttcagagagaagccaaagaaaccaagtgaaaattagccgtagcaattctgaaggctatctgtttcaactggaaaagggaaaaaagcataagaaaagaagcagcagtaaggtaataaaagcgccatttttaccaagtaactcttccattttgagaatacagatggaccttgatgtaattatagccctggaatagggatggtcattactgagttgctgccacactgggtcgcccagagtcctaaggagtttcttactcctgcccctgctactccctggggtttccctccccttcttaatagaagttgttgctgccagggatgcccatttctccctcctgttcaagtcatcttggcgagaggtctccatttgcagagtggcagaactcctcctttcatccccagctgaaacatctcttccttaggaaagcttccatactccaccccaagccccatgctaacctgagtcttcatggttattaaatcatttcttcccaggtcattctcatatcttaaaaagtagagaaagtagggctgagtgagtgaaagcgcctgttgccattgcattttcccaccatctgccactatgaggactcatcttggccctaatctcaccccaacttctgcagtaaaatacctgggctggccagtgattgaactttcctctcaaacattagctgacctttactgagttctttgtctcaaatcaccattactagcacctttgcgcacttcagtcttttctcatagggcctacatgatttaacaagtaaaattggggacccaaagtagaatgttttcagtaagaaatgaaggcgcctaggaaggggactttttatgtcctgtgtatttctcttctgtcactggcaataaaaagccctcaggaaaggtc

SEQ ID NO: 8033 - protein, 128 aa, Homo sapiens
MLWKFHSSSDSQTVRASPDSWLTQIMEQHQQALVQLTDVQPSEGALSSVTLPPILSRVESESQLSSERSQRNQVKISRSNSEGYLFQLEKGKKHKKRSSSKVIKAPFLPSNSSILRIQMDLDVIIALE

SEQ ID NO: 8034 - DNA, 5113 bp, Homo sapiens
ggtaggaggcaaccatgtggttccagctgaattttttttttccctctctctttcttcactcctttttctttccaaacagggaaaagtgttccacgaagcggtagcgccttttcgcctcgcgttttcctccctgaccctggtcccggctcccgtccgggcgccagctggtggggcgagcgccgggagcccatctgcccccaggggcacggggcgcggggccggctcccgcccggcacatggctgcagccacctcgcgcgcaccccgaggcgccgcgcccagctcgcccgaggtccgtcggaggcgcccggccgccccggagccaagcagcagctgagcggggaagcgcccgcgtccggggatcgggatgtccctcctccttctcctcttgctagtttcctactatgttggaaccttggggactcacactgagatcaagagagtggcagaggaaaaggtcactttgccctgccaccatcaactggggcttccagaaaaagacactctggatattgaatggctgctcaccgataatgaagggaaccaaaaagtggtgatcacttactccagtcgtcatgtctacaataacttgactgaggaacagaagggccgagtggcctttgcttccaatttcctggcaggagatgcctccttgcagattgaacctctgaagcccagtgatgagggccggtacacctgtaaggttaagaattcagggcgctacgtgtggagccatgtcatcttaaaagtcttagtgagaccatccaagcccaagtgtgagttggaaggagagctgacagaaggaagtgacctgactttgcagtgtgagtcatcctctggcacagagcccattgtgtattactggcagcgaatccgagagaaagagggagaggatgaacgtctgcctcccaaatctaggattgactacaaccaccctggacgagttctgctgcagaatcttaccatgtcctactctggactgtaccagtgcacagcaggcaacgaagctgggaaggaaagctgtgtggtgcgagtaactgtacagtatgtacaaagcatcggcatggttgcaggagcagtgacaggcatagtggctggagccctgctgattttcctcttggtgtggctgctaatccgaaggaaagacaaagaaagatatgaggaagaagagagacctaatgaaattcgagaagatgctgaagctccaaaagcccgtcttgtgaaacccagctcctcttcctcaggctctcggagctcacgctctggttcttcctccactcgctccacagcaaatagtgcctcacgcagccagcggacactgtcaactgacgcagcaccccagccagggctggccacccaggcatacagcctagtggggccagaggtgagaggttctgaaccaaagaaagtccaccatgctaatctgaccaaagcagaaaccacacccagcatgatccccagccagagcagagccttccaaacggtctgaattacaatggacttgactcccacgctttcctaggagtcagggtctttggactcttctcgtcattggagctcaagtcaccagccacacaaccagatgagaggtcatctaagtagcagtgagcattgcacggaacagattcagatgagcattttccttatacaataccaaacaagcaaaaggatgtaagctgattcatctgtaaaaaggcatcttattgtgcctttagaccagagtaagggaaagcaggagtccaaatctatttgttgaccaggacctgtggtgagaaggttggggaaaggtgaggtgaatatacctaaaacttttaatgtgggatattttgtatcagtgctttgattcacaattttcaagaggaaatgggatgctgtttgtaaattttctatgcatttctgcaaacttattggattattagttattcagacagtcaagcagaacccacagccttattacacctgtctacaccatgtactgagctaaccacttctaagaaactccaaaaaaggaaacatgtgtcttctattctgacttaacttcatttgtcataaggtttggatattaatttcaaggggagttgaaatagtgggagatggagaagagtgaatgagtttctcccactctatactaatctcactatttgtattgagcccaaaataactatgaaaggagacaaaaatttgtgacaaaggattgtgaagagctttccatcttcatgatgttatgaggattgttgacaaacattagaaatatataatggagcaattgtggatttcccctcaaatcagatgcctctaaggactttcctgctagatatttctggaaggagaaaatacaacatgtcatttatcaacgtccttagaaagaattcttctagagaaaaagggatctaggaatgctgaaagattacccaacataccattatagtctcttctttctgagaaaatgtgaaaccagaattgcaagactgggtggactagaaagggagattagatcagttttctcttaatatgtcaaggaaggtagccgggcatggtgccaggcacctgtaggaaaatccagcaggtggaggttgcagtgagccaagattatgccattgcactccagcctgggtgacaaagcaagactccatctcaaaaaaaaaaaaaaatcaaggaaggataaaaggaagttcagtattgtaccacacttggaacttcctccatttcttccattttagaaggatatgaacctggaacttttgatgattctaagccttaaactatcaaaaagatcagggattgccaatgcttctaatggcactgcaagtatatgccataaccgttccctcctaaaagtgaaaaatgagagaaattcagtattttcccaggctcagcatccagaagtctagctctgggctggaagaaaagggtactaatatttagggaagagatgagaataagtagtgggtggcaggagagggctgagctagtgcctgctaacattttagttgtatcttggaaagatttagcaaaaataactcaccaggatagctgctgaagagttgatgaatgggagaagaaagatgtttgagaaataaagaaaacagcagcctgcaatacaataacttgcctttttaatagttttgattactcttgatacctacagcacaaatgctggacctgaatcagctcttcaaggaccctagcacaaatgtcaactgatcacctctgggagagtagaaaacttttttttttttgagacgaagtctcgctctgttgcccaggctggagtgcagtggcaccatctcagctcactgcagcgtccgcctcttgggttcaagtgattctcctgccttgtcctcctgagtcgctggtattacaggtgcctgccatcacacccagctaatttttggagttctgatagagacagggtttctccatgttggccaggcttgtctcaagctcctgacctcaagtgacctacccacccttggcctcccacagtgctggaagccactgcacctggctcagaatacttttttttttgagatgcagtcttgctctcatcacgcaggctggagtgcagtggcgtatctcggctcactgcgacctccacctcccgagttcaagcgattctccttcctcagtcccccaagtagcttggattataggtgtgcgccaccacgtacagctaatttttgtatttttagtagagatggggtttcgccatgttgaccaggctggtctcaaaacgcctgacctcaggtgatccacccacctcggccccacaaagtgctaggattacaggtgtgagccaccatgcccggcccagaatactttttaaaagaagagcaggttagaggaaagaaaaaaattgatgctgaatgtggtgatgaaagcatgtttctaaaatgggaagcagatgcttaaagaggaaagactaatctgggattttgccccatttctctggtttttcactcctatatttaattctcacaatcgtgtcgtcacatagtgcaaaaaacaaaattcttgtaaagtccccaggagtttatgcttgggtgaaagttttagcctgagtattttcttcctctaaaaaaggtgggaaatgagacattgaggaattaacatataaatgtctgctatgggtttaagagaactggcgtatttggaatgcttcttacactaacactgtctcattgtaaaatataaaaccccttactctaactacatttttattcctctggtagtgtggtatccaggcaacatatcacttctgctatgtaattctaagaattctcatttctagagtacctgagccaaacaaatacacaacggaagctgcagctgtatcatcactagcaatttgctcatcattatttactacctttgaacctaaggtttcctgcctatgcttttgaaagcaaaaatcagtctcctttgcatgaaaaagagccttagatttttaaacatgttagttaccagaatgctaaaataccagttgattacccaaattattttggaaatctatccataatggaagtctacaacaaacacataaaacagattacactaagagctgagaaattcaaaggaactgaagattctgagagataaactgttcaagtcttagcaatgatactgcacttctctttgacaggttctgggcttaagttagaggccctactggttccaaaccatattccactgactttgcaagtaaaataaatttgattctgaaataggaaacaaaaaaaggagaaataaccgaatagtagaagaaaaactgtttgtaggaagacgatgcagatggaatgatgtggacattgagtaaccatgtcaataaaatatataaaccaaacttaaatttgtgaaataaggaagttggtacctttgttgttacagtgtataaaaacaatttcggaactgctgttgcaaaaagacatatatagttttgcttccttctggtgttaagctgtttatatttcagtttcagttttaacttctaagttgccttgtaattgggactgtgtttcagcatcacaaaaaccaaatatttattatggatgcatctgtatcagcaattaaaaaataaacaagtaaaagtgatactgtaggagaagctgaagctca

SEQ ID NO: 8035 - protein, 373 aa, Homo sapiens
MSLLLLLLLVSYYVGTLGTHTEIKRVAEEKVTLPCHHQLGLPEKDTLDIEWLLTDNEGNQKVVITYSSRHVYNNLTEEQKGRVAFASNFLAGDASLQIEPLKPSDEGRYTCKVKNSGRYVWSHVILKVLVRPSKPKCELEGELTEGSDLTLQCESSSGTEPIVYYWQRIREKEGEDERLPPKSRIDYNHPGRVLLQNLTMSYSGLYQCTAGNEAGKESCVVRVTVQYVQSIGMVAGAVTGIVAGALLIFLLVWLLIRRKDKERYEEEERPNEIREDAEAPKARLVKPSSSSSGSRSSRSGSSSTRSTANSASRSQRTLSTDAAPQPGLATQAYSLVGPEVRGSEPKKVHHANLTKAETTPSMIPSQSRAFQTV

SEQ ID NO: 8036 - DNA, 4860 bp, Homo sapiens
ggtaggaggcaaccatgtggttccagctgaattttttttttccctctctctttcttcactcctttttctttccaaacagggaaaagtgttccacgaagcggtagcgccttttcgcctcgcgttttcctccctgaccctggtcccggctcccgtccgggcgccagctggtggggcgagcgccgggagcccatctgcccccaggggcacggggcgcggggccggctcccgcccggcacatggctgcagccacctcgcgcgcaccccgaggcgccgcgcccagctcgcccgaggtccgtcggaggcgcccggccgccccggagccaagcagcagctgagcggggaagcgcccgcgtccggggatcgggatgtccctcctccttctcctcttgctagtttcctactatgttggaaccttggggactcacactgagatcaagagagtggcagaggaaaaggtcactttgccctgccaccatcaactggggcttccagaaaaagacactctggatattgaatggctgctcaccgataatgaagggaaccaaaaagtggtgatcacttactccagtcgtcatgtctacaataacttgactgaggaacagaagggccgagtggcctttgcttccaatttcctggcaggagatgcctccttgcagattgaacctctgaagcccagtgatgagggccggtacacctgtaaggttaagaattcagggcgctacgtgtggagccatgtcatcttaaaagtcttagtgagaccatccaagcccaagtgtgagttggaaggagagctgacagaaggaagtgacctgactttgcagtgtgagtcatcctctggcacagagcccattgtgtattactggcagcgaatccgagagaaagagggagaggatgaacgtctgcctcccaaatctaggattgactacaaccaccctggacgagttctgctgcagaatcttaccatgtcctactctggactgtaccagtgcacagcaggcaacgaagctgggaaggaaagctgtgtggtgcgagtaactgtacagtatgtacaaagcatcggcatggttgcaggagcagtgacaggcatagtggctggagccctgctgattttcctcttggtgtggctgctaatccgaaggaaagacaaagaaagatatgaggaagaagagagacctaatgaaattcgagaagatgctgaagctccaaaagcccgtcttgtgaaacccagctcctcttcctcaggctctcggagctcacgctctggttcttcctccactcgctccacagcaaatagtgcctcacgcagccagcggacactgtcaactgacgcagcaccccagccagggctggccacccaggcatacagcctagtggggccagaggtgagaggttctgaaccaaagaaagtccaccatgctaatctgaccaaagcagaaaccacacccagcatgatccccagccagagcagagccttccaaacggtctgaattacaatggacttgactcccacgctttcctaggagtcagggtctttggactcttctcgtcattggagctcaagtcaccagccacacaaccagatgagaggtcatctaagtagcagtgagcattgcacggaacagattcagatgagcattttccttatacaataccaaacaagcaaaaggatgtaagctgattcatctgtaaaaaggcatcttattgtgcctttagaccagagtaagggaaagcaggagtccaaatctatttgttgaccaggacctgtggtgagaaggttggggaaaggtgaggtgaatatacctaaaacttttaatgtgggatattttgtatcagtgctttgattcacaattttcaagaggaaatgggatgctgtttgtaaattttctatgcatttctgcaaacttattggattattagttattcagacagtcaagcagaacccacagccttattacacctgtctacaccatgtactgagctaaccacttctaagaaactccaaaaaaggaaacatgtgtcttctattctgacttaacttcatttgtcataaggtttggatattaatttcaaggggagttgaaatagtgggagatggagaagagtgaatgagtttctcccactctatactaatctcactatttgtattgagcccaaaataactatgaaaggagacaaaaatttgtgacaaaggattgtgaagagctttccatcttcatgatgttatgaggattgttgacaaacattagaaatatataatggagcaattgtggatttcccctcaaatcagatgcctctaaggactttcctgctagatatttctggaaggagaaaatacaacatgtcatttatcaacgtccttagaaagaattcttctagagaaaaagggatctaggaatgctgaaagattacccaacataccattatagtctcttctttctgagaaaatgtgaaaccagaattgcaagactgggtggactagaaagggagattagatcagttttctcttaatatgtcaaggaaggtagccgggcatggtgccaggcacctgtaggaaaatccagcaggtggaggttgcagtgagccaagattatgccattgcactccagcctgggtgacaaagcaagactccatctcaaaaaaaaaaaaaaatcaaggaaggataaaaggaagttcagtattgtaccacacttggaacttcctccatttcttccattttagaaggatatgaacctggaacttttgatgattctaagccttaaactatcaaaaagatcagggattgccaatgcttctaatggcactgcaagtatatgccataaccgttccctcctaaaagtgaaaaatgagagaaattcagtattttcccaggctcagcatccagaagtctagctctgggctggaagaaaagggtactaatatttagggaagagatgagaataagtagtgggtggcaggagagggctgagctagtgcctgctaacattttagttgtatcttggaaagatttagcaaaaataactcaccaggatagctgctgaagagttgatgaatgggagaagaaagatgtttgagaaataaagaaaacagcagcctgcaatacaataacttgcctttttaatagttttgattactcttgatacctacagcacaaatgctggacctgaatcagctcttcaaggaccctagcacaaatgtcaactgatcacctctgggagagtagaaaacttttttttttttgagacgaagtctcgctctgttgcccaggctggagtgcagtggcaccatctcagctcactgcagcgtccgcctcttgggttcaagtgattctcctgccttgtcctcctgagtcgctggtattacaggtgcctgccatcacacccagctaatttttggagttctgatagagacagggtttctccatgttggccaggcttgtctcaagctcctgacctcaagtgacctacccacccttggcctcccacagtgctggaagccactgcacctggctcagaatacttttttttttgagatgcagtcttgctctcatcacgcaggctggagtgcagtggcgtatctcggctcactgcgacctccacctcccgagttcaagcgattctccttcctcagtcccccaagtagcttggattataggtgtgcgccaccacgtacagctaatttttgtatttttagtagagatggggtttcgccatgttgaccaggctggtctcaaaacgcctgacctcaggtgatccacccacctcggccccacaaagtgctaggattacaggtgtgagccaccatgcccggcccagaatactttttaaaagaagagcaggttagaggaaagaaaaaaattgatgctgaatgtggtgatgaaagcatgtttctaaaatgggaagcagatgcttaaagaggaaagactaatctgggattttgccccatttctctggtttttcactcctatatttaattctcacaatcgtgtcgtcacatagtgcaaaaaacaaaattcttgtaaagtccccaggagtttatgcttgggtgaaagttttagcctgagtattttcttcctctaaaaaaggtgggaaatgagacattgaggaattaacatataaatgtctgctatgggtttaagagaactggcgtatttggaatgcttcttacactaacactgtctcattgtaaaatataaaaccccttactctaactacatttttattcctctggtagtgtggtatccaggcaacatatcacttctgctatgtaattctaagaattctcatttctagagtacctgagccaaacaaatacacaacggaagctgcagctgtatcatcactagcaatttgctcatcattatttactacctttgaacctaaggtttcctgcctatgcttttgaaagcaaaaatcagtctcctttgcatgaaaaagagccttagatttttaaacatgttagttaccagaatgctaaaataccagttgattacccaaattattttggaaatctatccataatggaagtctacaacaaacacataaaacagattacactaagagctgagaaattcaaaggaactgaagattctgagagataaactgttcaagtcttagcaatgatactgcacttctctttgacaggttctgggcttaagttagaggccctactggttccaaaccatattccactgactttgcaagtaaaataaatttgattctgaaataggaaacaaaaaaaggagaaataaccgaatagtagaagaaaaactgtttgtaggaagacgatgcagatggaatgatgtggacattgagtaaccatgtcaataaaatatataaaccaaacttaaatttgtgaaataag

SEQ ID NO: 8037 - protein, 373 aa, Homo sapiens; identical to SEQ ID NO: 8035

SEQ ID NO: 8038 - DNA, 630 bp, Homo sapiens
aggcaaccatgtggttccagctgaattttttttttccctctctctttcttcactcctttttctttccaaacagggaaaagtgttccacgaagcggtagcgccttttcgcctcgcgttttcctccctgaccctggtcccggctcccgtccgggcgccagctggtggggcgagcgccgggagcccatctgcccccaggggcacggggcgcggggccggctcccgcccggcacatggctgcagccacctcgcgcgcaccccgaggcgccgcgcccagctcgcccgaggtccgtcggaggcgcccggccgccccggagccaagcagcagctgagcggggaagcgcccgcgtccggggatcgggatgtccctcctccttctcctcttgctagtttcctactatgttggaaccttggggactcacactgagatcaagagagtggcagaggaaaaggtcactttgccctgccaccatcaactggggcttccagaaaaagacactctggatattgaatggctgctcaccgataatgaagggaaccaaaaagtggttcttgcggtctttctgactagagctaatcttggacttccctctctgccctcgtagaatacattttgagcaagaatgctgctaa

SEQ ID NO: 8039 - protein, 80 aa, Homo sapiens
MSLLLLLLLVSYYVGTLGTHTEIKRVAEEKVTLPCHHQLGLPEKDTLDIEWLLTDNEGNQKVVLAVFLTRANLGLPSLPS

SEQ ID NO: 8040 - DNA, 604 bp, Homo sapiens
gtactggggcaaccccatagctgggggtcctatgggagagactgaggaacttcggtttgtggactctcagtcaactgtgttactgaggaggggaaaggaaagtagatgagttggtggtttgaacaagacccaaatcttgcttctacttataggtgctcacaatggccagtgccctggaaaagctctggaataaatacacctgggccttagaaagcagaggcaggagacaatgccatccagtgggagctttcatttgtttcctcagccagcctctgtgtcaggctttttgggaacaagggctggatgaacaagaccttgggagttcctgtggggagggactgggggtgaatgggcagtgtggctggcccggtgatcacttctcctctgcttgtctaggcttgaggatggattcttggctcctggtgcattgccactccctgccaccctcctccttgtcttctatcttctcctggtggcgtcaggccttgcttcgtgtcccaacaggagcctctggggctggcacagccctcactgcctacaacctgggcctggtggttctcctagggtgcctctgggaggtcatggtcaccccgctgctggctaa

SEQ ID NO: 8041 - protein, 146 aa, Homo sapiens
MASALEKLWNKYTWALESRGRRQCHPVGAFICFLSQPLCQAFWEQGLDEQDLGSSCGEGLGVNGQCGWPGDHFSSACLGLRMDSWLLVHCHSLPPSSLSSIFSWWRQALLRVPTGASGAGTALTAYNLGLVVLLGCLWEVMVTPLL

SEQ ID NO: 8042 - DNA, 4843 bp, Homo sapiens
tgagatcgtgtttcatttcaggaagatatatgcgtcaggaaaatttctatcttcttttgtattatcaaggagatatttggagcagagtcaaccctctcagttacataaaataaaaaatggcatattcttggcaaacggatccaaatcctaatgaatcacacgaaaagcagtatgaacaccaagaatttctctttgtaaatcaaccccattcttctagccaagtcagtctgggttttgatcagatagtagatgagatcagtggcaaaattccacactacgagagtgaaattgatgaaaacaccttttttgtgcccactgcaccaaaatgggactcaacagggcattcattaaatgaagcacaccaaatatccttgaatgaattcacttctaaaagccgtgaactctcctggcatcaagttagcaaagcaccagcaattggttttagtccttctgtgttaccaaaacctcaaaatacgaataaagaatgctcctggggaagccccataggaaaacatcatggtgctgatgattccagattcagtattttagctccatcattcacaagtttggataaaattaatctagagaaagaattagaaaatgaaaatcataactaccatataggatttgaaagtagcattcctccaacaaattcatccttctcaagtgacttcatgccgaaagaagagaataaaaggagtggacatgtgaacattgtggaaccatctttgatgcttttgaaaggctctcttcaacccggaatgtgggaaagtacatggcagaagaatatagagtcaataggttgttccattcagctagtggaagtacctcaaagcagcaatacgagtctggcctctttttgcaacaaagtaaaaaaaatcagagaaagatatcatgcagctgatgttaatttcaattctgggaagatctggagcactactacagcatttccgtatcagctcttttctaagaccaagtttaatatacatatttttattgataactcaacacaacctcttcattttatgccatgtgctaattatcttgtcaaagatctaattgcagaaattctgcatttttgcacaaatgaccagctactccccaaagatcatattctaagtgtatgtggctctgaagaatttttacaaaacgaccactgtttggggagccacaaaatgtttcaaaaagataaatctgttattcagctccacctgcagaaaagtagggaagctccaggaaagctatctcgaaagcatgaagaggaccacagtcagttttatctgaatcaacttctagaatttatgcatatttggaaagtatccagacaatgtctcttaacactcatcagaaaatatgacttccacctgaaatacctattgaaaacccaggaaaacgtgtataatattattgaagaagttaaaaaaatatgcagtgttctagggtgtgtggaaaccaaacaaattacagatgcagtaaatgaactaagtctaattcttcagagaaaaggagagaatttttatcaaagttcagagacttcagcaaaaggcttgatagagaaggtaacaactgaactatccacatccatctaccagctaatcaatgtctactgtaacagcttttatgcagattttcagcctgtaaatgtacctagatgcacttcctatctaaatcccgggcttccttcccacctcagcttcacagtgtatgcagcacacaacattccagaaacctgggtgcacaggatcaattttccccttgaaataaagtcacttccaagggaatccatgctcactgtaaaactgtttgggattgcctgtgcaaccaacaatgcaaatttactggcgtggacttgtcttccactgtttccaaaagaaaaatccattctcgggtctatgctgttcagcatgacattacagagtgagcctcccgtagaaatgataactccaggagtgtgggatgtaagtcagccatccccggtgaccctgcagattgattttccagctactgggtgggagtatatgaaacctgattctgaagagaatagaagtaatcttgaagagccactaaaggagtgtataaaacatattgccagactttcacagaaacagactcccctactactctctgaagaaaagaaaagatatttatggttttatcgcttctactgcaataatgaaaactgctcccttcctttagtcctgggtagtgcccctggatgggatgaaaggactgtttcagaaatgcataccattttgagaagatggacattttctcaacctttagaggctcttgggcttttgacttccagttttccagatcaagaaattcgtaaagtggcagttcaacaattagacaacctcttgaatgatgaactactggaatatctcccacagctagttcaggctgtcaagtttgaatggaaccttgagagtcctttagtgcaacttctactccaccgctccttgcagagcatccaggttgcccatcgtctttactggctgctaaaaaatgcagaaaatgaagcttattttaaaagctggtatcagaagctactagctgctctccaattctgtgcaggtaaagccttgaatgatgagttttccaaggagcagaaacttatcaaaattctgggagatattggggaaagagtcaagtctgccagtgaccatcaaagacaggaggtactgaagaaagaaattggcagactagaagagttctttcaagatgtaaatacttgtcatcttcctctgaaccctgccctatgtataaaagggattgatcacgatgcatgttcatattttacatctaatgctttgccattgaagattactttcatcaatgctaatccgatgggcaaaaacatcagcattatttttaaggctggagatgatcttcgtcaggatatgcttgttctgcagcttattcaagtgatggacaatatttggctgcaggaaggcttggatatgcaaatgatcatttatagatgtctatccacaggaaaagaccaaggattggtgcagatggtacctgatgctgtgaccctagcaaagattcatcgccattctggactgataggaccattgaaagaaaatacaattaaaaagtggttcagtcagcacaaccacttaaaggcagattatgaaaaggccttgaggaactttttctactcctgtgctggctggtgtgtggtaacattcatcctgggagtatgtgaccgtcacaatgataatatcatgctgacaaagtcgggccacatgtttcatattgactttggaaaattcttaggtcatgcacaaacatttggagggataaaaagggaccgagctcctttcatttttacttcagagatggaatactttattacagagggtgggaaaaacccacagcattttcaagattttgtggaactttgctgtcgtgcttataatattatcagaaagcacagccaactgctcttgaacctgctggaaatgatgctgtatgcaggactgcctgagctaagtggaattcaagacctgaaatatgtgtataataatcttcgtccacaagacacagacctggaagcaacaagtcattttaccaagaaaataaaggaaagtctggagtgtttccctgttaaattgaataacttgatccacacacttgcacaaatgtcagccataagccctgccaaatctacttcacagacttttcctcaggaatcctgtttgctgagtacaactaggtcgattgaaagagcaacaattttagggttcagcaagaaatccagtaatctgtatctgatccaggtgacacacagcaacaacgaaacaagcctgacagaaaaatcatttgagcagttttcaaaacttcacagccaacttcagaagcagtttgcatcactgactctcccagagtttcctcattggtggcacctaccttttacaaattcagatcacagaagattcagagatctaaatcattacatggaacagatattaaatgtatcacatgaagttacaaacagtgattgtgtacttagctttttcctctctgaggctgtgcaacaaacagttgaagaatcatcacctgtgtacctaggtgagaagtttccagacaagaagcctaaggtgcagttagtcatatcctacgaggatgtgaagctgaccatactagtgaaacacatgaaaaacattcatctcccagatggctctgcgcccagtgcacatgttgaattttatcttttaccatatcccagtgaagttcgtaggaggaaaacaaaatctgttccaaaatgtacggaccccacttacaatgaaattgtagtatatgatgaagtcacagagctccaaggacatgtcttaatgcttattgtgaagagtaaaactgtatttgtgggagcaattaacatccgactctgtagtgtcccactcgataaagaaaaatggtatccattaggaaacagtataatttgaccattgctatgaacatatgcattattcattaactacttgtatttttttcacttctgggcctctgaatcacataagtaaggcatctttgttgtcaaagacagcacagggtattaaggacacagaaaaaaaatcagaattagtcttttgtgttgtttattttctacctgtgctttcattgttttttcataatcttttctccttcagtggagtactgattgcatgaaatttgatgtgtaaaataataaaagacctttattaaatcattttaatatattttaaattaaacataggtttacatttgttttaattgtgtgcctacagttaaaagcagtatttttaatgtattttataagaaagacaatcaaataaacctcatcaattaattcaag

SEQ ID NO: 8043 - protein, 1445 aa, Homo sapiens
MAYSWQTDPNPNESHEKQYEHQEFLFVNQPHSSSQVSLGFDQIVDEISGKIPHYESEIDENTFFVPTAPKWDSTGHSLNEAHQISLNEFTSKSRELSWHQVSKAPAIGFSPSVLPKPQNTNKECSWGSPIGKHHGADDSRFSILAPSFTSLDKINLEKELENENHNYHIGFESSIPPTNSSFSSDFMPKEENKRSGHVNIVEPSLMLLKGSLQPGMWESTWQKNIESIGCSIQLVEVPQSSNTSLASFCNKVKKIRERYHAADVNFNSGKIWSTTTAFPYQLFSKTKFNIHIFIDNSTQPLHFMPCANYLVKDLIAEILHFCTNDQLLPKDHILSVCGSEEFLQNDHCLGSHKMFQKDKSVIQLHLQKSREAPGKLSRKHEEDHSQFYLNQLLEFMHIWKVSRQCLLTLIRKYDFHLKYLLKTQENVYNIIEEVKKICSVLGCVETKQITDAVNELSLILQRKGENFYQSSETSAKGLIEKVTTELSTSIYQLINVYCNSFYADFQPVNVPRCTSYLNPGLPSHLSFTVYAAHNIPETWVHRINFPLEIKSLPRESMLTVKLFGIACATNNANLLAWTCLPLFPKEKSILGSMLFSMTLQSEPPVEMITPGVWDVSQPSPVTLQIDFPATGWEYMKPDSEENRSNLEEPLKECIKHIARLSQKQTPLLLSEEKKRYLWFYRFYCNNENCSLPLVLGSAPGWDERTVSEMHTILRRWTFSQPLEALGLLTSSFPDQEIRKVAVQQLDNLLNDELLEYLPQLVQAVKFEWNLESPLVQLLLHRSLQSIQVAHRLYWLLKNAENEAYFKSWYQKLLAALQFCAGKALNDEFSKEQKLIKILGDIGERVKSASDHQRQEVLKKEIGRLEEFFQDVNTCHLPLNPALCIKGIDHDACSYFTSNALPLKITFINANPMGKNISIIFKAGDDLRQDMLVLQLIQVMDNIWLQEGLDMQMIIYRCLSTGKDQGLVQMVPDAVTLAKIHRHSGLIGPLKENTIKKWFSQHNHLKADYEKALRNFFYSCAGWCVVTFILGVCDRHNDNIMLTKSGHMFHIDFGKFLGHAQTFGGIKRDRAPFIFTSEMEYFITEGGKNPQHFQDFVELCCRAYNIIRKHSQLLLNLLEMMLYAGLPELSGIQDLKYVYNNLRPQDTDLEATSHFTKKIKESLECFPVKLNNLIHTLAQMSAISPAKSTSQTFPQESCLLSTTRSIERATILGFSKKSSNLYLIQVTHSNNETSLTEKSFEQFSKLHSQLQKQFASLTLPEFPHWWHLPFTNSDHRRFRDLNHYMEQILNVSHEVTNSDCVLSFFLSEAVQQTVEESSPVYLGEKFPDKKPKVQLVISYEDVKLTILVKHMKNIHLPDGSAPSAHVEFYLLPYPSEVRRRKTKSVPKCTDPTYNEIVVYDEVTELQGHVLMLIVKSKTVFVGAINIRLCSVPLDKEKWYPLGNSII

SEQ ID NO: 8044 - DNA, 307 bp, Homo sapiens
atcaattttccccttgaaataaagtcacttccaagggaatccatgctcactgtaaaactgtttgggattgcctgtgcaaccaacaatgcaaatttactggcgtggacttgtcttccactgtttccaaaagagagcagctatacaagtgtctttccttctcatgagtgagtttccttaaagttttacctgcagtatttgtaagatctaccattttttgtagaatatttctagctagtcactgaaaataaaaaaaggttaagtccattttactctcccatcatgtaacacactacttgcacatatcaat

SEQ ID NO: 8045 - protein, 41 aa, Homo sapiens
MLTVKLFGIACATNNANLLAWTCLPLFPKESSYTSVFPSHE

SEQ ID NO: 8046 - DNA, 704 bp, Homo sapiens
aaacatggagacagcgggctctggtactgggcagccggcctctctgctggaggctcccgggtccacggatgaccggcttttcctggttaaaggtggaattttccttggtactgttgctgcagcaggaacgctagctggatttattacaacattatcattggctaaaaagaaaagccctgaatggttcaataagggaagtatggtcacgactgcattaccggaaagcgggtcttcccttgccttgcgagctctgggctgcggctcactgtatgcatggtgtggggttggtgtgattagcttctcagtctggaaagctttaggggttcacagtgacatgtaagagatatcctcattttaattgaaggctacatcaccaactttctacccgagaagtcgtttttcttcgggacccacaatcaaaggctttcctccggcatgagaaaggagtaacattcccgcctggtgagtttttagtgctggagtgactcccagccggcccctaccccgctcaagctcctgctgactgtcccagtgtgggtcctggccaagactggcaccaaggcagtgggatcctttataagtaggcctccagcgccatacaccagaaagcaggagcccacttctgggacactgggagagggtgcaggcagccaccagtacgcaaagcacagtgccctatccttcccggcagggtcacagttcag

SEQ ID NO: 8047 - protein, 111 aa, Homo sapiens; identical to SEQ ID NO: 895

SEQ ID NO: 8048 - DNA, 2729 bp, Homo sapiens
ctcttcacctccgtgagcaagatggcgactgtgaagagtgagcttattgagtgcttcacttccgaggagccctttcatcacagaaaggtctccatcacaggaactggatcagtgggcatggcctgcgctaccagcatcttattaaaaggcttgagtgatgaacttgcctttgtggatcttgatgaaggcaaactgaaaggtgagacaatggatcttcaacatgacagccctttcatgaaaatgtcaaatattgtttgtagcaaagattaccttgtcacagcaaacccccatctagtgattatcacagcaggtgcacgccgagaaaagggagaaatgcgctttaatttagtccggcaaaatgtggccatcttcaagttaatgatttccagtattgtccagcagagccccctctgcaaactaattattgtttccaatccagtagatatcttaacttacgtagcctggaagttgagtgcatttcccaaaaaccgtgttattggaagcggctgtaatctggatactgttcgttttcaattcttcattggacaaaagcttggtatccactctgaaagctgccgtggatggatcctcggagagcatggagactcaagtgttcctgtgtggagtggaatgaacatagctggtgtccttttgaaggatctgaactctgatataggaactgataaagatcctgagaaatggaaaaatgtccacaaagaagtgattgctagtgcctatgagattattgaaatgaaaagttctacttcgtgggccattggcctatctggagctgatttaacagaaagtattttgaagaatcttaggagaaaacatccagtttccaccataattaagggcctctacggaataaatgaagaagtcttcctcagtattccttctttggagagaagggtattaccaaccttataaagagaaagctgacccctgaagaggaggcccatctgaaaaagatgactttcctttttatttagtcttccagctcttttatttagcatccaggtgctggatgatacttatttacaattcctaaagaaagtgtttttggtaatgctgatatagcagtacttaccttgttatatatatgtagttggcatttggttcctaaaaagtaggatgtaggtatttactgtgtttgagaaattctgattcttttcactagatatatgctatttattcttgctggcttatacctatgttcatttatatgctgtaaaaaagtggtaatttacaatgtaaaaataaaagtatgcatatacaaaatttctcttttttctaacttgctcttcagacttaatgctcagtattaccttcctcactatgagtttgtctcccctagaagatagtctatgtattccatttggctgtggatctgattctgcttggggcatgtatttctcttgaatacttgaataccatgggacccacccatgttttctgggactcaggcataaggcaatcacctcaattttctatgtccatgtaatgactcttgtgctggtgttatctaacatgttaactagattgtagttgtagttctctgcatgtaaggatcaatgcttttttttctgctgattccccaacaaccttatataatgttgagttcctataagatgcttagaaactagttgttaatttgtacattcccactttttggatctttaccaagcttatcttttgttggaggattttgtaaaaacaaaaaggggaagagtagacactgctgaaggaaagaacttaaaagtcaggaactgccttggtttccccttttattttcttcctcttgcttttgttatctcctctttctaatatagcaatatgagtgtatggctaccacatatatttgtttaaatttaacttaaaatatccattctagataatctgcctttagcccttttctatcagggtactatattttatcattaattaattccttataattaacttcatttatttcttattaatctcataatggacaaggagtaccagtgcctggttgaataaagaggggaatcactttgttgtcagaacagaaactcattcaaaccagctcaggtcagaaacaaaaagtggggaatgtattgaatgtctgatggtatctctaataactgtagagtaataattatagagatctgtcatttggtactggatccaggacccagaaaatttgaatccaaggttatttgctttgtttttttcagaagagttgatctcttggctctgctcctattggtacatcaactttatttttcctgggtcttactgtagattatcttactgtgctccggcccgcacatgttggtcccagcctctgcgtttccagatctcctaactcaaacactcatcagaaattaagtgcagtctagtttctgtgttccaattctaaattccaagaagagattctgattgtccagctttgctaagatacagaccccccatcctgtcagcaggggttagggtgtagaagagtcatgtcctacaaacatgggtacaaatatgggcatcagcacgggggaggtgcttacccctgaaagtccctaagtgttggcgtgaacagtttcgcaatatatactggctgattttactatggcaggctcacaaagtttatacagaatagacctttccaatctccttgatttctttgttttgaaatgtggctgatgtctgaatacagtatccaacaaaataattaaagtgctgtttggagattt

SEQ ID NO: 8049 - protein, 59 aa, Homo sapiens [sequence omitted]

SEQ ID NO: 8050 - DNA, 532 bp, Homo sapiens
ctgatgagtgtttgagttaggagatctggaaacgcagaggctgggaccaacatgtgcgggccggagcacacatataaatgaacataggtataagccagcaagaataaatagcatatatctagtgaaaagaatcagaatttctcaaacacagtaaatacctacatcctactttttaggaaccaaatgccaactacatatatataacaagtgtttttgcactctttttcagatgggcctcctcttcaggggtcagctttctctttataaggttggtaatacccttctctccaaagaaggaatactgaggaagacttcttcatttattccgtagaggcccttaattatggtggaaactggatgttttctcctaagattcttcaaaatactttctgttaaatcagctccagataggccaatggcccacgaagtagaacttttcatttcaataatctcataggcactagcaatcacttctttgtggacatttttccatttctcaggatctttatcagttcctatatcagagttcaga

SEQ ID NO: 8051 - protein, 37 aa, Homo sapiens
MVETGCFLLRFFKILSVKSAPDRPMAHEVELFISIIS

SEQ ID NO: 8052 - DNA, 1062 bp, Homo sapiens
gctttccgcgctacctgcagaggggtccatacggcgctgttctggattcccgttgtaacttaaagggaaactttcacaatgtccggagcccttgatgtcctgcaaatgagggaggaggatgtccttaagttccttgcagcaggaacccacttaggtggcaccaatcttgacttccagatggaacagtacatctatgaaaggaaaagtgatggcatctatatcataaatctgaagaggacctgggagaagcttctgctggcagctcatgctattgttgccattgaaaaccctgctgatgtcagtgttatatcctccaggaatactggccagacggctgtgctgaagtttgctgctgccactggagccactccaattgctgggcgcttcactcctggaaccttcactaaccagatccaggcagccttccgggagccacggcttcttgtggttactgaccccagggctgaccaccagcctctcacggaggcatcttatgttaacctacctaccattgcgctgtgtaacacagattctcctctgcgctatgtggacattgccatcccatgcaacaacaagggagcttactcagtgggtttgatgtggtggatgctggctcgggaagttctgtgcatgcttggcaccatttcctgtgaacacccatgggaggtcatgcctgatctgtacttctacagagatcctgaagagattgaaaaagaagagcaggctgctgctgaaaaggcagtgaccaaggaggaatttcagggtgaatggactgctccagctcctgagttcactgctattcagcctgaggttgcagactggtctgaaggtgtacaggtgccctctgtgcctattcagcaattccctactgaagactggagctctcagcctgccatggaagactggtctgcagctcccactgctcaggccactgaatgggtaggagcaaccactgactggtcttaagctgttcttgcataggctcttaagcagcatggaaaaatggttgatggaaaataagcatcagtttctaaaaaaaaaaaaagaataatttgacttctt

SEQ ID NO: 8053 - protein, 295 aa, Homo sapiens [sequence omitted]

SEQ ID NO: 8054 - DNA, 2107 bp, Homo sapiens
gcgaggctgaacgcctgacgtcaaggcgacatcgccaaacctcgcccagattcaggcgtgtaaaccagccggagcggcgcggcagcggcaggaccgccgtggcgcctagagtagcgacccggggggagcgcggggcgacgctggctgcagggacccggtgacagcgtgagaggtactaggttttgacaagcttgcatcatgcgtgagtataagctagtcgttcttggctcaggaggcgttggaaagtctgctttgactgtacaatttgttcaaggaatttttgtagaaaaatacgatcctacgatagaagattcttatagaaagcaagttgaagtagatgcacaacagtgtatgcttgaaatcttggatactgcaggaacggagcaatttacagcaatgagggatttatacatgaaaaatggacaaggatttgcattagtttattccatcacagcacagtccacatttaacgatttacaagacctgagagaacagattcttcgagttaaagacactgatgatgttccaatgattcttgttggtaataagtgtgacttggaagatgaaagagttgtagggaaggaacaaggtcaaaatctagcaagacaatggaacaactgtgcattcttagaatcttctgcaaaatcaaaaataaatgttaatgagatcttttatgacctagtgcggcaaattaacagaaaaactccagtgcctgggaaggctcgcaaaaagtcatcatgtcagctgctttaatatactaaatgcattgtagctctgagccaggtctgaagaactgttgcccaattcaacagtgccagcattccaactttgttaaacctaccaacatcttaaatggactttcctgtggtggtaccctttaagaggcggatgaaagctactatatcagtttgcacattctaatcactttccagtatcacaagagagatttttacttatataatagtcctagagtttgcagctggtaaaaccagaggctacatccagtattactgctaagagacattcttcatccaccaatgttgtacatgtatgaaaatggtgtactgtatactttaacatgccccatactttgtattggagagtacaataatgtaaatcctaaaagcaccactattttagcataataaaagaaagtccaaagagctcctatatagactactccagataacttcgcttctttgatacttgtagcttattgtaattttttttaagaaattcaaggtcattattattgtacaaaataagcgctttgattaacacagctatatagtttttttaatttttaaaaaacctgtggagacggtgatcttgtctttaaaacatgatagtcctttcagtataatgtcttagattaaagacgttgcctttaatatctgttgggaaggaaatgtccagacttttcaaatctcttattatatgtttcctttttttgtttacatagggaacaatgtttatagtcgtgtgtacagtgggggtctacaacaagaagtgtatattttcaaacaattttttaatgatttaacaatttttgtaaatcattttcaggcttctgcagctgtagattctcactgtgaatcccttgcttgctcatgcataagtgtatttgcaataccaaatatacaggtttagtatttttgcctgttagtgattgtttcacatgtgtaacgttttggttgagatgttaaatggtggacgagtactgtggatgtgaatgtgggaagtaattttaatcatatgtaattggtcacaaggcctaatttgcagtaactattgctgttttatttaacaatgccttgttgctttgtatgcattaatgtttggatgtaaagattgtgtgtctatccaacagggagccacagtatttaaattgaccaacctaatgttacaactactttgaggtggccaaatgtaaactaaaagccttaattaaagtggtgcaattttgtataacttagcatcagtagttcaataaatttggattgccatgcaagggcttgcattataattacttgccacttgaatgtgttttgtgtaatgttttaacagtgctagtaaataaatacgggtttaccctggttttaattgt

SEQ ID NO: 8055 - protein, 184 aa, Homo sapiens; identical to SEQ ID NO: 900

SEQ ID NO: 8056 - DNA, 582 bp, Homo sapiens
gacatcgccaaacctcgcccagattcaggcgtgtaaaccagccggagcggcgcggcagcggcaggaccgccgtggcgcctagagtagcgacccggggggagcgcggggcgacgctggctgcagggacccggtgacagcgtgagaggtactaggttttgacaagcttgcatcatgcgtgagtataagctagtcgttcttggctcaggaggcgttggaaagtctgctttggtaagtcattcttactttacctaagcctttcactccaagacgttctttttctgttgagttttaggttttgatgatttgtctttgttaagataaaattccttaatgactttagaagcaatataatatttttcttgtaattttattcaacttttaattatatctgggtggatcatattctctctggaacattgactccagaatgacacgagttatgctggaatacaatttgagctaagcacagagattgagagcgtacaaatacatgtctttttgcattcgcatttcagagccagataggaataaattttggtctttttatttatttatttttttgaaacagggtctcactctgtt

SEQ ID NO: 8057 - protein, 43 aa, Homo sapiens
HRQTSPRFRRVNQPERRGSGRTAVAPRVATRGERGATLAAGTR

SEQ ID NO: 8058 - DNA, 1942 bp, Homo sapiens
gacatcgccaaacctcgcccagattcaggcgtgtaaaccagccggagcggcgcggcagcggcaggaccgccgtggcgcctagagtagcgacccggggggagcgcggggcgacgctggctgcagggacccggtgacagcgtgagaggtactaggttttgacaagcttgcatcatgcgtgagtataagctagtcgttcttggctcaggaggcgttggaaagtctgctttgactgtacaatttgttcaaggaatttttgtagaaaaatacgatcctacgatagaagattcttatagaaagcaagttgaagtagatgcacaacagtgtatgcttgaaatcttggatactgcaggaacggagcaatttacagcaatgagggatttatacatgaaaaatggacaaggatttgcattagtttattccatcacagcacagtccacatttaacgatttacaagacctgagagaacagattcttcgagttaaagacactgatgatgttccaatgattcttgttggtaataagtgtgacttggaagatgaaagagttgtagggaaggaacaaggtcaaaatctagcaagacaatggaacaactgtgcattcttagaatcttctgcaaaatcaaaaataaatgttaatgagatcttttatgacctagtgcggcaaattaacagaaaaactccagtgcctgggaaggctcgcaaaaagtcatcatgtcagctgctttaatatactaaatgcattgtagctctgagccaggtctgaagaactgttgcccaattcaacagtgccagcattccaactttgttaaacctaccaacatcttaaatggactttcctgtggtggtaccctttaagaggcggatgaaagctactatatcagtttgcacattctaatcactttccagtatcacaagagagatttttacttatataatagtcctagagtttgcagctggtaaaaccagaggctacatccagtattactgctaagagacattcttcatccaccaatgttgtacatgtatgaaaatggtgtactgtatactttaacatgccccatactttgtattggagagtacaataatgtaaatcctaaaagcaccactattttagcataataaaagaaagtccaaagagctcctatatagactactccagataacttcgcttctttgatacttgtagcttattgtaattttttttaagaaattcaaggtcattattattgtacaaaataagcgctttgattaacacagctatatagtttttttaatttttaaaaaacctgtggagacggtgatcttgtctttaaaacatgatagtcctttcagtataatgtcttagattaaagacgttgcctttaatatctgttgggaaggaaatgtccagacttttcaaatctcttattatatgtttcctttttttgtttacatagggaacaatgtttatagtcgtgtgtacagtgggggtctacaacaagaagtgtatattttcaaacaattttttaatgatttaacaatttttgtaaatcattttcaggcttctgcagctgtagattctcactgtgaatcccttgcttgctcatgcataagtgtatttgcaataccaaatatacaggtttagtatttttgcctgttagtgattgtttcacatgtgtaacgttttggttgagatgttaaatggtggacgagtactgtggatgtgaatgtgggaagtaattttaatcatatgtaattggtcacaaggcctaatttgcagtaactattgctgttttatttaacaatgccttgttgctttgtatgcattaatgtttggatgtaaagattgtgtgtctatccaacagggagccacagtatttaaattgaccaacctaatgttacaactactttgaggtggccaaatgtaaactaaaagccttaattaaagtggtgcaattttgtat

SEQ ID NO: 8059 - protein, 184 aa, Homo sapiens; identical to SEQ ID NO: 900

SEQ ID NO: 8060 - DNA, 2013 bp, Homo sapiens
gacatcgccaaacctcgcccagattcaggcgtgtaaaccagccggagcggcgcggcagcggcaggaccgccgtggcgcctagagtagcgacccggggggagcgcggggcgacgctggctgcagggacccggtgacagcgtgagaggtactaggttttgacaagcttgcatcatgcgtgagtataagctagtcgttcttggctcaggaggcgttggaaagtctgctttgactgtacaatttgttcaaggaatttttgtagaaaaatacgatcctacgatagaagattcttatagaaagcaagttgaagtagatgcacaacagtgtatgcttgaaatcttggatactgcaggaacggagcaatttacagcaatgagggatttatacatgaaaaatggacaaggatttgcattagtttattccatcacagcacagtccacatttaacgatttacaagacctgagagaacagattcttcgagttaaagacactgatgatgttccaatgattcttgttggtaataagtgtgacttggaagatgaaagagttgtagggaaggaacaaggtcaaaatctagcaagacaatggaacaactgtgcattcttagaatcttctgcaaaatcaaaaataaatgttaatgagatcttttatgacctagtgcggcaaattaacagaaaaactccagtgcctgggaaggctcgcaaaaagtcatcatgtcagctgctttaatatactaaatgcattgtagctctgagccaggtctgaagaactgttgcccaattcaacagtgccagcattccaactttgttaaacctaccaacatcttaaatggactttcctgtggtggtaccctttaagaggcggatgaaagctactatatcagtttgcacattctaatcactttccagtatcacaagagagatttttacttatataatagtcctagagtttgcagctggtaaaaccagaggctacatccagtattactgctaagagacattcttcatccaccaatgttgtacatgtatgaaaatggtgtactgtatactttaacatgccccatactttgtattggagagtacaataatgtaaatcctaaaagcaccactattttagcataataaaagaaagtccaaagagctcctatatagactactccagataacttcgcttctttgatacttgtagcttattgtaattttttttaagaaattcaaggtcattattattgtacaaaataagcgctttgattaacacagctatatagtttttttaatttttaaaaaacctgtggagacggtgatcttgtctttaaaacatgatagtcctttcagtataatgtcttagattaaagacgttgcctttaatatctgttgggaaggaaatgtccagacttttcaaatctcttattatatgtttcctttttttgtttacatagggaacaatgtttatagtcgtgtgtacagtgggggtctacaacaagaagtgtatattttcaaacaattttttaatgatttaacaatttttgtaaatcattttcaggcttctgcagctgtagattctcactgtgaatcccttgcttgctcatgcataagtgtatttgcaataccaaatatacaggtttagtatttttgcctgttagtgattgtttcacatgtgtaacgttttggttgagatgttaaatggtggacgagtactgtggatgtgaatgtgggaagtaattttaatcatatgtaattggtcacaaggcctaatttgcagtaactattgctgttttatttaacaatgccttgttgctttgtatgcattaatgtttggatgtaaagattgtgtgtctatccaacagggagccacagtatttaaattgaccaacctaatgttacaactactttgaggtggccaaatgtaaactaaaagccttaattaaagtggtgcaattttgtataacttagcatcagtagttcaataaatttggattgccatgcaagggcttgcattataattacttgccacttg

SEQ ID NO: 8061 - protein, 184 aa, Homo sapiens; identical to SEQ ID NO: 900

SEQ ID NO: 8062 - DNA, 2276 bp, Homo sapiens
gacatcgccaaacctcgcccagattcaggcgtgtaaaccagccggagcggcgcggcagcggcaggaccgccgtggcgcctagagtagcgacccggggggagcgcggggcgacgctggctgcagggacccggtgacagcgtgagaggtactaggttttgacaagcttgcatcatgcgtgagtataagctagtcgttcttggctcaggaggcgttggaaagtctgctttgactgtacaatttgttcaaggaatttttgtagaaaaatacgatcctacgatagaagattcttatagaaagcaagttgaagtagatgcacaacagtgtatgcttgaaatcttggatactgcaggaacggagcaatttacagcaatgagggatttatacatgaaaaatggacaaggatttgcattagtttattccatcacagcacagtccacatttaacgatttacaagacctgagagaacagattcttcgagttaaagacactgatgatgttccaatgattcttgttggtaataagtgtgacttggaagatgaaagagttgtagggaaggaacaaggtcaaaatctagcaagacaatggaacaactgtgcattcttagaatcttctgcaaaatcaaaaataaatgttaatgagatcttttatgacctagtgcggcaaattaacagaaaaactccagtgcctgggaaggctcgcaaaaagtcatcatgtcagctgctttaatatactaaatgcattgtagctctgagccaggtctgaagaactgttgcccaattcaacagtgccagcattccaactttgttaaacctaccaacatcttaaatggactttcctgtggtggtaccctttaagaggcggatgaaagctactatatcagtttgcacattctaatcactttccagtatcacaagagagatttttacttatataatagtcctagagtttgcagctggtaaaaccagaggctacatccagtattactgctaagagacattcttcatccaccaatgttgtacatgtatgaaaatggtgtactgtatactttaacatgccccatactttgtattggagagtacaataatgtaaatcctaaaagcaccactattttagcataataaaagaaagtccaaagagctcctatatagactactccagataacttcgcttctttgatacttgtagcttattgtaattttttttaagaaattcaaggtcattattattgtacaaaataagcgctttgattaacacagctatatagtttttttaatttttaaaaaacctgtggagacggtgatcttgtctttaaaacatgatagtcctttcagtataatgtcttagattaaagacgttgcctttaatatctgttgggaaggaaatgtccagacttttcaaatctcttattatatgtttcctttttttgtttacatagggaacaatgtttatagtcgtgtgtacagtgggggtctacaacaagaagtgtatattttcaaacaattttttaatgatttaacaatttttgtaaatcattttcaggcttctgcagctgtagattctcactgtgaatcccttgcttgctcatgcataagtgtatttgcaataccaaatatacaggtttagtatttttgcctgttagtgattgtttcacatgtgtaacgttttggttgagatgttaaatggtggacgagtactgtggatgtgaatgtgggaagtaattttaatcatatgtaattggtcacaaggcctaatttgcagtaactattgctgttttatttaacaatgccttgttgctttgtatgcattaatgtttggatgtaaagattgtgtgtctatccaacagggagccacagtatttaaattgaccaacctaatgttacaactactttgaggtggccaaatgtaaactaaaagccttaattaaagtggtgcaattttgtataacttagcatcagtagttcaataaatttggattgccatgcaagggcttgcattataattacttgccacttgaatgtgttttgtgtaatgttttaacagtgctagtaaataaatacgggtttaccctggttttaattgtaataggtgcattttacacagcatggtttcataatttaacatctgggcaagccagactcattaattacaggaataaggaagtagcgagttttctggtattgtttgaatatccacataaccaccttttgaacttttccttgagaaataattttgtaaatcaagcagtattacttacgaataaatgcctttgggtaatg

SEQ ID NO: 8063 - protein, 184 aa, Homo sapiens; identical to SEQ ID NO: 900

SEQ ID NO: 8064 - DNA, 1275 bp, Homo sapiens
taaaccagccggagcggcgcggcagcggcaggaccgccgtggcgcctagagtaccccctcgcttgtcgcctgggttccctccgtggtatgggtggaagttagaacggaaaccagaaagttgtcctttgcgaagacctagcttctcccagccccgagctagggcgaggagccttcgggggaaaccactcccaggcgccccgcgggcttgagcctgacagcgaaaaagtttgcctgaaacggggcttgcttgctccatttgttgcgggaagtggcaggaggaaggcagcggagagagccccacttagtctggcagcagccaccgtgtagagaaaaactgttaaaggggcctttcccttcgtcagcaagaggaaatctctttctcttagagggagagaaaatccaggaagtttgtcctcttctctttttcgccatctcgaggtgtctaatcctaaaactatcagcgccatgaattttatttaaaactacgcccagtgaaccgggctctccggatttttcttctgaaaaacactgatgtcttttggagaaaagatcatttttgcaagttaaagcagatggtttccttccccttcgctttcccccctctcccactctctttaatagtttagaaaaacattttggccctgtaacttctgattggtatgaatagaagcagttctgtgttgcagtaaggggaaatcacatttttacggggtagaaagttgacactaaatgaagattgtgattttagtattttaaaattaattccgtctaattggattttggttttgcaggcagcatctcatatatgtcgagtacttaacaatttaaagctctgacttgtaaatttatttttcagctctcttttttcgtaattagaatactgtttggacttgctcaacaagaccttatcttaacaaaaagtaacttatagaaaagggagacattcatttaacttcaagcccatattattcttaaaagctgactcttgaaatagtatttattgagtcatagtggagtcatgggactttttaagggccggaagggactatttagatcatccagtcccaccctgtcattttatggaggaggaaactgaggcctagataagataaccagttagtgggtccactgacctttaggacagtagtctatccgtaagagacaacatggagaaagaaatacaacgtttttatagtgaattatcatcttacaaagaatattcttcccatatcgcacttttaaaaagtgggtaccttagtcaaataggagaaaaaa

SEQ ID NO: 8065 - protein, 35 aa, Homo sapiens
MEKEIQRFYSELSSYKEYSSHIALLKSGYLSQIGE

SEQ ID NO: 8066 - DNA, 1938 bp, Homo sapiens
tggtctcaaactcctggcctcaaaagtgatcctcctgccttggcctcccaaagtgttgggatttcaggaatgagtcaccactgtctggcccattttcattttctataaagcaaggctatctaccaaaacttaggtctgttttttcagtatactggggagtctctctaaagataaattaacataccctgtacatctatctatatgataaaagacgcttttagttaggtattatgtttctgttagatgtagtttggctggtatgggtcacattccagcatgacgtgaagtaaggagctacacatggggtatttcgaaaagtgggtaaaacaaaagtcacgctgggaataacgagaggtgaagtttcaaggtcaggtcaaatttaaatgtgaaggcccagaagcccgggagacctaatcaattttaaagtagtggttggctaccaaaccatttatactcctaacactattattagtaaaatctctcattctagtagggattgggtatatttgtgtgttttaaaaaacaccctgctgcagcctattaagccaactgagttcctttcctcatgggggggcccagtgtgcaatggctgcaaacagcagcttccttggtagtgtatgcagcctgtgtgttgtattgtatgggttgctctaagggaccctggagacagtcctttcagatggatgttcatgtttctgaccttgcactaccccagtgtaggttccaaacaggcatgcgaggtgcctttgggaagccccagggcactgtggccagggttcacactggccaagttatcatctccattcacaccaagctgcagaacaaggagcatgtgattgaggccctgcgcagggccaagttcaagttttctggccgccagaagatccacatctcaaagaagtggggcttcaccaagttcaatgccaatgagtttgaagacatggtgactgagaagcggctcatcccagatggctgtcgggtcaagtacatttccaatcgtggccctgtggacaagtggcgggccctgcactcatgagggcttccactgtgctgccccctcttaatactcaccaataaattctacttcctgtccacccaaaacaaacaaacaaacaaacaacaaaaaaaaaacaccctggaaaattctgatactaccttccctcttccttaagacctttacccgagaccagaaatattaggggctgtctactaggaccattttattcatctttttgcctataaaataaatttccccaatttaatacagaaaagggtgtctgctattcctcagatctccagaaatcagattattaatactttaaataagctactcaaatgccttaacttccacaagtcacagattaaaaatgagacactacctccaaagggatgactgagactggggggaaagaggttatccaagatggttctctatgtccaaaatttaaagataccatcaaaaacgccctataatatttgctgaacaggttgcaaagtaactacaaccaccacagaaatatccctattagttagggaaaataactactttcacatatttcaagcaaatactatactacatgcagtttataagctgttgggttagaggtataagaaattggaagtgaggaactttagtgttagtagataaatcaaggtaagaactccagaacaaagcatacccattttcatgaatggaagaatgccataaatatcttctcaatataaatgcttaagtggggtggtgcttttgcaaaccaccaccctccacaaggatgggtgaagcttttttaaaacatgattttacagtctgtttcaacacaaggccgaatatagaaataaacagaattagtgtcttccatgagaggagaaacaaatggctcagaaaaatattttatttcattttgctgttaacctcataaccaggatcaggtgacaagc

SEQ ID NO: 8067 - protein, 156 aa, Homo sapiens [sequence omitted]

SEQ ID NO: 8068 - DNA, 3135 bp, Homo sapiens
agagcttagcaaagcctcacaagcaaatagattgaccttctgtctcactcataagataaaccatcttggccacttagaaaggccacctagctgagaagtgtcatgcttggaacaaactgagaagtacatacaatgtgaaatgaactgctttttcatttgtatccaaagtgatggggaggtcagttgatcctgcatgtatgtgtgtatacataacaattagtcaatttctaatttaaaaatcaaatttaagctcttaagactgaaacaattgctgggattacaggcgtgaccaccactcccagccaaccccgtccctaatttaaaacacacacacacacacacacacacacacacacacacacacacacacacgtgcgcgcgtgcgcgtgagccaccgctcccagccaaccgtccctaatttaaaacacacacacacacacacacccctgacatgttcatcatgtgccagtcacacacacacacacacccctgacatgttcatcatgtgccacttttttttttttccttcaacttttaagttccaggatacatgtgcaggatgtgcaggtttgttacataggtaaaggtgtaccatggggtttgctgcacagatcttgcatcggtacctggcacatagttaacactcaactattagctgctgctgtttgccaatgataatggtttcctcttcagctgtcattaaactgtttattgttaaactgttaatttattcttaagaacctttgacattcctgactcttatttcttcctatgttaattgactcagtgctgccatagcactttgattctgcatcttttcagagtttttattcctgccttccatctagggctttctgtttagtggtatatcctctcattctaatatcctataattcctgaccacatgcccattcttagcagcacacatgtgcttgagctcacacacttccatctgtcctttttaatttgcaacagtctgccaggatttagaaaacttgattgcaaacctcattcagactcagaatgaggacctaaagttctaggcatttgtgaaaattatttcaacagccacatatgtattaacaactcttctggagcttgtaacaagtctgatcaccagaaaaatataatagggaacatttttttagccgaggcatgtatgcagaaaactattcaaagtacatatttaacaattctaagtttactttttaaaatctttaattacatgtgattttagtgtaataccacctttttctgacatcagtcttaatagaatgtttaaatatggaattagaaattatataacgtgattgtaaatctgtaaaacaccatcatgaaataaattctatttgtctgctctgaacgagctttttagccactttcattgaaagagtgaggaagaacttgattatctgatactagaaaccttggttagatgtgcattctatacttatgatctaattctaggagtacattacgattgtgtaaacacaggatcacccagtttgttaatattgctatctgacttttcaatcctaattctaataaggttgacttgactaacaattttaatgtgatttttttcctttttaatccttggaaggtaatgcacaaaaatttgcacaaaggtactttccctttctgttcctaagattttcatttaactgactttcaagagggcagcagaatagacttcatctttttggaatgaaaaggtctgccgtgaattgtggtatgttgccactaatgtaatgcctagaacaagagcctagattatattcatttctaacacttttaagactgttttcttaactgtttgcttttgggtctttactttttctagcccatgtttttaattaatttttttccttttgacaggtctgaagaactgttgcccaattcaacagtgccagcattccaactttgttaaacctaccaacatcttaaatggactttcctgtggtggtaccctttaagaggcggatgaaagctactatatcagtttgcacattctaatcactttccagtatcacaagagagatttttacttatataatagtcctagagtttgcagctggtaaaaccagaggctacatccagtattactgctaagagacattcttcatccaccaatgttgtacatgtatgaaaatggtgtactgtatactttaacatgccccatactttgtattggagagtacaataatgtaaatcctaaaagcaccactattttagcataataaaagaaagtccaaagagctcctatatagactactccagataacttcgcttctttgatacttgtagcttattgtaattttttttaagaaattcaaggtcattattattgtacaaaataagcgctttgattaacacagctatatagtttttttaatttttaaaaaacctgtggagacggtgatcttgtctttaaaacatgatagtcctttcagtataatgtcttagattaaagacgttgcctttaatatctgttgggaaggaaatgtccagacttttcaaatctcttattatatgtttcctttttttgtttacatagggaacaatgtttatagtcgtgtgtacagtgggggtctacaacaagaagtgtatattttcaaacaattttttaatgatttaacaatttttgtaaatcattttcaggcttctgcagctgtagattctcactgtgaatcccttgcttgctcatgcataagtgtatttgcaataccaaatatacaggtttagtatttttgcctgttagtgattgtttcacatgtgtaacgttttggttgagatgttaaatggtggacgagtactgtggatgtgaatgtgggaagtaattttaatcatatgtaattggtcacaaggcctaatttgcagtaactattgctgttttatttaacaatgccttgttgctttgtatgcattaatgtttggatgtaaagattgtgtgtctatccaacagggagccacagtatttaaattgaccaacctaatgttacaactactttgaggtggccaaatgtaaactaaaagccttaattaaagtggtgcaattttgtataacttagcatcagtagttcaataaatttggattgccatgcaagggcttgcattataattacttgccacttg

SEQ ID NO: 8069 - protein, 70 aa, Homo sapiens [sequence omitted]

SEQ ID NO: 8070 - DNA, 3202 bp, Homo sapiens
agagcttagcaaagcctcacaagcaaatagattgaccttctgtctcactcataagataaaccatcttggccacttagaaaggccacctagctgagaagtgtcatgcttggaacaaactgagaagtacatacaatgtgaaatgaactgctttttcatttgtatccaaagtgatggggaggtcagttgatcctgcatgtatgtgtgtatacataacaattagtcaatttctaatttaaaaatcaaatttaagctcttaagactgaaacaattgctgggattacaggcgtgaccaccactcccagccaaccccgtccctaatttaaaacacacacacacacacacacacacacacacacacacacacacacacacgtgcgcgcgtgcgcgtgagccaccgctcccagccaaccgtccctaatttaaaacacacacacacacacacacccctgacatgttcatcatgtgccagtcacacacacacacacacccctgacatgttcatcatgtgccacttttttttttttccttcaacttttaagttccaggatacatgtgcaggatgtgcaggtttgttacataggtaaaggtgtaccatggggtttgctgcacagatcttgcatcggtacctggcacatagttaacactcaactattagctgctgctgtttgccaatgataatggtttcctcttcagctgtcattaaactgtttattgttaaactgttaatttattcttaagaacctttgacattcctgactcttatttcttcctatgttaattgactcagtgctgccatagcactttgattctgcatcttttcagagtttttattcctgccttccatctagggctttctgtttagtggtatatcctctcattctaatatcctataattcctgaccacatgcccattcttagcagcacacatgtgcttgagctcacacacttccatctgtcctttttaatttgcaacagtctgccaggatttagaaaacttgattgcaaacctcattcagactcagaatgaggacctaaagttctaggcatttgtgaaaattatttcaacagccacatatgtattaacaactcttctggagcttgtaacaagtctgatcaccagaaaaatataatagggaacatttttttagccgaggcatgtatgcagaaaactattcaaagtacatatttaacaattctaagtttactttttaaaatctttaattacatgtgattttagtgtaataccacctttttctgacatcagtcttaatagaatgtttaaatatggaattagaaattatataacgtgattgtaaatctgtaaaacaccatcatgaaataaattctatttgtctgctctgaacgagctttttagccactttcattgaaagagtgaggaagaacttgattatctgatactagaaaccttggttagatgtgcattctatacttatgatctaattctaggagtacattacgattgtgtaaacacaggatcacccagtttgttaatattgctatctgacttttcaatcctaattctaataaggttgacttgactaacaattttaatgtgatttttttcctttttaatccttggaaggtaatgcacaaaaatttgcacaaaggtactttccctttctgttcctaagattttcatttaactgactttcaagagggcagcagaatagacttcatctttttggaatgaaaaggtctgccgtgaattgtggtatgttgccactaatgtaatgcctagaacaagagcctagattatattcatttctaacacttttaagactgttttcttaactgtttgcttttgggtctttactttttctagcccatgtttttaattaatttttttccttttgacaggtctgaagaactgttgcccaattcaacagtgccagcattccaactttgttaaacctaccaacatcttaaatggactttcctgtggtggtaccctttaagaggcggatgaaagctactatatcagtttgcacattctaatcactttccagtatcacaagagagatttttacttatataatagtcctagagtttgcagctggtaaaaccagaggctacatccagtattactgctaagagacattcttcatccaccaatgttgtacatgtatgaaaatggtgtactgtatactttaacatgccccatactttgtattggagagtacaataatgtaaatcctaaaagcaccactattttagcataataaaagaaagtccaaagagctcctatatagactactccagataacttcgcttctttgatacttgtagcttattgtaattttttttaagaaattcaaggtcattattattgtacaaaataagcgctttgattaacacagctatatagtttttttaatttttaaaaaacctgtggagacggtgatcttgtctttaaaacatgatagtcctttcagtataatgtcttagattaaagacgttgcctttaatatctgttgggaaggaaatgtccagacttttcaaatctcttattatatgtttcctttttttgtttacatagggaacaatgtttatagtcgtgtgtacagtgggggtctacaacaagaagtgtatattttcaaacaattttttaatgatttaacaatttttgtaaatcattttcaggcttctgcagctgtagattctcactgtgaatcccttgcttgctcatgcataagtgtatttgcaataccaaatatacaggtttagtatttttgcctgttagtgattgtttcacatgtgtaacgttttggttgagatgttaaatggtggacgagtactgtggatgtgaatgtgggaagtaattttaatcatatgtaattggtcacaaggcctaatttgcagtaactattgctgttttatttaacaatgccttgttgctttgtatgcattaatgtttggatgtaaagattgtgtgtctatccaacagggagccacagtatttaaattgaccaacctaatgttacaactactttgaggtggccaaatgtaaactaaaagccttaattaaagtggtgcaattttgtataacttagcatcagtagttcaataaatttggattgccatgcaagggcttgcattataattacttgccacttgaatgtgttttgtgtaatgttttaacagtgctagtaaataaatacgggtttaccctggttttaattgt

SEQ ID NO: 8071 - protein, 70 aa, Homo sapiens [sequence omitted]

SEQ ID NO: 8072 - DNA, 3398 bp, Homo sapiens
agagcttagcaaagcctcacaagcaaatagattgaccttctgtctcactcataagataaaccatcttggccacttagaaaggccacctagctgagaagtgtcatgcttggaacaaactgagaagtacatacaatgtgaaatgaactgctttttcatttgtatccaaagtgatggggaggtcagttgatcctgcatgtatgtgtgtatacataacaattagtcaatttctaatttaaaaatcaaatttaagctcttaagactgaaacaattgctgggattacaggcgtgaccaccactcccagccaaccccgtccctaatttaaaacacacacacacacacacacacacacacacacacacacacacacacacgtgcgcgcgtgcgcgtgagccaccgctcccagccaaccgtccctaatttaaaacacacacacacacacacacccctgacatgttcatcatgtgccagtcacacacacacacacacccctgacatgttcatcatgtgccacttttttttttttccttcaacttttaagttccaggatacatgtgcaggatgtgcaggtttgttacataggtaaaggtgtaccatggggtttgctgcacagatcttgcatcggtacctggcacatagttaacactcaactattagctgctgctgtttgccaatgataatggtttcctcttcagctgtcattaaactgtttattgttaaactgttaatttattcttaagaacctttgacattcctgactcttatttcttcctatgttaattgactcagtgctgccatagcactttgattctgcatcttttcagagtttttattcctgccttccatctagggctttctgtttagtggtatatcctctcattctaatatcctataattcctgaccacatgcccattcttagcagcacacatgtgcttgagctcacacacttccatctgtcctttttaatttgcaacagtctgccaggatttagaaaacttgattgcaaacctcattcagactcagaatgaggacctaaagttctaggcatttgtgaaaattatttcaacagccacatatgtattaacaactcttctggagcttgtaacaagtctgatcaccagaaaaatataatagggaacatttttttagccgaggcatgtatgcagaaaactattcaaagtacatatttaacaattctaagtttactttttaaaatctttaattacatgtgattttagtgtaataccacctttttctgacatcagtcttaatagaatgtttaaatatggaattagaaattatataacgtgattgtaaatctgtaaaacaccatcatgaaataaattctatttgtctgctctgaacgagctttttagccactttcattgaaagagtgaggaagaacttgattatctgatactagaaaccttggttagatgtgcattctatacttatgatctaattctaggagtacattacgattgtgtaaacacaggatcacccagtttgttaatattgctatctgacttttcaatcctaattctaataaggttgacttgactaacaattttaatgtgatttttttcctttttaatccttggaaggtaatgcacaaaaatttgcacaaaggtactttccctttctgttcctaagattttcatttaactgactttcaagagggcagcagaatagacttcatctttttggaatgaaaaggtctgccgtgaattgtggtatgttgccactaatgtaatgcctagaacaagagcctagattatattcatttctaacacttttaagactgttttcttaactgtttgcttttgggtctttactttttctagcccatgtttttaattaatttttttccttttgacaggtctgaagaactgttgcccaattcaacagtgccagcattccaactttgttaaacctaccaacatcttaaatggactttcctgtggtggtaccctttaagaggcggatgaaagctactatatcagtttgcacattctaatcactttccagtatcacaagagagatttttacttatataatagtcctagagtttgcagctggtaaaaccagaggctacatccagtattactgctaagagacattcttcatccaccaatgttgtacatgtatgaaaatggtgtactgtatactttaacatgccccatactttgtattggagagtacaataatgtaaatcctaaaagcaccactattttagcataataaaagaaagtccaaagagctcctatatagactactccagataacttcgcttctttgatacttgtagcttattgtaattttttttaagaaattcaaggtcattattattgtacaaaataagcgctttgattaacacagctatatagtttttttaatttttaaaaaacctgtggagacggtgatcttgtctttaaaacatgatagtcctttcagtataatgtcttagattaaagacgttgcctttaatatctgttgggaaggaaatgtccagacttttcaaatctcttattatatgtttcctttttttgtttacatagggaacaatgtttatagtcgtgtgtacagtgggggtctacaacaagaagtgtatattttcaaacaattttttaatgatttaacaatttttgtaaatcattttcaggcttctgcagctgtagattctcactgtgaatcccttgcttgctcatgcataagtgtatttgcaataccaaatatacaggtttagtatttttgcctgttagtgattgtttcacatgtgtaacgttttggttgagatgttaaatggtggacgagtactgtggatgtgaatgtgggaagtaattttaatcatatgtaattggtcacaaggcctaatttgcagtaactattgctgttttatttaacaatgccttgttgctttgtatgcattaatgtttggatgtaaagattgtgtgtctatccaacagggagccacagtatttaaattgaccaacctaatgttacaactactttgaggtggccaaatgtaaactaaaagccttaattaaagtggtgcaattttgtataacttagcatcagtagttcaataaatttggattgccatgcaagggcttgcattataattacttgccacttgaatgtgttttgtgtaatgttttaacagtgctagtaaataaatacgggtttaccctggttttaattgtaataggtgcattttacacagcatggtttcataatttaacatctgggcaagccagactcattaattacaggaataaggaagtagcgagttttctggtattgtttgaatatccacataaccaccttttgaacttttccttgagaaataattttgtaaatcaagcagtattacttacgaataaatgcctttgggtaatg

SEQ ID NO: 8073 - protein, 70 aa, Homo sapiens [sequence omitted]

SEQ ID NO: 8074 - DNA, 1152 bp, Homo sapiens
ttctaacacttttaagactgttttcttaactgtttgcttttgggtctttactttttctagcccatgtttttaattaatttttttccttttgacaggtctgaagaactgttgcccaattcaacagtgccagcattccaactttgttaaacctaccaacatcttaaatggactttcctgtggtggtaccctttaagaggcggatgaaagctactatatcagtttgcacattctaatcactttccagtatcacaagagagatttttacttatataatagtcctagagtttgcagctggtaaaaccagaggctacatccagtattactgctaagagacattcttcatccaccaatgttgtacatgtatgaaaatggtgtactgtatactttaacatgccccatactttgtattggagagtacaataatgtaaatcctaaaagcaccactattttagcataataaaagaaagtccaaagagctcctatatagactactccagataacttcgcttctttgatacttgtagcttattgtaattttttttaagaaattcaaggtcattattattgtacaaaataagcgctttgattaacacagctatatagtttttttaatttttaaaaaacctgtggagacggtgatcttgtctttaaaacatgatagtcctttcagtataatgtcttagattaaagacgttgcctttaatatctgttgggaaggaaatgtccagacttttcaaatctcttattatatgtttcctttttttgtttacatagggaacaatgtttatagtcgtgtgtacagtgggggtctacaacaagaagtgtatattttcaaacaattttttaatgatttaacaatttttgtaaatcattttcaggcttctgcagctgtagattctcactgtgaatcccttgcttgctcatgcataagtgtatttgcaataccaaatatacaggtttagtatttttgcctgttagtgattgtttcacatgtttaacatctgggcaagccagactcattaattacaggaataaggaagtagcgagttttctggtattgtttgaatatccacataaccaccttttgaacttttccttgagaaataattttgtaaatcaagcagtattacttacgaataaatgcctttgggt

SEQ ID NO: 8075 - protein, 75 aa, Homo sapiens
MHKCICNTKYTGLVFLPVSDCFTCLTSGQARLINYRNKEVASFLVLFEYPHNHLLNFSLRNNFVNQAVLLTNKCL

SEQ ID NO: 8076 - DNA, 2091 bp, Homo sapiens
aaatttcccggcatggggaaggagccttaggggaagcacccgggacctccttggcttcttctgggagtctagtttcacctatttcgtttcgccaacaggcgagacgggcaagacttcgggctcagctgccaccatcagtactgacctgtccatggctaaagccttttccacacacaaccaaagttggctgcagtttagctaccgcgttttagccttcccgctctccggaagcaagcccttcgacccggaagcagtctgtccctaaaacagacccacagaaaaggggtaggggagaagaaacaacgttcccatctagcgcatgcgcgacttcagcctacaggtgcacgcccggtgggcgcaggcgcaaaagtttgccaatgtgttcctggttgcgtttagcccagacgccctgcggccgctttgcctgaccaaagtctgtgggcgtggaacaggccctgggttctcctactgggaagaatgaagttcaggtactccatgtgatatatggttccacaatcctcagcgtgttaactgaagccttgttgagtttaacaaagctgccattgaagatctggggaaagtgaagaagttgcaacagagttttgggctcacaccattgatacatttgatccttaaggcaagcccaccccgcctcactcccaccctcttctacttaattcaggatgtgaatagcacatgccttccatcttcagacaaacactgaggcctggacaatgacctgcattaggtagatagaatctactgaaagctaaaagccttttcctgtgtcttagcagcacggaagccacgcctccttccccccaatgtttgtgcaaaccctagagaagaggagacagcccctatgatgtgtgaggttgaatttcctgccctcaacccatcaaatcaggcagaatgagggctcagtcagaactacaactacaaaagagaaaaattttaatgtgacttttcttgtctgctcagatttttgggttaaggttcatgccagctacattctttgcataataaaatataaatagagtataaattgttctagttagagaaaacagcaaaacagtgctctcccaagggccctaataaatcactttacagaaacgtggatgtgtgttggatttacaggatttctatgccaagcagagaagtacgtgaaaacaggaaagcaaaatgcataagttgcaataatagttttgtggtttagctgaataatgtcctatatcaacagaggataatgattttagtttttcagttgccccaagatcatttccattactgatgaggcttgaaatgtctgtgaagaagagtcattgcaattgatttatttgtctggcaaactttttgtcagcaaattcaccactacctcaaaaatctcactagctactctatgcttaagacattggaagcataagccacaatgaaaactaactcttagcattagaattctaagaagcagtaatgtatttatgattttatgttaaaaatctcccagatgtcagcatttaaatcacaattcagtaatataagtaatttgaaattagaaagttttatacttcaccattctattttcctcttcaaattgaacacagtttgaaagaattaagaaaagaagctataaaaaataaattgttcaaggattcttcctgtttctaaacaccacaagattatgatgatagagacatcatttgaagtggtagagagtactgtgaaatatctatatgtgaatgtaatgaaaatgaaaaaataatctgatgaatttttaaaattaatcttgttagagtcatttttgagaaattgtatgcaagtgtattgattgaaaatgaccttctcattcaagaaaaatttattgagcacttaccaagtgtcaacaggtgaatgtgaataaaatagatatggtccctgccttcttggagttgaataaaatagcaaacacttattgaatatttattatatgttgtgcattataatattaaccaatgtttattgagttgttattatatgccaactatgccaatcctgtcctaagcaatttatgtatgttaactaatttaatcctcacaataaatctatgaggtaggt

SEQ ID NO: 8077 - protein, 53 aa, Homo sapiens [sequence omitted]

SEQ ID NO: 8078 - DNA, 2431 bp, Homo sapiens
ttcaacgcctttagaacaatggcagtcacatagtaggtactcaatgtttggagtacgaataatgtactcttattattcaaagaccagctagaaagttaccttctttgaggggtcttcctgatagttacagtgacaaggagacttaatcgcccccaaacacttaccactttacactgcttggttgtctccattacacaactaattccccgaggggaaggatcttgaataactgatctttgttgtaggcggctagcacagtacccagatcatagagggaactcagaatctgatgctggcacttgtaatcagaaagtctgggctgagatcccagtatcttcactgactggctttgtgatctcaggctggtcacttagcatttcgaacgccgcgctacctaccccgcccaccccaggagcgaacagtgttgctgccccaaagcgccgaatagatcgcagaacgtagtgggaaagtaagggactattatgatctgtaccccaccccgacgcacgccaagcggctttttccccatttgtggccaaatttcccggcatggggaaggagccttaggggaagcacccgggacctccttggcttcttctgggagtctagtttcacctatttcgtttcgccaacaggcgagacgggcaagacttcgggctcagctgccaccatcagtactgacctgtccatggctaaagccttttccacacacaaccaaagttggctgcagtttagctaccgcgttttagccttcccgctctccggaagcaagcccttcgacccggaagcagtctgtccctaaaacagacccacagaaaaggggttcaggtactccatgtgatatatggttccacaatcctcagcgtgttaactgaagccttgttgagtttaacaaagctgccattgaagatctggggaaagtgaagaagttgcaacagagttttgggctcacaccattgatacatttgatccttaaggcaagcccaccccgcctcactcccaccctcttctacttaattcaggatgtgaatagcacatgccttccatcttcagacaaacactgaggcctggacaatgacctgcattaggtagatagaatctactgaaagctaaaagccttttcctgtgtcttagcagcacggaagccacgcctccttccccccaatgtttgtgcaaaccctagagaagaggagacagcccctatgatgtgtgaggttgaatttcctgccctcaacccatcaaatcaggcagaatgagggctcagtcagaactacaactacaaaagagaaaaattttaatgtgacttttcttgtctgctcagatttttgggttaaggttcatgccagctacattctttgcataataaaatataaatagagtataaattgttctagttagagaaaacagcaaaacagtgctctcccaagggccctaataaatcactttacagaaacgtggatgtgtgttggatttacaggatttctatgccaagcagagaagtacgtgaaaacaggaaagcaaaatgcataagttgcaataatagttttgtggtttagctgaataatgtcctatatcaacagaggataatgattttagtttttcagttgccccaagatcatttccattactgatgaggcttgaaatgtctgtgaagaagagtcattgcaattgatttatttgtctggcaaactttttgtcagcaaattcaccactacctcaaaaatctcactagctactctatgcttaagacattggaagcataagccacaatgaaaactaactcttagcattagaattctaagaagcagtaatgtatttatgattttatgttaaaaatctcccagatgtcagcatttaaatcacaattcagtaatataagtaatttgaaattagaaagttttatacttcaccattctattttcctcttcaaattgaacacagtttgaaagaattaagaaaagaagctataaaaaataaattgttcaaggattcttcctgtttctaaacaccacaagattatgatgatagagacatcatttgaagtggtagagagtactgtgaaatatctatatgtgaatgtaatgaaaatgaaaaaataatctgatgaatttttaaaattaatcttgttagagtcatttttgagaaattgtatgcaagtgtattgattgaaaatgaccttctcattcaagaaaaatttattgagcacttaccaagtgtcaacaggtgaatgtgaataaaatagatatggtccctgccttcttggagttgaataaaatagcaaacacttattgaatatttattatatgttgtgcattataatattaaccaatgtttattgagttgttattatatgccaactatgccaatcctgtcctaagcaatttatgtatgttaactaatttaatcctcacaataaatctatgaggtaggt

SEQ ID NO: 8079 - protein, 88 aa, Homo sapiens
MICTPPRRTPSGFFPICGQISRHGEGALGEAPGTSLASSGSLVSPISFRQQARRARLRAQLPPSVLTCPWLKPFPHTTKVGCSLATAF

SEQ ID NO: 8080 - DNA, 1110 bp, Homo sapiens
aaatttcccggcatggggaaggagccttaggggaagcacccgggacctccttggcttcttctgggagtctagtttcacctatttcgtttcgccaacaggcgagacgggcaagacttcgggctcagctgccaccatcagtactgacctgtccatggctaaagccttttccacacacaaccaaagttggctgcagtttagctaccgcgttttagccttcccgctctccggaagcaagcccttcgacccggaagcagtctgtccctaaaacagacccacagaaaaggggtaggggagaagaaacaacgttcccatctagcgcatgcgcgacttcagcctacaggtgcacgcccggtgggcgcaggcgcaaaagtttgccaatgtgttcctggttgcgtttagcccagacgccctgcggccgctttgcctgaccaaagtctgtgggcgtggaacaggccctgggttctcctactgggaagaatgaagttcaggtactccatgtgatatatggttccacaatcctcagcgtgttaactgaagccttgttgagtttaacaaagctgccattgaagatctggggaaagtgaagaagttgcaacagagttttgggctcacaccattgatacatttgatccttaaggcaagcccaccccgcctcactcccaccctcttctacttaattcaggatgtgaatagcacatgccttccatcttcagacaaacactgaggcctggacaatgacctgcattaggtagatagaatctactgaaagctaaaagccttttcctgtgtcttagcagcacggaagccacgcctccttccccccaatgtttgtgcaaaccctagagaagaggagacagcccctatgatgtgtgaggttgaatttcctgccctcaacccatcaaatcaggcagaatgagggctcagtcagaactacaactacaaaagagaaaaattttaatgtgacttttcttgtctgctcagatttttgggttaaggttcatgccagctacattctttgcataataaaatataaatagagtataaattgttctagttagagaaaacagcaaaacagtgctctcccaagggccctaataaatcactttacag

SEQ ID NO: 8081 - protein, 53 aa, Homo sapiens [sequence omitted]

SEQ ID NO: 8082 - DNA, 1450 bp, Homo sapiens
ttcaacgcctttagaacaatggcagtcacatagtaggtactcaatgtttggagtacgaataatgtactcttattattcaaagaccagctagaaagttaccttctttgaggggtcttcctgatagttacagtgacaaggagacttaatcgcccccaaacacttaccactttacactgcttggttgtctccattacacaactaattccccgaggggaaggatcttgaataactgatctttgttgtaggcggctagcacagtacccagatcatagagggaactcagaatctgatgctggcacttgtaatcagaaagtctgggctgagatcccagtatcttcactgactggctttgtgatctcaggctggtcacttagcatttcgaacgccgcgctacctaccccgcccaccccaggagcgaacagtgttgctgccccaaagcgccgaatagatcgcagaacgtagtgggaaagtaagggactattatgatctgtaccccaccccgacgcacgccaagcggctttttccccatttgtggccaaatttcccggcatggggaaggagccttaggggaagcacccgggacctccttggcttcttctgggagtctagtttcacctatttcgtttcgccaacaggcgagacgggcaagacttcgggctcagctgccaccatcagtactgacctgtccatggctaaagccttttccacacacaaccaaagttggctgcagtttagctaccgcgttttagccttcccgctctccggaagcaagcccttcgacccggaagcagtctgtccctaaaacagacccacagaaaaggggttcaggtactccatgtgatatatggttccacaatcctcagcgtgttaactgaagccttgttgagtttaacaaagctgccattgaagatctggggaaagtgaagaagttgcaacagagttttgggctcacaccattgatacatttgatccttaaggcaagcccaccccgcctcactcccaccctcttctacttaattcaggatgtgaatagcacatgccttccatcttcagacaaacactgaggcctggacaatgacctgcattaggtagatagaatctactgaaagctaaaagccttttcctgtgtcttagcagcacggaagccacgcctccttccccccaatgtttgtgcaaaccctagagaagaggagacagcccctatgatgtgtgaggttgaatttcctgccctcaacccatcaaatcaggcagaatgagggctcagtcagaactacaactacaaaagagaaaaattttaatgtgacttttcttgtctgctcagatttttgggttaaggttcatgccagctacattctttgcataataaaatataaatagagtataaattgttctagttagagaaaacagcaaaacagtgctctcccaagggccctaataaatcactttacag

SEQ ID NO: 8083 - protein, 88 aa, Homo sapiens; identical to SEQ ID NO: 8079

SEQ ID NO: 8084 - DNA, 931 bp, Homo sapiens
aaatttcccggcatggggaaggagccttaggggaagcacccgggacctccttggcttcttctgggagtctagtttcacctatttcgtttcgccaacaggcgagacgggcaagacttcgggctcagctgccaccatcagtactgacctgtccatggctaaagccttttccacacacaaccaaagttggctgcagtttagctaccgcgttttagccttcccgctctccggaagcaagcccttcgacccggaagcagtctgtccctaaaacagacccacagaaaaggggtaggggagaagaaacaacgttcccatctagcgcatgcgcgacttcagcctacaggtgcacgcccggtgggcgcaggcgcaaaagtttgccaatgtgttcctggttgcgtttagcccagacgccctgcggccgctttgcctgaccaaagtctgtgggcgtggaacaggccctgggttctcctactgggaagaatgaagttcaggtactccatgtgatatatggttccacaatcctcagcgtgttaactgaagccttgttgagtttaacaaagctgccattgaagatctggggaaagtgaagaagttgcaacagagttttgggctcacaccattgatacatttgatccttaaggcaagtgacaatttgggtttcacaggtatatagaaattgccagcttttcttgccatatatttcttgtgacagtgctgagctttttttttttacttcttgcttgcttttttttggacttgattttttaaattatgtttccttccttccttctttctttgttttttttttttttgagacaggatcttgtcctattgtcccggcttacgtgcagtggcacagtcacggctcactgcagccttgacctcctgggctccagcaatcctcctacctcagcctccctagtacctgaggttg

SEQ ID NO: 8085 - protein, 53 aa, Homo sapiens
MFPSFLLSLFFFFLRQDLVLLSRLTCSGTVTAHCSLDLLGSSNPPTSASLVPE

SEQ ID NO: 8086 - DNA, 3123 bp, Homo sapiens
gttttagggacagactgcttccgggtcgaagggcttgcttccggagagcgggaaggctaaaacgcggtagctaaactgcagccaactttggttgtgtgtggaaaaggctttagccatggacaggagtggctttggagagatatcatcccctgtaatccgggaggcagaggtgacacggactgcacggaaacagagtgctcagaaaagagttttacttcaggcatctcaagatgaaaattttggtaatactacaccaagaaaccaggttatccctcgaactcctagctcatttcgacagccttttaccccaacaagccgaagcttactaaggcagccagatatttcctgcattcttggaacaggagggaagtcgccccgacttacgcagtcttcagggttctttggaaatctctccatggttactaatctggatgacagtaactgggcagctgcattttcatcacagcgttccgggctgttcacaaacacagagccccacagtataacagaagatgtaactatcagtgctgttatgttacgtgaggatgatcctggagaagctgcatccatgagtatgttttctgatttcctgcagtcttttctgaagcactcttcgagtacagtttttgatcttgtggaagagtatgaaaacatctgtggtagtcaggtgaatatactgagtaaaatagtgagtcgagcaacacctggacttcaaaaattttcaaaaacagccagtatgctctggcttcttcaacaggagatggtcacatggaggctgctggcttctttgtatagagacagaatacagtctgcattagaagaggaaagtgtattcgcagttactgctgttaatgccagtgaaaaaacagttgtggaagcgttatttcagagggattcacttgttcgacaaagtcagctggtggtagattggttagagagtattgccaaagatgaaattggagaattttctgataatattgagttttatgcaaaatcagtatattgggaaaatactctgcataccttaaaacaacggcagctgacttcttacgttggaagtgttcgtccgcttgtcactgaattggaccctgatgctcccataagacagaaaatgccccttgatgatctggatagagaagatgaagttagattactcaaatatctctttactctaatccgtgctggaatgacagaagaggcacaacgactctgtaaacgctgtggtcaagcatggagagctgcaacacttgaaggctggaaactgtaccatgaccctaatgttaatggaggaacagaattagaacctgttgaagggaatccatatagacgcatttggaaaataagttgctggagaatggcagaagatgagctttttaatagatacgagagagcaatttatgcagctttaagtgggaatcttaagcagctgcttcctgtctgtgacacctgggaagacacagtttgggcctacttccgggtgatggtggacagtctggtagaacaggagatccagacatcagtagcaactctggatgaaactgaagaactccctagagaatatctgggagcaaactggacgttagaaaaggtttttgaggaacttcaagctactgacaaaaagagagttctggaagagaatcaagaacattatcatatagttcaaaagtttcttatcctgggagacattgatggtttgatggatgagtttagcaaatggctttccaaaagcagaaacaatctacctggacacctgcttcgctttatgactcaccttattttgtttttccgtactctgggactacagaccaaggaggaagtttctattgaagttttaaagacatacatacagcttttaataagagagaaacatacaaatcttatagcattttatacctgtcatttgcctcaagacctagctgttgcccagtatgcattatttttggaaagtgttacagaatttgaacagcgccaccattgcctggagttggctaaagaagcagatttggatgttgcaacaataacaaaaactgtagttgagaatattcgaaagaaagataatggtgaatttagtcatcatgacctggccccagccctagatactggcactactgaggaggatcgtttaaaaattgatgtaattgactggttggtatttgacccagcgcagagggcagaagcactgaaacaaggcaatgcaattatgagaaaattcttggcatcaaaaaagcacgaagctgcaaaagaagtatttgtgaaaattcctcaggattctatagcagaaatctataatcagtgcgaggaacaaggaatggaaagtccacttcctgctgaagatgataatgctatccgagaacatttgtgcatcagagcttatttggaagcccatgaaacctttaatgagtggtttaagcatatgaattcagttccacaaaaacctgctttgatacctcaaccaacttttactgagaaagtggctcatgaacacaaagaaaagaaatatgaaatggattttggtatttggaaagggcatttggatgccctaactgctgatgtgaaggagaaaatgtataacgtcttgttgtttgttgatggagggtggatggtggatgttagagaggatgccaaagaagaccatgaaagaacacatcaaatggtcttactgagaaagctttgtctgccaatgttgtgttttctgcttcatacgatattgcacagtactggtcagtatcaggaatgcctacagttagcagatatggtatcctctgagcgccacaaactgtacctggtattttctaaggaagagctaaggaagttgctgcagaagctcagagagtcctctctaatgctcctagaccagggacttgacccattagggtatgaaattcagttatagtttaatctttgtaatctcactaattttcatgataaatgaagtttttaataaaatatacttgttattagtaattttttcttttgcattaccatgtaaaatttagacatttgaattttgtacttttcagaatattatcgtgacactttcaacatgtagggatatcagcgtttctctgtgtgcttgttaataaaactatataaaaattaaaattttctgtttttacaaattcc

SEQ ID NO: 8087 - protein, 925 aa, Homo sapiens; identical to SEQ ID NO: 906

SEQ ID NO: 8088 - DNA, 712 bp, Homo sapiens
agggacagactgcttccgggtcgaagggcttgcttccggagagcgggaaggctaaaacgcggtagctaaactgcagccaactttggttgtgtgtggaaaaggctttagccatggacaggagtggctttggagagatatcatcccctgtaatccgggaggcagaggtgacacggactgcacggaaacagagtgctcagaaaagagttttacttcaggcatctcaagatgaaaattttggtaatactacaccaagaaaccaggttatccctcgaactcctagctcatttcgacagccttttaccccaacaagccgaagcttactaaggcagccagatatttcctgcattcttggaacaggagggaagtcgccccgacttacgcagtcttcagggttctttggaaatctctccatggttactaatctggatgacagtaactgggcagctgcattttcatcacagcgttccgggctgttcacaaacacagagccccacagtataacagaagatgtaactatcagtgctgttatgttacgtgaggatgatcctggagaagctgcatccatgagtatgttttctgatttcctgcagtcttttctgaagcactcttcgagtacagtttttgatcttgtggaagagtatgaaaacatctgtggtagtcagagacagaatacagtctgcattagaagaggaaagtgtattcgcagttactg

SEQ ID NO: 8089 - protein, 199 aa, Homo sapiens
MDRSGFGEISSPVIREAEVTRTARKQSAQKRVLLQASQDENFGNTTPRNQVIPRTPSSFRQPFTPTSRSLLRQPDISCILGTGGKSPRLTQSSGFFGNLSMVTNLDDSNWAAAFSSQRSGLFTNTEPHSITEDVTISAVMLREDDPGEAASMSMFSDFLQSFLKHSSSTVFDLVEEYENICGSQRQNTVCIRRGKCIRS

SEQ ID NO: 8090 - DNA, 2709 bp, Homo sapiens
agggacagactgcttccgggtcgaagggcttgcttccggagagcgggaaggctaaaacgcggtagctaaactgcagccaactttggttgtgtgtggaaaaggctttagccatggacaggagtggctttggagagatatcatcccctgtaatccgggaggcagaggtgacacggactgcacggaaacagagtgctcagaaaagagttttacttcaggcatctcaagatgaaaattttggtaatactacaccaagaaaccaggttatccctcgaactcctagctcatttcgacagccttttaccccaacaagccgaagcttactaaggcagccagatatttcctgcattcttggaacaggagggaagtcgccccgacttacgcagtcttcagggttctttggaaatctctccatgcatccatgagtatgttttctgatttcctgcagtcttttctgaagcactcttcgagtacagtttttgatcttgtggaagagtatgaaaacatctgtggtagtcaggtgaatatactgagtaaaatagtgagtcgagcaacacctggacttcaaaaattttcaaaaacagccagtatgctctggcttcttcaacaggagatggtcacatggaggctgctggcttctttgtatagagacagaatacagtctgcattagaagaggaaagtgtattcgcagttactgctgttaatgccagtgaaaaaacagttgtggaagcgttatttcagagggattcacttgttcgacaaagtcagctggtggtagattggttagagagtattgccaaagatgaaattggagaattttctgataatattgagttttatgcaaaatcagtatattgggaaaatactctgcataccttaaaacaacggcagctgacttcttacgttggaagtgttcgtccgcttgtcactgaattggaccctgatgctcccataagacagaaaatgccccttgatgatctggatagagaagatgaagttagattactcaaatatctctttactctaatccgtgctggaatgacagaagaggcacaacgactctgtaaacgctgtggtcaagcatggagagctgcaacacttgaaggctggaaactgtaccatgaccctaatgttaatggaggaacagaattagaacctgttgaagggaatccatatagacgcatttggaaaataagttgctggagaatggcagaagatgagctttttaatagatacgagagagcaatttatgcagctttaagtgggaatcttaagcagctgcttcctgtctgtgacacctgggaagacacagtttgggcctacttccgggtgatggtggacagtctggtagaacaggagatccagacatcagtagcaactctggatgaaactgaagaactccctagagaatatctgggagcaaactggacgttagaaaaggtttttgaggaacttcaagctactgacaaaaagagagttctggaagagaatcaagaacattatcatatagttcaaaagtttcttatcctgggagacattgatggtttgatggatgagtttagcaaatggctttccaaaagcagaaacaatctacctggacacctgcttcgctttatgactcaccttattttgtttttccgtactctgggactacagaccaaggaggaagtttctattgaagttttaaagacatacatacaggaggatcgtttaaaaattgatgtaattgactggttggtatttgacccagcgcagagggcagaagcactgaaacaaggcaatgcaattatgagaaaattcttggcatcaaaaaagcacgaagctgcaaaagaagtatttgtgaaaattcctcaggattctatagcagaaatctataatcagtgcgaggaacaaggaatggaaagtccacttcctgctgaagatgataatgctatccgagaacatttgtgcatcagagcttatttggaagcccatgaaacctttaatgagtggtttaagcatatgaattcagttccacaaaaacctgctttgatacctcaaccaacttttactgagaaagtggctcatgaacacaaagaaaagaaatatgaaatggattttggtatttggaaagggcatttggatgccctaactgctgatgtgaaggagaaaatgtataacgtcttgttgtttgttgatggagggtggatggtggatgttagagaggatgccaaagaagaccatgaaagaacacatcaaatggtcttactgagaaagctttgtctgccaatgttgtgttttctgcttcatacgatattgcacagtactggtcagtatcaggaatgcctacagttagcagatatggtatcctctgagcgccacaaactgtacctggtattttctaaggaagagctaaggaagttgctgcagaagctcagagagtcctctctaatgctcctagaccagggacttgacccattagggtatgaaattcagttatagtttaatctttgtaatctcactaattttcatgataaatgaagtttttaataaaatatacttgttattagtaattttttcttttgcattaccatgtaaaatttagacatttgaattttgtacttttcagaatattatcgtgacactttcaacatgtagggatatcagcgtttctctgtgtgcttgttaataaaactatataaaaattaaaattttctgtttttacaaattcc

SEQ ID NO: 8091 - protein, 686 aa, Homo sapiens
MSMFSDFLQSFLKHSSSTVFDLVEEYENICGSQVNILSKIVSRATPGLQKFSKTASMLWLLQQEMVTWRLLASLYRDRIQSALEEESVFAVTAVNASEKTVVEALFQRDSLVRQSQLVVDWLESIAKDEIGEFSDNIEFYAKSVYWENTLHTLKQRQLTSYVGSVRPLVTELDPDAPIRQKMPLDDLDREDEVRLLKYLFTLIRAGMTEEAQRLCKRCGQAWRAATLEGWKLYHDPNVNGGTELEPVEGNPYRRIWKISCWRMAEDELFNRYERAIYAALSGNLKQLLPVCDTWEDTVWAYFRVMVDSLVEQEIQTSVATLDETEELPREYLGANWTLEKVFEELQATDKKRVLEENQEHYHIVQKFLILGDIDGLMDEFSKWLSKSRNNLPGHLLRFMTHLILFFRTLGLQTKEEVSIEVLKTYIQEDRLKIDVIDWLVFDPAQRAEALKQGNAIMRKFLASKKHEAAKEVFVKIPQDSIAEIYNQCEEQGMESPLPAEDDNAIREHLCIRAYLEAHETFNEWFKHMNSVPQKPALIPQPTFTEKVAHEHKEKKYEMDFGIWKGHLDALTADVKEKMYNVLLFVDGGWMVDVREDAKEDHERTHQMVLLRKLCLPMLCFLLHTILHSTGQYQECLQLADMVSSERHKLYLVFSKEELRKLLQKLRESSLMLLDQGLDPLGYEIQL

SEQ ID NO: 8092 - DNA, 573 bp, Homo sapiens
ccgggtcgaagggcttgcttccggagagcgggaaggctaaaacgcggtagctaaactgcagccaactttggttgtgtgtggaaaaggctttagccatggacaggagtggctttggagagatatcatcccctgtaatccgggaggcagaggtgacacggactgcacggaaacagagtgctcagaaaagagttttacttcaggcatctcaagatgaaaattttggtaatactacaccaagaaaccaggttatccctcgaactcctagctcatttcgacagccttgtaagattttttgcttttaaagcatttaataataacggtaattataatagcaactaacatttattgtaacataattagtatagtatttggttacgatatcaataagcactaataataatgattgcagttattattcgtttgaactcttgccatgtacaaggtactgtactttccataaacacacggtaactatgacatgggtattgttggccctgttttaccaaaactgaaagtgagacttagagaagttaactaatatatacaataagtatgtaaataggctggatgcag

SEQ ID NO: 8093 - protein, 68 aa, Homo sapiens
MDRSGFGEISSPVIREAEVTRTARKQSAQKRVLLQASQDENFGNTTPRNQVIPRTPSSFRQPCKIFCF

SEQ ID NO: 8094 - DNA, 729 bp, Homo sapiens
gtagaatatctttaaaaaaaaaactctgatattcctttttctttttttcccctttaataaataggaggatcgtttaaaaattgatgtaattgactggttggtatttgacccagcgcagagggcagaagcactgaaacaaggcaatgcaattatgagaaaattcttgggtatagtatatttttatgcagcttcaaactcctgggctccattcttcttcctacctcagcctcccaactactcgggaggctgaggcaggagaatcgcgtgaacccggcaggcggagcttgcagtgagctgagatcgcgccactgcactccagcctgggcgacagagcgagactccgtctcaaaaaaaaaaaaaaaagtggaaatatccctagtggaaataatccgtctgttttacatatttaccggctatttcaaagcttttgttcattcagatgagaaaaatgtcttcagttgtagcagagctgtttatttgcttttccttgtagcaatttgctgggtctgtcagccattaccctggatagttgctggcagcccgcccgctagtatcggaattcattataattagcagaagagattgtctgcagcacactctgatattatggcagcaaaaggatttagtaaaagcaagtctgggtccatcctgtgagataagaaagtaacctgctgcttttcgggcaacaaggagtcagaagccaggggcacccggcctctttaacataga

SEQ ID NO: 8095 - protein, 36 aa, Homo sapiens
MQLQTPGLHSSSYLSLPTTREAEAGESREPGRRSLQ

SEQ ID NO: 8096 - DNA, 4460 bp, Homo sapiens
tgtgattggctgttgccatggatacgctttgtgtagcggctatgggcgctgtcttacaacaaagccaaggaatctcgctgctgagggcagttctgtgctttattatgaagaataatggacgatgatgatgcaaagctcaaagcagaaatagaagctgaattggataaactcagcatttcctccttggaaaaagaagacattgagagtgatgcaaaatcagaaacccagagtgatgatagtgatacagattcagttgaattaccagaatcagttcttcactgtattaacatcataaagaacaggagtaaagctgttgaagagctcattcttcaggacctggaagatactgatattttaagctgtagttatggagcagtttctaataatcatatgcatttaagaacaggactatcaactgaatatgaagaaagttcagagcaattaattaagatattatctgaaatagaaaaagaagaatttatgagaagtaaaaccgattgtgccactcctgattttgttcctgagcctagtcctcatgacttgcctatggatgaacatgttttaccagatgatgctgatataaattttggatactgtgaagtggaagaaaaatgtagacagtcttttgaggcttggcaagagaaacagaaggaattagaagataaagagaaacaaactctcaaagctcagagggatagagaagaaaaacaatttcaagaagaagaagaaaagcgacattgctggatgaaacaatttaaagttgaaaagaagaaattagagaacattcagaagcaagaacaggacaagatgaatgatgaactctataaagaagagaaaatttggaaagagaaatttaaacagcatgaggagtatattagaaacttgcatttacaaatggaagaagaaagaacaagatttaaagaccaacaagaaaaagaaaaaaattctttgttaaaacagcagaataatgcagctgttaaaattcaagctaaatataaagcatttgttgcctatcaaaaatatggcccaattattaaagagcaaattgaaagtaagaaaaggaaagcacaagagtggaaggaaaaggaagcaaaaatacgacaaaaggaggaagaaaatcgaaaaagattagaggaggaacaaaggataaaagaagagagaaaaaagcaaaaggaagaggaaaggaaaaggagagaaaaagaatatgaagaaaaaaagaatattgtgaaacaggaaagagagcaactaataagcaaggaaaaaataatattaagagaagatgcaagccaacagctaataataagtagtgcattaaagaagagcggatataataacaaacatttaagtcttgaagatatttcaaatgataagggtgatatagccaaaaatctagtggatgaaaattcaaagaagcaggaagatgttctcctttggctagttgaggaatcaaatatgaaagaaaatgtagatagacagactatattaaaagaatcaatacaagtaaagttaaaagaatctatatcaagccaaacaattctggcagattttaaaatggaagaaaaaaatgaaaacctagcaaaaaaacgatgttcagaagaattggtcaagcaagaaagaaaatatgaaaatacagataacaaaactgaattgggaaactctgatctaaaaggaaatctgaaagaacagtttccattgcaagaattaaagtctgatgcacaaaaagaagaaaaaatcatgaaacatgtcataaatgagaatacaggacaaaaaacccagataatattaggacataaccaagaaatcagtgaggtgaaaaccaatgaagagcagaaaataatcaaagataatcagcagaaaaagatacaaaaagtagaaaaagaagagatacaagaacagaatggattattatataaagataaggatactttagttatttcagtgaaacaaagatcactctcactaacatcagaaaattccaaagatgtaagagaaaacgtaatattacaagaaaaagaaatttattcaaaatccaaagaaattgaggagaacccaaaagacaatgcttggaatagtggcattgtgatttttaacacaactgataccatgataaatatagaaggcaaaagaaatgaccaagattatgtgttaggtagacatgctccttgtgagggcttgagtaactataatgcagaaagctccatggtatctaaagaagtcaactctcttaaatctgagattagaaatatttcagaaaaatgccatgaaaatgcacctgaacctgatagcatgacctgctgtgtatcagagtcaacccttctatattctattgaagaaaggagactagcctggataaaatcatttaaaccttggcttgaaattttcaagcaaaatcaacaaaagaaaattgttagaagaaagagacctgtgaaatgcccagccaacatgacacccgctttggataaactggaaattcttcgatgtggcccttgggatactttacagcaggttacaacagttacatttcaagatttgccaggctgtgttctctccacactggcagagtgtacaaatcttcagtttctatcccttcgacgctgtggattaacttctttgcacagcctgagtaattgtaaaaaacttaagtacattgatgcacaggaaaaccatattgaggctattgagtgtgaaaatttggaaaatctctgtgttgttcttcttaataaaaatcaactgacttctcttcatggtttggatggctgtactaatattcagtgtcttgaactttcatataataaaattactcgaattggatattccttctttctggaagaaaaacttgttgacaatgcagggttctgccatcacttgggcacctccacttcttacttatccctggcacaagtctggattccaactggattatgttggtcctggatacctattacctcacttacaaaaaattcagattgtaatttccttatctcccacttatactggaattgtggtttagaatctttgaaaaatcttcaacaactaattttggaccacaatcagttaattaatacaaaaggtctttgtgatacacctaccattgtatacctagattgctcccataatcatcttactgatgtagagggcgttgaaaattgtggattgctccaaatattgaagttacagggaaattatctgagtgagcttccatccttggagaatcttgttttactaagagaattgcacttggatgataacagcatttcaactgtggaagcattttcttcatactggctgcctttactacaaaatattactatctctcaaaacagcttgactaaaatcgtaccactttttcattttgtttcattggaaaagctagatgtcagccacaattgtctttctgatcttaaaagtgccataaaatggtttgatgcatgctattctctccatgaattgtctcttactggaaacccacttcttcaagaaacaaactggagggattctctacttaaagtgttgcctgctctgagaatcctcaatggcaatatactaaactctaattcagaaagccgcactgaagaacacaatcaactgggatcagcaggtttcctggcactttgtcagtctcagattcgagaattcaacttgctaattgaaaattatataactggaaaaggagatgtatttaccttggatactgcagaaaatctctgtcattattttaagaaattgatgatacttagtactgaataccgacatgcacacgaacgaggggatgtaactatcaccaagaaagatgaatcagaagcccagaaaaatcatttggcccctacaaacagtgacagcactctgcaaaatggagtcttctactcttgtgcacgtgaaggtgagccagactcaccagatattcctgagaaatggatggactctgtctccagccactccccattaagcaaatccgccacatgtgaaaatatggaaggaagacatcaggaaatattagtatgtcagaagagagaagacagcaaggcaagcagtattcccaccataagaatcccatttaaggaagtagtaatgacaaattctttgctgaggaatcaccaaaatattgagcctagtgaaaaaatgtaagatatataaataatgtttcttttatagatgtatgtttactccttttgatggatgatattagtcaatggtacctagtaatttgctgaaggattcaaatcacaatcatatttcataccgattccattatgttttcgtgaggtgcattatgttttcatgaggtgcacaaatcattaattatagtgcatattaatttgattaaattctcatttaatttctagtagtatttaaatgagtaaatgtgagtttttttctgccttgtaatttctaaataattaatatgttttaaggagaaataaaatatcacagtctaaaaataataaaaacattttctgagt

SEQ ID NO: 8097 - protein, 1336 aa, Homo sapiens; identical to SEQ ID NO: 910

SEQ ID NO: 8098 - DNA, 712 bp, Homo sapiens
tcaaagaccagtagaaagagtttgctaaaatctgaaaaagaaaaaaaaatttcagaagaatggggctttaaggatatttctactgctcagcaaatgttgaagagggcacagaaaatgaaatcgaagaaactaaagaaaaaaatagattccactgtgcgtctagccttattcaaaaacaatgaaaataaagtgtctcttccaaaatcaccaaagatggtacagcccagaagagatggttactttgaaggtatagaagaagaccctatccacaaagataccactgcaaatgaaaaattagaacggaatagagaatatacataccaatggcttcacacacaggttggggttcatgaaacgactagttccagaaatatgaaatgcaatcactttttgcctgagttagatccagatgtacttaatggtggaagagttcagcttgtggtaagaaatgtgcttaaagttacagaaaaatgttgtagacactagtgctcaaataaatggcactttaagatatgtttataattaaactatgaaaatatcacaactgtatctatttgggataatatcaaaatatcatgtgttaaaataataacatgttttcttgacttgtaatacaatttaaaatgtgacattgcttaaaaatgttaattttatgtgacagatgtaaaaatattagcatcctacaactttaaaataaaattactgtggatgg

SEQ ID NO: 8099 - protein, 130 aa, Homo sapiens
MLKRAQKMKSKKLKKKIDSTVRLALFKNNENKVSLPKSPKMVQPRRDGYFEGIEEDPIHKDTTANEKLERNREYTYQWLHTQVGVHETTSSRNMKCNHFLPELDPDVLNGGRVQLVVRNVLKVTEKCCRH

SEQ ID NO: 8100 - DNA, 604 bp, Homo sapiens
tgtgcgtctagccttattcaaaaacaatgaaaataaagtgtctcttccaaaatcaccaaagatggtacagcccagaagagatggttactttgaaggtatagaagaagaccctatccacaaagataccactgcaaatgaaaaattagaacggaatagagaatatacataccaatggcttcacacacaggttggggttcatgaaacgactagttccagaaatatgaaatgcaatcactttttgcctgagttagatccagatgtacttaatggtggaagagttcagcttgtggcaagacttgtaagcagagaagacacggatttagaccttttttccatgaccaatggaagtgctttgtctgtgaacagagaaaaaaaaaatcaggcacacagacactcagcaggatcttcaagtaagttgtggtttccttcaaaattaatttagaaatcacaaacgaattgatggaacctaatgccaacaagcattctttttcagatagggggtaggatgccagcaacctgaactgcccaaaaatgtgtatttaaattttttctttctttaaatatcctcttttgatataaacaaaattaaattatttctaaaatt

SEQ ID NO: 8101 - protein, 126 aa, Homo sapiens
MVQPRRDGYFEGIEEDPIHKDTTANEKLERNREYTYQWLHTQVGVHETTSSRNMKCNHFLPELDPDVLNGGRVQLVARLVSREDTDLDLFSMTNGSALSVNREKKNQAHRHSAGSSSKLWFPSKLI

SEQ ID NO: 8102 - DNA, 1442 bp, Homo sapiens
gtattaaagggaccggagcggggcagttcccgacgccgcagcgctcgctttcccttccctcctctctggccctccctcctcccacccactggctccctcccccagcgctctccagtttctgtgccccaggagctacgcgacagtcttccaggattatggagtttctgagcgagaagtttgccctcaagagccctccgagtaaaaacagtgacttttacatgggcgcaggaggtcctctggagcacgttatggagacgctggacaatgagtccttttacagcaaagcgtctgcaggcaaatgcgtgcaggccttcggacccctgccccgcgccgagcatcacgtgcgcttggagaggacctcgccctgtcaggacagcagcgtgaactatgggatcactaaagtagaaggacagccccttcacaccgaactgaatagagctatggacaactgtaacagtctccgaatgtctcccgtgaaagggatgcaagagaagggagagctggatgaacttggggataaatgtgatagcaatgtatccagcagtaagaaacggaggcaccgaaccaccttcaccagtttgcagctagaggagctggagaaagtctttcagaaaactcattacccggatgtgtatgtcagagaacagcttgctctgaggacagagctcactgaggccagggtccaggtttggtttcaaaatcgaagggccaaatggagaaaaagggaacgttatggccaaatacaacaagcgaaaagccattttgctgccacctatgatatatcagttttgccaaggactgacagctacccacagattcagaacaatttgtgggcaggaaatgcaagtggtggttctgtggttacttcatgcatgttaccacgtgacacttcctcctgtatgacaccttattctcactcgcctcggacagattccagttacacggggttttcaaaccaccagaaccagttcagccacgtgcccctcaacaattttttcactgactctcttcttactggggcaaccaatggacatgcatttgaaacaaagccagagtttgaaaggaggtcttccagtatcgcagttcttcgaatgaaagccaaggagcacaccgccaatatttcatgggccatgtaacatacagtactcttttatttttcttttaatagcaaagttaaacattcttatttctcatatttaaaggataccacaataagctgctgtgtgtggaattgctaaaggtcaagatattcagtgagaccagcttaaatgaatagttgttatttaacattaaaatctaagaatgaacctctgaaaagactaaataggtttaccatgtgccagtctccacaaaccctgttttagtagtaaggttttctttttctattgtacaagtcaatgaaatatgatcacgcaacttattaaagaataaatgtgttaaac

SEQ ID NO: 8103 - protein, 326 aa, Homo sapiens; identical to SEQ ID NO: 912

SEQ ID NO: 8104 - DNA, 1525 bp, Homo sapiens
gtattaaagggaccggagcggggcagttcccgacgccgcagcgctcgctttcccttccctcctctctggccctccctcctcccacccactggctccctcccccagcgctctccagtttctgtgccccaggagctacgcgacagtcttccaggattatggagtttctgagcgagaagtttgccctcaagagccctccgagtaaaaacagtgacttttacatgggcgcaggaggtcctctggagcacgttatggagacgctggacaatgagtccttttacagcaaagcgtctgcaggcaaatgcgtgcaggccttcggacccctgccccgcgccgagcatcacgtgcgcttggagaggacctcgccctgtcaggacagcagcgtgaactatgggatcactaaagtagaaggacagccccttcacaccgaactgaatagagctatggacaactgtaacagtctccgaatgtctcccgtgaaagggatgcaagagaagggagagctggatgaacttggggataaatgtgatagcaatgtatccagcagtaagaaacggaggcaccgaaccaccttcaccagtttgcagctagaggagctggagaaagtctttcagaaaactcattacccggatgtgtatgtcagagaacagcttgctctgaggacagagctcactgaggccagggtccaggtttggtttcaaaatcgaagggccaaatggagaaaaagggaacgttatggccaaatacaacaagcgaaaagccattttgctgccacctatgatatatcagttttgccaaggactgacagctacccacagattcagaacaatttgtgggcaggaaatgcaagtggtggttctgtggttacttcatgcatgttaccacgtgacacttcctcctgtatgacaccttattctcactcgcctcggacagattccagttacacggggttttcaaaccaccagaaccagttcagccacgtgcccctcaacaattttttcactgactctcttcttactggggcaaccaatggacatgcatttgaaacaaagccagagtttgaaaggaggtcttccagtatcgcagttcttcgaatgaaagccaaggagcacaccgccaatatttcatgggccatgtaacatacagtactcttttatttttcttttaatagcaaagttaaacattcttatttctcatatttaaaggataccacaataagctgctgtgtgtggaattgctaaaggtcaagatattcagtgagaccagcttaaatgaatagttgttatttaacattaaaatctaagaatgaacctctgaaaagactaaataggtttaccatgtgccagtctccacaaaccctgttttagtagtaaggttttctttttctattgtacaagtcaatgaaatatgatcacgcaacttattaaagaataaatgtgttaaacaaattcttctgttatagattgatttatgttacttctgtataacaagaaatctcatgtaaaataatacctgataaagaaggaaa

SEQ ID NO: 8105 - protein, 326 aa, Homo sapiens; identical to SEQ ID NO: 912

SEQ ID NO: 8106 - DNA, 519 bp, Homo sapiens
agactgctgtgctagcaatcagcgagactccgtgggcgtaggaccctccgagccaggcatcagctatcaaaacttatgggaaatggaattgaagacaactacttctagaattggtgcatggaagcttctcataggtgattagccacactcttcttctgtcaacctggtgcagaaaagcttgaagaccttggaaatcacatattgatgatggaggagatacaagaatgaaggaccctgggttcctgaatcaacactctaagaagagactccttgaaatcaagagcactcattttgacattgcaaacggaaaaattcacttctatcaggtttgaaccaatatatagtttagggtttttaaaaaataactgttagcatgactttaactaatacacatgccatacaggatcagacctctgtgactttgcttttacagtctgctctgtctggaggggagtttcatctttgccatccttaatgatatagcatagacgctatgtcctccagaaacttccttggcac

SEQ ID NO: 8107 - protein, 35 aa, Homo sapiens [sequence omitted]

SEQ ID NO: 8108 - DNA, 577 bp, Homo sapiens
ggaaatggaattgaagacaactacttctagaattggtgcatggaagcttctcataggtgattagccacactcttcttctgtcaacctggtgcagaaaagcttgaagaccttggaaatcacatattgatgatggaggagatacaagaatgaaggaccctgggttcctgaatcaacactctaagaagagactccttgaaatcaagagcactcattttgacattgcaaacggaaaaattcacttctatcaggggactgatcggagtcaaaccatatgctgtggcttttgctccatggaaatctcaactatactgcaagaataattattcctacttaatgaagttacagaagagaatgtggtgctggacggtactgactgcatggggagaggccataccacagaaacctcaatctgcctgagccgtgactctgagagctggagtaccactggacaaggtctttggtacttcctcctgcattcattctccttcctgctgccctgtgaagaaggtgccttgcttcacctttgccttctactatgactgtaagtttcctgaagcctcgccagacatgctgaact

SEQ ID NO: 8109 - protein, 57 aa, Homo sapiens
MKDPGFLNQHSKKRLLEIKSTHFDIANGKIHFYQGTDRSQTICCGFCSMEISTILQE

SEQ ID NO: 8110 - DNA, 5823 bp, Homo sapiens
ccaaagtccaggctgagtcatatggtaggtgctgtttggaatatctagcctgcctgccttgcagattcaaatgcctcgggcaggagggtgagctagctgccgatcctgctctgctcctgggtttgctgtgtggcccttggtagaacgtcatgacatgaataccttaagcctgcccctgaacatacgccgaggggggtcagacaccaacctcaactttgatgtcccggatggcatcctggacttccacaaggtcaaactcactgcagacagcctgaagcaaaaaattctaaaggtaacagagcagataaaaattgagcaaacatcgcgcgatgggaatgttgcggagtatctgaaactagtgaacaacgcagacaagcagcaggcgggacgtatcaagcaagtctttgagaagaagaatcagaaatcagctcactccatcgcccagctgcagaagaagttagagcagtatcatcgaaagctcagagagatcgagcagaatggagcctctaggagctcaaaggacatttccaaagaccacctgaaggatatacatcgctctttgaaagatgcccacgtgaaatctcgaactgccccccattgcatggagagcagcaaatcgggcatgccaggggtctcacttactccacctgtgttcgttttcaataagtccagagagtttgccaacctgatccggaataagtttggcagcgccgacaacattgctcacttgaaaaattccttagaggagtttaggccagaggcgagtgccagggcctacgggggcagcgctaccatcgtgaacaaacccaagtatggcagtgatgatgaatgttcgagtggcacgtcaggctcggccgacagtaacggaaaccagtcgtttggggctggtggagccagcacactggacagccagggcaagctcgccgtgatcctggaggaactgagggagatcaaggatacccaagctcagctggctgaggacatcgaggcactgaaggtgcagtttaagagagaatatggttttatttctcagaccctgcaagaggaaagatacaggtatgagcgactggaggaccagctgcatgacctgacggacctgcatcagcatgagacagccaacctgaagcaggagctggccagcattgaggagaaggtggcctaccaggcctacgagcgctcgcgggacatccaggaagccttggaatcctgccagactcgcatttctaagctggagctccaccagcaagagcagcaagctctgcagacagacaccgtgaatgctaaagttctcctggggaggtgcatcaacgtgatcctggccttcatgactgtcatcttagtgtgtgtgtccaccatcgcgaagttcgtctcacccatgatgaagagtcgctgccacattcttggcaccttctttgccgtgactcttcttgctatattttgtaaaaactgggaccatatcctgtgtgccatagaaaggatgataataccaagatgaagccactggttcctgccttcaagttctttcaagtttttattttaaagaaaactctgtgcatactaccaaattttacagtgaatgattgtgcggactcgtgtgtaagaaaaactaggactgtgtggtgtaaataactacaattctcttaactccgtagcagttgccaactcagtccttgtacttcgttaacacgaatctgtttcagagctctcctaccttgctcactgccttaatcagaccgatttcctgcccacctgaccagcccagcgtggtaaacctctgtatattgagaccttggcataattggtgatcctgaagaaagaggtctctctcctaagtctctgtcagaattgagcttcacaattgctaatggttgttttctgtgagtcctataaaaagcaaggatatgcatgattcagggaatgaagaatcacaggcttgggcagtgttaaacactgtggcctatggtccccgtgtgatccaccctgcttctctccaggggaccataggtcccgtcatgtactcagtgtccacagcagtcagtcgtgtatgaccctgtaacgtggaaatcttatcacacacctgttatccaacaagtctacctgaggggttttgttacactttaaatgggaaggcatagggatttatgaatggggctttcaccttctcatacccaggcaaccaacacctgattttgtctcaactggctagcaaatgcccagccttcagagtgtgcaggaatgttttcaaatccctcatcagactgtgactttaacattaatttggaatcctgtgagcactactctgaaggtttgtgttttggcaaatcttttttcttttttgagacagggctctgctaaatattgctcaggctggttgcaaactccttgcttcaagggatcctcccacctcagcctcccaagcagccgggactgcaggcacaagccaccatgcctggctgttttttggcaaatcttgattgtgataagcccccctggaggatatgattcactttatgtgattcatcttattcacaggtctgtgagggactgcaaagcttactcaggaaatgaaaacaaatgatggtcatgttgcagttttttccttgaaggacaaccgaaccatagcctctaaagttcaagtgcactgaggtgtcggaacgctgaaagcatgaggaaacgaggacgtagggtgtgactgaatggtggctagattagtgggagcagttcacctggatgaagattgagagcatcgtctttgagaagtgaaagactagcaagaataaaataaattaagtccagtgtttgagccaaggttgccacctgtctcttaacatctcactgaacataagtcctgaggtattaggacgaccatactgcctctgagctgaaaacattcaaaagttcacatccctgtttgggggataccattcaccgccttcagcccagatgatactttcctttaaatctgtgtctctgtgtgtataacaaagaggaagatggaaacaatgttcatggaaactgctgttgagccccttgtcccaccactcccgccatctgctgcaggcaggaaggcatgtgagtgtacgttttcttccaggagacatcaggtccccctggattcaaattaagtgcaatattttgcaaacagctcttcttagggaaatctcctgaaggaaaaaaatgtgacagaatgttccatagtctgagagaatggaatcgttgagcatttagtacaagtccagtgtgtgtgagcgggacttaggcagctcaagcttgcttttttttttaagcgtacaattgagtggttttagtaaattcacaaacttgttcaaccatcaccactatctaattccagactcacgcttttttaaacaataaatgtcatttcatgaaatctttggtgataaagtattttggattcagagaagagctcccttaccagtcccaccctgatctcatggctgtctctcctttcattgtcagactccccctggtctaccgcgttgatgtgtatacactgatctttcaagtctgggagacagataaggaggccaggtgcaaggcagggaggcagagagaatgttgtgcttcctttagcttttgtatttcgatggccagcattaccctttacctgtgggcatcagactcagcgtgggctgagtgctgagtgtaacttacactcctaaatcaagctggggcctgggtgggcccctcttggtatctgtgaatctttccaagcaccacttcggacacaccagggattgagtgctgctgttagtttagagaaggagagatgtctaacccttgaggtgaagggctctgggagggtccaagaagacgtaggcttcattttcacaccagcccacaccattccagtgctcagcctagcaaatgtgctttaatgcacacttctcagacctgtgatccgtgtatcttctccccagtgacagaagtagagaagagaatggaaagcagcacactccgtcccctctagtctggagctgttaacagaatctgctagaaactagctttattctaacataccgtaggatctaaatcctcctacctggatcatgaattcctttgaaataattcatattttcattgactctcactaaatgtcaaataaccttgttttcacttggataggctcaacctacctggcatatttattttgcagtcttgttgaaagttcatgaaactttgtactttttaataagatgatacactcgaaggaaacttttaatctctgcagtttattctctcttaaggaataaacactcccactgtttgttctcttcaatgtgtaaggagattaaatgacattttagaaatattacaattaaaaatagtgatgtagctgtaacatatgctggaattggatatttaatttatgtttgtgtcaactataatcctttccccacccctttcatttatggtaaacatcttgggcaaacccaaagatggaaagtgcttgttgggtgggtaagcaccacctggtctctcagcaaacactcctgagtggttgaagatgctggacattggattctagcactgggtttatctggtgacatagtctcctgtgggtcttgagttggttatttcaagctcaaactctgaatatgattaaaccagaacaccccacccccaactgccaaaaaaaaaaaaaaaaaatggaaatccataatgaaacagcaaaaaagtactccgttgctgggtttggacaatgaacatgggattagtcccaagtttgtagcttggaacggtagcatttttgcctgcgtgatccttgtcagctattcacagaaggaaatcttccgaaactccgtctttcatttcagccggtgaggctgttatccttctctgtcaattagcattcatgtggttttcgctctttccagctctgtcactcttgttttcatttaaatattgccccactctgtgtttattgccttgccatttctctagcatatcaggtttaattatgggctcagtaataatgaggaactagcttccctcaggcaactaattacttttgtcttttttggtcggattgtaccaaattattttgcattgaatgggaatgtttttgcagtgaatccagatatagttgtattggtttggaaaaacatttaaatatatttattcatatgaacatgtgtgattaaacaacctattttacatatttctgtaattctgaggagtgggctgggggtaggaagaaatggcaccacttaaaattcagggcttatatgaagaggtgttttaaggttagcacatgcacaaaggaacgagttggtttaaaaagataaatcactgcaaagaatgaaattggcttattcacatcaaaactagataagatgctaaaaaaaaaagatatgaaacagaactaacctatagtttcctgaaatcagtacagtttaatttataagaagctagaaagtaatgcaccttgattgttttaggaatgatttatgtgttgcaattttaatttatttaaagcatgtctactgtgtttgtcctaagagaaatatttcaacaaaacgtgctctgtgtttaagatatgtttaggcagtagttagcaactctgaaagtagaaactggaaatgtttattgtgaggcttgttgcagaatttccattttgtgagttactacttagtttcatgtcagcctaaaattgtaaattccctgtagatcttcaccccattgtggtgtcatcaatgaatccaaagcaggtgccattatttttttaaataaacacttgatgttagctttggtgttaaataaagaggtagatttcttaaattttcacatttgttggagccc

SEQ ID NO: 8111 - protein, 446 aa, Homo sapiens
MNTLSLPLNIRRGGSDTNLNFDVPDGILDFHKVKLTADSLKQKILKVTEQIKIEQTSRDGNVAEYLKLVNNADKQQAGRIKQVFEKKNQKSAHSIAQLQKKLEQYHRKLREIEQNGASRSSKDISKDHLKDIHRSLKDAHVKSRTAPHCMESSKSGMPGVSLTPPVFVFNKSREFANLIRNKFGSADNIAHLKNSLEEFRPEASARAYGGSATIVNKPKYGSDDECSSGTSGSADSNGNQSFGAGGASTLDSQGKLAVILEELREIKDTQAQLAEDIEALKVQFKREYGFISQTLQEERYRYERLEDQLHDLTDLHQHETANLKQELASIEEKVAYQAYERSRDIQEALESCQTRISKLELHQQEQQALQTDTVNAKVLLGRCINVILAFMTVILVCVSTIAKFVSPMMKSRCHILGTFFAVTLLAIFCKNWDHILCAIERMIIPR

SEQ ID NO: 8112 - DNA, 3452 bp, Homo sapiens
tattgggtacagtgcagggcgtggagtttctctgagacaaacacaggaataccccgagataatgtgagcagtatctccaaagtccaggctgagtcatatggtaggtgctgtttggaatatctagcctgcctgccttgcagattcaaatgcctcgggcaggagggtgagctagctgccgatcctgcttcaggaaatgaaaacaaatgatggtcatgttgcagttttttccttgaaggacaaccgaaccatagcctctaaagttcaagtgcactgaggtgtcggaacgctgaaagcatgaggaaacgaggacgtagggtgtgactgaatggtggctagattagtgggagcagttcacctggatgaagattgagagcatcgtctttgagaagtgaaagactagcaagaataaaataaattaagtccagtgtttgagccaaggttgccacctgtctcttaacatctcactgaacataagtcctgaggtattaggacgaccatactgcctctgagctgaaaacattcaaaagttcacatccctgtttgggggataccattcaccgccttcagcccagatgatactttcctttaaatctgtgtctctgtgtgtataacaaagaggaagatggaaacaatgttcatggaaactgctgttgagccccttgtcccaccactcccgccatctgctgcaggcaggaaggcatgtgagtgtacgttttcttccaggagacatcaggtccccctggattcaaattaagtgcaatattttgcaaacagctcttcttagggaaatctcctgaaggaaaaaaatgtgacagaatgttccatagtctgagagaatggaatcgttgagcatttagtacaagtccagtgtgtgtgagcgggacttaggcagctcaagcttgcttttttttttaagcgtacaattgagtggttttagtaaattcacaaacttgttcaaccatcaccactatctaattccagactcacgcttttttaaacaataaatgtcatttcatgaaatctttggtgataaagtattttggattcagagaagagctcccttaccagtcccaccctgatctcatggctgtctctcctttcattgtcagactccccctggtctaccgcgttgatgtgtatacactgatctttcaagtctgggagacagataaggaggccaggtgcaaggcagggaggcagagagaatgttgtgcttcctttagcttttgtatttcgatggccagcattaccctttacctgtgggcatcagactcagcgtgggctgagtgctgagtgtaacttacactcctaaatcaagctggggcctgggtgggcccctcttggtatctgtgaatctttccaagcaccacttcggacacaccagggattgagtgctgctgttagtttagagaaggagagatgtctaacccttgaggtgaagggctctgggagggtccaagaagacgtaggcttcattttcacaccagcccacaccattccagtgctcagcctagcaaatgtgctttaatgcacacttctcagacctgtgatccgtgtatcttctccccagtgacagaagtagagaagagaatggaaagcagcacactccgtcccctctagtctggagctgttaacagaatctgctagaaactagctttattctaacataccgtaggatctaaatcctcctacctggatcatgaattcctttgaaataattcatattttcattgactctcactaaatgtcaaataaccttgttttcacttggataggctcaacctacctggcatatttattttgcagtcttgttgaaagttcatgaaactttgtactttttaataagatgatacactcgaaggaaacttttaatctctgcagtttattctctcttaaggaataaacactcccactgtttgttctcttcaatgtgtaaggagattaaatgacattttagaaatattacaattaaaaatagtgatgtagctgtaacatatgctggaattggatatttaatttatgtttgtgtcaactataatcctttccccacccctttcatttatggtaaacatcttgggcaaacccaaagatggaaagtgcttgttgggtgggtaagcaccacctggtctctcagcaaacactcctgagtggttgaagatgctggacattggattctagcactgggtttatctggtgacatagtctcctgtgggtcttgagttggttatttcaagctcaaactctgaatatgattaaaccagaacaccccacccccaactgccaaaaaaaaaaaaaaaaaatggaaatccataatgaaacagcaaaaaagtactccgttgctgggtttggacaatgaacatgggattagtcccaagtttgtagcttggaacggtagcatttttgcctgcgtgatccttgtcagctattcacagaaggaaatcttccgaaactccgtctttcatttcagccggtgaggctgttatccttctctgtcaattagcattcatgtggttttcgctctttccagctctgtcactcttgttttcatttaaatattgccccactctgtgtttattgccttgccatttctctagcatatcaggtttaattatgggctcagtaataatgaggaactagcttccctcaggcaactaattacttttgtcttttttggtcggattgtaccaaattattttgcattgaatgggaatgtttttgcagtgaatccagatatagttgtattggtttggaaaaacatttaaatatatttattcatatgaacatgtgtgattaaacaacctattttacatatttctgtaattctgaggagtgggctgggggtaggaagaaatggcaccacttaaaattcagggcttatatgaagaggtgttttaaggttagcacatgcacaaaggaacgagttggtttaaaaagataaatcactgcaaagaatgaaattggcttattcacatcaaaactagataagatgctaaaaaaaaaagatatgaaacagaactaacctatagtttcctgaaatcagtacagtttaatttataagaagctagaaagtaatgcaccttgattgttttaggaatgatttatgtgttgcaattttaatttatttaaagcatgtctactgtgtttgtcctaagagaaatatttcaacaaaacgtgctctgtgtttaagatatgtttaggcagtagttagcaactctgaaagtagaaactggaaatgtttattgtgaggcttgttgcagaatttccattttgtgagttactacttagtttcatgtcagcctaaaattgtaaattccctgtagatcttcaccccattgtggtgtcatcaatgaatccaaagcaggtgccattatttttttaaataaacacttgatgttagctttggtgttaaataaagaggtagatttcttaaattttcacatttgttggagccc

SEQ ID NO: 8113 - protein, 92 aa, Homo sapiens [sequence omitted]

SEQ ID NO: 8114 - DNA, 5889 bp, Homo sapiens
agaggcaacagctgcagcagccgcgccgccccctcgcccgcggctcccagggtgatcccgagcacagccggtggctcgcggcgcggcagccccagaagacgggaaagttcgcggccggagcgcggagatgccgggcagcgacacggcgctcaccgtggaccggacctactcgtaccccggccggcaccaccgctgcaagagccgggtagaacgtcatgacatgaataccttaagcctgcccctgaacatacgccgaggggggtcagacaccaacctcaactttgatgtcccggatggcatcctggacttccacaaggtcaaactcactgcagacagcctgaagcaaaaaattctaaaggtaacagagcagataaaaattgagcaaacatcgcgcgatgggaatgttgcggagtatctgaaactagtgaacaacgcagacaagcagcaggcgggacgtatcaagcaagtctttgagaagaagaatcagaaatcagctcactccatcgcccagctgcagaagaagttagagcagtatcatcgaaagctcagagagatcgagcagaatggagcctctaggagctcaaaggacatttccaaagaccacctgaaggatatacatcgctctttgaaagatgcccacgtgaaatctcgaactgccccccattgcatggagagcagcaaatcgggcatgccaggggtctcacttactccacctgtgttcgttttcaataagtccagagagtttgccaacctgatccggaataagtttggcagcgccgacaacattgctcacttgaaaaattccttagaggagtttaggccagaggcgagtgccagggcctacgggggcagcgctaccatcgtgaacaaacccaagtatggcagtgatgatgaatgttcgagtggcacgtcaggctcggccgacagtaacggaaaccagtcgtttggggctggtggagccagcacactggacagccagggcaagctcgccgtgatcctggaggaactgagggagatcaaggatacccaagctcagctggctgaggacatcgaggcactgaaggtgcagtttaagagagaatatggttttatttctcagaccctgcaagaggaaagatacaggtatgagcgactggaggaccagctgcatgacctgacggacctgcatcagcatgagacagccaacctgaagcaggagctggccagcattgaggagaaggtggcctaccaggcctacgagcgctcgcgggacatccaggaagccttggaatcctgccagactcgcatttctaagctggagctccaccagcaagagcagcaagctctgcagacagacaccgtgaatgctaaagttctcctggggaggtgcatcaacgtgatcctggccttcatgactgtcatcttagtgtgtgtgtccaccatcgcgaagttcgtctcacccatgatgaagagtcgctgccacattcttggcaccttctttgccgtgactcttcttgctatattttgtaaaaactgggaccatatcctgtgtgccatagaaaggatgataataccaagatgaagccactggttcctgccttcaagttctttcaagtttttattttaaagaaaactctgtgcatactaccaaattttacagtgaatgattgtgcggactcgtgtgtaagaaaaactaggactgtgtggtgtaaataactacaattctcttaactccgtagcagttgccaactcagtccttgtacttcgttaacacgaatctgtttcagagctctcctaccttgctcactgccttaatcagaccgatttcctgcccacctgaccagcccagcgtggtaaacctctgtatattgagaccttggcataattggtgatcctgaagaaagaggtctctctcctaagtctctgtcagaattgagcttcacaattgctaatggttgttttctgtgagtcctataaaaagcaaggatatgcatgattcagggaatgaagaatcacaggcttgggcagtgttaaacactgtggcctatggtccccgtgtgatccaccctgcttctctccaggggaccataggtcccgtcatgtactcagtgtccacagcagtcagtcgtgtatgaccctgtaacgtggaaatcttatcacacacctgttatccaacaagtctacctgaggggttttgttacactttaaatgggaaggcatagggatttatgaatggggctttcaccttctcatacccaggcaaccaacacctgattttgtctcaactggctagcaaatgcccagccttcagagtgtgcaggaatgttttcaaatccctcatcagactgtgactttaacattaatttggaatcctgtgagcactactctgaaggtttgtgttttggcaaatcttttttcttttttgagacagggctctgctaaatattgctcaggctggttgcaaactccttgcttcaagggatcctcccacctcagcctcccaagcagccgggactgcaggcacaagccaccatgcctggctgttttttggcaaatcttgattgtgataagcccccctggaggatatgattcactttatgtgattcatcttattcacaggtctgtgagggactgcaaagcttactcaggaaatgaaaacaaatgatggtcatgttgcagttttttccttgaaggacaaccgaaccatagcctctaaagttcaagtgcactgaggtgtcggaacgctgaaagcatgaggaaacgaggacgtagggtgtgactgaatggtggctagattagtgggagcagttcacctggatgaagattgagagcatcgtctttgagaagtgaaagactagcaagaataaaataaattaagtccagtgtttgagccaaggttgccacctgtctcttaacatctcactgaacataagtcctgaggtattaggacgaccatactgcctctgagctgaaaacattcaaaagttcacatccctgtttgggggataccattcaccgccttcagcccagatgatactttcctttaaatctgtgtctctgtgtgtataacaaagaggaagatggaaacaatgttcatggaaactgctgttgagccccttgtcccaccactcccgccatctgctgcaggcaggaaggcatgtgagtgtacgttttcttccaggagacatcaggtccccctggattcaaattaagtgcaatattttgcaaacagctcttcttagggaaatctcctgaaggaaaaaaatgtgacagaatgttccatagtctgagagaatggaatcgttgagcatttagtacaagtccagtgtgtgtgagcgggacttaggcagctcaagcttgcttttttttttaagcgtacaattgagtggttttagtaaattcacaaacttgttcaaccatcaccactatctaattccagactcacgcttttttaaacaataaatgtcatttcatgaaatctttggtgataaagtattttggattcagagaagagctcccttaccagtcccaccctgatctcatggctgtctctcctttcattgtcagactccccctggtctaccgcgttgatgtgtatacactgatctttcaagtctgggagacagataaggaggccaggtgcaaggcagggaggcagagagaatgttgtgcttcctttagcttttgtatttcgatggccagcattaccctttacctgtgggcatcagactcagcgtgggctgagtgctgagtgtaacttacactcctaaatcaagctggggcctgggtgggcccctcttggtatctgtgaatctttccaagcaccacttcggacacaccagggattgagtgctgctgttagtttagagaaggagagatgtctaacccttgaggtgaagggctctgggagggtccaagaagacgtaggcttcattttcacaccagcccacaccattccagtgctcagcctagcaaatgtgctttaatgcacacttctcagacctgtgatccgtgtatcttctccccagtgacagaagtagagaagagaatggaaagcagcacactccgtcccctctagtctggagctgttaacagaatctgctagaaactagctttattctaacataccgtaggatctaaatcctcctacctggatcatgaattcctttgaaataattcatattttcattgactctcactaaatgtcaaataaccttgttttcacttggataggctcaacctacctggcatatttattttgcagtcttgttgaaagttcatgaaactttgtactttttaataagatgatacactcgaaggaaacttttaatctctgcagtttattctctcttaaggaataaacactcccactgtttgttctcttcaatgtgtaaggagattaaatgacattttagaaatattacaattaaaaatagtgatgtagctgtaacatatgctggaattggatatttaatttatgtttgtgtcaactataatcctttccccacccctttcatttatggtaaacatcttgggcaaacccaaagatggaaagtgcttgttgggtgggtaagcaccacctggtctctcagcaaacactcctgagtggttgaagatgctggacattggattctagcactgggtttatctggtgacatagtctcctgtgggtcttgagttggttatttcaagctcaaactctgaatatgattaaaccagaacaccccacccccaactgccaaaaaaaaaaaaaaaaaatggaaatccataatgaaacagcaaaaaagtactccgttgctgggtttggacaatgaacatgggattagtcccaagtttgtagcttggaacggtagcatttttgcctgcgtgatccttgtcagctattcacagaaggaaatcttccgaaactccgtctttcatttcagccggtgaggctgttatccttctctgtcaattagcattcatgtggttttcgctctttccagctctgtcactcttgttttcatttaaatattgccccactctgtgtttattgccttgccatttctctagcatatcaggtttaattatgggctcagtaataatgaggaactagcttccctcaggcaactaattacttttgtcttttttggtcggattgtaccaaattattttgcattgaatgggaatgtttttgcagtgaatccagatatagttgtattggtttggaaaaacatttaaatatatttattcatatgaacatgtgtgattaaacaacctattttacatatttctgtaattctgaggagtgggctgggggtaggaagaaatggcaccacttaaaattcagggcttatatgaagaggtgttttaaggttagcacatgcacaaaggaacgagttggtttaaaaagataaatcactgcaaagaatgaaattggcttattcacatcaaaactagataagatgctaaaaaaaaaagatatgaaacagaactaacctatagtttcctgaaatcagtacagtttaatttataagaagctagaaagtaatgcaccttgattgttttaggaatgatttatgtgttgcaattttaatttatttaaagcatgtctactgtgtttgtcctaagagaaatatttcaacaaaacgtgctctgtgtttaagatatgtttaggcagtagttagcaactctgaaagtagaaactggaaatgtttattgtgaggcttgttgcagaatttccattttgtgagttactacttagtttcatgtcagcctaaaattgtaaattccctgtagatcttcaccccattgtggtgtcatcaatgaatccaaagcaggtgccattatttttttaaataaacacttgatgttagctttggtgttaaataaagaggtagatttcttaaattttcacatttgttggagccc

SEQ ID NO: 8115 - protein, 477 aa, Homo sapiens
MPGSDTALTVDRTYSYPGRHHRCKSRVERHDMNTLSLPLNIRRGGSDTNLNFDVPDGILDFHKVKLTADSLKQKILKVTEQIKIEQTSRDGNVAEYLKLVNNADKQQAGRIKQVFEKKNQKSAHSIAQLQKKLEQYHRKLREIEQNGASRSSKDISKDHLKDIHRSLKDAHVKSRTAPHCMESSKSGMPGVSLTPPVFVFNKSREFANLIRNKFGSADNIAHLKNSLEEFRPEASARAYGGSATIVNKPKYGSDDECSSGTSGSADSNGNQSFGAGGASTLDSQGKLAVILEELREIKDTQAQLAEDIEALKVQFKREYGFISQTLQEERYRYERLEDQLHDLTDLHQHETANLKQELASIEEKVAYQAYERSRDIQEALESCQTRISKLELHQQEQQALQTDTVNAKVLLGRCINVILAFMTVILVCVSTIAKFVSPMMKSRCHILGTFFAVTLLAIFCKNWDHILCAIERMIIPR

SEQ ID NO: 8116 - DNA, 1017 bp, Homo sapiens
tattgggtacagtgcagggcgtggagtttctctgagacaaacacaggaataccccgagataatgtgagcagtatctccaaagtccaggctgagtcatatggtaggtgctgtttggaatatctagcctgcctgccttgcagattcaaatgcctcgggcaggagggtgagctagctgccgatcctgcttcaggaaatgaaaacaaatgatggtcatgttgcagttttttccttgaaggacaaccgaaccatagcctctaaagttcaagtgcactgaggtgtcggaacgctgaaagcatgaggaaacgaggacgtagggtgtgactgaatggtggctagattagtgggagcagttcacctggatgaagattgagagcatcgtctttgagaagtgaaagactagcaagaataaaataaattaagtccagtgtttgagccaaggttgccacctgtctcttaacatctcactgaacataagtcctgaggtattaggacgaccatactgcctctgagctgaaaacattcaaaagttcacatccctgtttgggggataccattcaccgccttcagcccagatgatactttcctttaaatctgtgtctctgtgtgtataacaaagaggaagatggaaacaatgttcatggaaactgctgttgagccccttgtcccaccactcccgccatctgctgcaggcaggaaggcatgtgagtgtacgttttcttccaggagacatcaggtccccctggattcaaattaagtgcaatattttgcaaacagctcttcttagggaaatctcctgaaggaaaaaaatgtgacagaatgttccatagtctgagagaatggaatcgttgagcatttagtacaagtccagtgtgtgtgagcgggacttaggcagctcaagcttgcttttttttttaagcgtacaattgagtggttttagtaaattcacaaacttgttcaaccatcaccactatctaattccagactcacgcttttttaaacaataaatgtcatttcatg

SEQ ID NO: 8117 - protein, 43 aa, Homo sapiens
METMFMETAVEPLVPPLPPSAAGRKACECTFSSRRHQVPLDSN

SEQ ID NO: 8118 - DNA, 1593 bp, Homo sapiens
gaagaacagcaagacaggcagcctgcctgtgagcgagatctacagcttcatgaaggagcacttcccctacttcaagacggcccccgacgggtggaagaactcggtgcggcacaacctgtctctgaacaagtgcttcgagaaggtggacaagcaacccagcatcccccgaccccttgacactcctccgaggcctgagccgcaatgcctgcccgtgttgagtgagacttctccatcctggatcctggctgcgtgacctcagtgacctgcaccccattttgggacaccttggtgcattaaggaaacaccctggggtgaaagcccttgaattcatcctcatgggaaatggctgagtggatcaaacctcagccgcagcctccgggggacaggcccagggcgggaaatggagccggagaagcttgagcctctctcttggacaggacaagctgaactctgaaatgggagccggtccaggtggccttcagccccacctttccgatagtctgttagaattttattagcgcagattcctgggccatgccgggtaccgtgaccttgtgtaaatttatttatatttattgtggcccatccaccccacttctgcaaacccatcccgaggcctctggaatgggactccttctccctccctacctcccagccatcctaactcctacaggccagagaatgacatctctaactggctcataatcccttggcagcctggggctactttttagaaccagcaagcactgttgatactgtgaaacatcccattttttccgtattagagaccagatatttttctacctgttcatgattcacatctcttcttgcatgtacctaagaggggcggtgccattgtttgggggcttggggggctttcaaaggggaaaatgcgatgggagagggaggaactggaggggggtgcttttgtactgggatttaagacacccctgatggaatgaaagccaactgaaccacgtaaagctcgaaccacgtggcaagtggtggacaaaacttcaacgcatgatatttattggcacttcctcacctccctttgccctgcagctgtttttatgcttctttttctctccttgctaattactgactccccaagtggcaagttccgcagatagctgggttagaagagagacaggggagtgagctagtcaaatgtgaaaaatgctctcccagcaaagctgagacaaaattggagaagctgcagcctcacgcaccatccccctctttccaccagatggatgttgacttggtgtctgggagttcccgaaccctagagccaggatgttctgtttaatcaacagctcagccagctgcctgggagttttggcattaagccccgccttgaagggcgagctttaagtttttcccagttctggaactttctaccgagtatccaccacccttagacacaatcccagtgctacccgtctgacctgcactgctcatctgctttgtgtaacatgacccctgataagatgttgaaactgttattcacaaagactccgtgtttgggcaacatcaagactgtaagtgtagaattgagcaactgtcttctatcaataaaggctgaatggc

SEQ ID NO: 8119 - protein, 67 aa, Homo sapiens
MKEHFPYFKTAPDGWKNSVRHNLSLNKCFEKVDKQPSIPRPLDTPPRPEPQCLPVLSETSPSWILAA

SEQ ID NO: 8120 - DNA, 2958 bp, Homo sapiens
aaattgcggaacgcgaggggcgagcgcgagggagcccccctccggaacccctgcccacccccggagcgccggcagcggcggccccgcgaggatcggctccaggagatgatagaaagtgacacctcatccataatgtcaggaattattcgaaactcagggcaaaatcaccacccctctccacaggaatacagggtcaagcagggcaggcttcctggcagaggcggcattgggctgtcagcctgagaccctttcatgcctggcctgccctgtcctgccctgccctgccctgccccacctcctgcccccagctgtctgatcgccatggccctgaagaacagcaagacaggcagcctgcctgtgagcgagatctacagcttcatgaaggagcacttcccctacttcaagacggcccccgacgggtggaagaactcggtgcggcacaacctgtctctgaacaagtgcttcgagaaggtggagaacaagatgagcggctcctcccgcaagggctgcctgtgggctctgaacctggcccgcatcgacaagatggaggaggagatgcacaagtggaagaggaaggacctggctgccatccaccggagtatggccaaccctgaggagttggacaagctgatctccgaccggcctgaaagctgccggcgccccggcaaaccgggggaaccagaggcccccgtgctgactcacgccaccacagtggccgtggcgcatggctgcctggctgtctcccagctcccaccccagccactgatgaccctgtccctgcagtcagtccccctgcaccaccaggtccagccccaggcacatcttgctccagactctccagcaccagcccagaccccgccactgcacgccctgccggacctcagccccagcccgctcccccaccccgccatgggaagggctcctgtagacttcatcaacatcagcaccgacatgaacactgaggtggatgccctcgacccgagcatcatggacttcgctctgcaggggaacctgtgggaggagatgaaggatgagggattcagcttggacacactgggcgcctttgcagactccccgcttggctgtgacctgggggcctcaggcctaacccctgcctcgggtggcagcgaccagtccttcccagacttgcaggtgacgggtctctacacagcgtactccactccggacagtgtggctgcatcgggcaccagctcctcctcccagtacctgggtgcacaggggaacaagcctatagccctgctttgagctgtcagcctcacctgccctggaaccccggcacccggcttgggcagagaactgactagaacagggtgttcccagaaggcaggtccctcattgtccccgaagcctctcctggacctgtggcgaagttgccggctggacagggaagcggttcccctcagcagcccctctccttctcgtgcctccccctggagcttccggagcagtttctgggggctcttccaagtcagaagaatggaggaaggtggacaagcaacccagcatcccccgaccccttgacactcctccgaggcctgagccgcaatgcctgcccgtgttgagtgagacttctccatcctggatcctggctgcgtgacctcagtgacctgcaccccattttgggacaccttggtgcattaaggaaacaccctggggtgaaagcccttgaattcatcctcatgggaaatggctgagtggatcaaacctcagccgcagcctccgggggacaggcccagggcgggaaatggagccggagaagcttgagcctctctcttggacaggacaagctgaactctgaaatgggagccggtccaggtggccttcagccccacctttccgatagtctgttagaattttattagcgcagattcctgggccatgccgggtaccgtgaccttgtgtaaatttatttatatttattgtggcccatccaccccacttctgcaaacccatcccgaggcctctggaatgggactccttctccctccctacctcccagccatcctaactcctacaggccagagaatgacatctctaactggctcataatcccttggcagcctggggctactttttagaaccagcaagcactgttgatactgtgaaacatcccattttttccgtattagagaccagatatttttctacctgttcatgattcacatctcttcttgcatgtacctaagaggggcggtgccattgtttgggggcttggggggctttcaaaggggaaaatgcgatgggagagggaggaactggaggggggtgcttttgtactgggatttaagacacccctgatggaatgaaagccaactgaaccacgtaaagctcgaaccacgtggcaagtggtggacaaaacttcaacgcatgatatttattggcacttcctcacctccctttgccctgcagctgtttttatgcttctttttctctccttgctaattactgactccccaagtggcaagttccgcagatagctgggttagaagagagacaggggagtgagctagtcaaatgtgaaaaatgctctcccagcaaagctgagacaaaattggagaagctgcagcctcacgcaccatccccctctttccaccagatggatgttgacttggtgtctgggagttcccgaaccctagagccaggatgttctgtttaatcaacagctcagccagctgcctgggagttttggcattaagccccgccttgaagggcgagctttaagtttttcccagttctggaactttctaccgagtatccaccacccttagacacaatcccagtgctacccgtctgacctgcactgctcatctgctttgtgtaacatgacccctgataagatgttgaaactgttattcacaaagactccgtgtttgggcaacatcaagactgtaagtgtagaattgagcaactgtcttctatcaataaaggctgaatggc

SEQ ID NO: 8121 - protein, 337 aa, Homo sapiens; identical to SEQ ID NO: 916

SEQ ID NO: 8122 - DNA, 2345 bp, Homo sapiens
ggggacctgcagtcgctgtcgtggctcacggcggtggatgtgcctcggctgcagcagatggcaagtggccgcgtggacctgggtggcccctgcgtgccacatccacacccaggtgccttggctggggtggccgacctgcatgtgggagccactccaagtccccttctccatggcccagcaggcatggccccccgaggcatgccaggtctgggccccataactggccacagagacagccagatgagccagttccccgtggggggccagccctcatctggcctgcaggacccgccgcatctgtactcacctgccacccaaccacagttcccgctccccccgggtgcccagcagtgccctcctgtgggcctctatggccccccatttggggtgcggcccccctacccccagccccacgtggctgtgcattcatctcaagaactgcaccccaaacactaccccaagcccatctactcgtacagctgtctgatcgccatggccctgaagaacagcaagacaggcagcctgcctgtgagcgagatctacagcttcatgaaggagcacttcccctacttcaagacggcccccgacgggtggaagaactcggtgcggcacaacctgtctctgaacaagtgcttcgagaaggtggagaacaagatgagcggctcctcccgcaagggctgcctgtgggctctgaacctggcccgcatcgacaagatggaggaggagatgcacaagtggaagaggaaggacctggctgccatccaccggagtatggccaaccctgaggagttggacaagctgatctccgaccggcctgaaagctgccggcgccccggcaaaccgggggaaccagaggcccccgtgctgactcacgccaccacagtggccgtggcgcatggctgcctggctgtctcccagctcccaccccagccactgatgaccctgtccctgcagtcagtccccctgcaccaccaggtccagccccaggcacatcttgctccagactctccagcaccagcccagaccccgccactgcacgccctgccggacctcagccccagcccgctcccccaccccgccatgggaagggctcctgtagacttcatcaacatcagcaccgacatgaacactgaggtggatgccctcgacccgagcatcatggacttcgctctgcaggggaacctgtgggaggagatgaaggatgagggattcagcttggacacactgggcgcctttgcagactccccgcttggctgtgacctgggggcctcaggcctaacccctgcctcgggtggcagcgaccagtccttcccagacttgcaggtgacgggtctctacacagcgtactccactccggacagtgtggctgcatcgggcaccagctcctcctcccagtacctgggtgcacaggggaacaagcctatagccctgctttgagctgtcagcctcacctgccctggaaccccggcacccggcttgggcagagaactgactagaacagggtgttcccagaaggcaggtccctcattgtccccgaagcctctcctggacctgtggcgaagttgccggctggacagggaagcggttcccctcagcagcccctctccttctcgtgcctccccctggagcttccggagcagtttctgggggctcttccaagtcagaagaatggaggaaggtggacaagcaacccagcatcccccgaccccttgacactcctccgaggcctgagccgcaatgcctgcccgtgttgagtgagacttctccatcctggatcctggctgcgtgacctcagtgacctgcaccccattttgggacaccttggtgcattaaggaaacaccctggggtgaaagcccttgaattcatcctcatgggaaatggctgagtggatcaaacctcagccgcagcctccgggggacaggcccagggcgggaaatggagccggagaagcttgagcctctctcttggacaggacaagctgaactctgaaatgggagccggtccaggtggccttcagccccacctttccgatagtctgttagaattttattagcgcagattcctgggccatgccgggtaccgtgaccttgtgtaaatttatttatatttattgtggcccatccaccccacttctgcaaacccatcccgaggcctctggaatgggactccttctccctccctacctcccagccatcctaactcctacaggccagagaatgacatctctaactggctcataatcccttggcagcctggggctactttttagaaccagcaagcactgttgatactgtgaaacatcccattttttccgtattagagaccagatatttttctacctgtt

SEQ ID NO: 8123 - protein, 459 aa, Homo sapiens
MASGRVDLGGPCVPHPHPGALAGVADLHVGATPSPLLHGPAGMAPRGMPGLGPITGHRDSQMSQFPVGGQPSSGLQDPPHLYSPATQPQFPLPPGAQQCPPVGLYGPPFGVRPPYPQPHVAVHSSQELHPKHYPKPIYSYSCLIAMALKNSKTGSLPVSEIYSFMKEHFPYFKTAPDGWKNSVRHNLSLNKCFEKVENKMSGSSRKGCLWALNLARIDKMEEEMHKWKRKDLAAIHRSMANPEELDKLISDRPESCRRPGKPGEPEAPVLTHATTVAVAHGCLAVSQLPPQPLMTLSLQSVPLHHQVQPQAHLAPDSPAPAQTPPLHALPDLSPSPLPHPAMGRAPVDFINISTDMNTEVDALDPSIMDFALQGNLWEEMKDEGFSLDTLGAFADSPLGCDLGASGLTPASGGSDQSFPDLQVTGLYTAYSTPDSVAASGTSSSSQYLGAQGNKPIALL

SEQ ID NO: 8124 - DNA, 2217 bp, Homo sapiens
ggggacctgcagtcgctgtcgtggctcacggcggtggatgtgcctcggctgcagcagatggcaagtggccgcgtggacctgggtggcccctgcgtgccacatccacacccaggtgccttggctggggtggccgacctgcatgtgggagccactccaagtccccttctccatggcccagcaggcatggccccccgaggcatgccaggtctgggccccataactggccacagagacagccagatgagccagttccccgtggggggccagccctcatctggcctgcaggacccgccgcatctgtactcacctgccacccaaccacagttcccgctccccccgggtgcccagcagctgtctgatcgccatggccctgaagaacagcaagacaggcagcctgcctgtgagcgagatctacagcttcatgaaggagcacttcccctacttcaagacggcccccgacgggtggaagaactcggtgcggcacaacctgtctctgaacaagtgcttcgagaaggtggagaacaagatgagcggctcctcccgcaagggctgcctgtgggctctgaacctggcccgcatcgacaagatggaggaggagatgcacaagtggaagaggaaggacctggctgccatccaccggagtatggccaaccctgaggagttggacaagctgatctccgaccggcctgaaagctgccggcgccccggcaaaccgggggaaccagaggcccccgtgctgactcacgccaccacagtggccgtggcgcatggctgcctggctgtctcccagctcccaccccagccactgatgaccctgtccctgcagtcagtccccctgcaccaccaggtccagccccaggcacatcttgctccagactctccagcaccagcccagaccccgccactgcacgccctgccggacctcagccccagcccgctcccccaccccgccatgggaagggctcctgtagacttcatcaacatcagcaccgacatgaacactgaggtggatgccctcgacccgagcatcatggacttcgctctgcaggggaacctgtgggaggagatgaaggatgagggattcagcttggacacactgggcgcctttgcagactccccgcttggctgtgacctgggggcctcaggcctaacccctgcctcgggtggcagcgaccagtccttcccagacttgcaggtgacgggtctctacacagcgtactccactccggacagtgtggctgcatcgggcaccagctcctcctcccagtacctgggtgcacaggggaacaagcctatagccctgctttgagctgtcagcctcacctgccctggaaccccggcacccggcttgggcagagaactgactagaacagggtgttcccagaaggcaggtccctcattgtccccgaagcctctcctggacctgtggcgaagttgccggctggacagggaagcggttcccctcagcagcccctctccttctcgtgcctccccctggagcttccggagcagtttctgggggctcttccaagtcagaagaatggaggaaggtggacaagcaacccagcatcccccgaccccttgacactcctccgaggcctgagccgcaatgcctgcccgtgttgagtgagacttctccatcctggatcctggctgcgtgacctcagtgacctgcaccccattttgggacaccttggtgcattaaggaaacaccctggggtgaaagcccttgaattcatcctcatgggaaatggctgagtggatcaaacctcagccgcagcctccgggggacaggcccagggcgggaaatggagccggagaagcttgagcctctctcttggacaggacaagctgaactctgaaatgggagccggtccaggtggccttcagccccacctttccgatagtctgttagaattttattagcgcagattcctgggccatgccgggtaccgtgaccttgtgtaaatttatttatatttattgtggcccatccaccccacttctgcaaacccatcccgaggcctctggaatgggactccttctccctccctacctcccagccatcctaactcctacaggccagagaatgacatctctaactggctcataatcccttggcagcctggggctactttttagaaccagcaagcactgttgatactgtgaaacatcccattttttccgtattagagaccagatatttttctacctgtt

SEQ ID NO: 8125 - protein, 314 aa, Homo sapiens [sequence omitted]

SEQ ID NO: 8126 - DNA, 900 bp, Homo sapiens
atgcaaaaggaggaccatgctatgtcatcaagggctgatgcgaagaagaacccagaagcaggcgtcaataaccccccgcacggctactgcgcatgctctgagctggacagctccagagagggaaatttaaaaacggttcgagctgcgacggcggccaaattgcggaacgcgaggggcgagcgcgagggagcccccctccggaacccctgcccacccccggagcgccggcagcggcggccccgcgaggatcggctccaggagatgatagaaagtgacacctcatccataatgtcaggaattattcgaaactcagggcaaaatcaccacccctctccacaggaatacaggcttctagccaccaccagcgatgatgaccttcccggggacctgcagtcgctgtcgtggctcacggcggtggatgtgcctcggctgcagcagatggcaagtggccgcgtggacctgggtggcccctgcgtgccacatccacacccaggtgccttggctggggtggccgacctgcatgtgggagccactccaagtccccttctccatggcccagcaggcatggccccccgaggcatgccaggtctgggccccataactggccacagagacagccagatgagccagttccccgtggggggccagccctcatctggcctgcaggacccgccgcatctgtactcacctgccacccaaccacagttcccgctccccccgggtgcccagcaggtaccaagggctcaggggagccctggactgagcagcagacaccctgccttgggctggccggggacccctctgagcctcagtttactcacccagcacatggggataacattccctccatgctcatgtcatggggtcattcattccgttcccccaaaactcctgccctga

SEQ ID NO: 8127 - protein, 299 aa, Homo sapiens
MQKEDHAMSSRADAKKNPEAGVNNPPHGYCACSELDSSREGNLKTVRAATAAKLRNARGEREGAPLRNPCPPPERRQRRPREDRLQEMIESDTSSIMSGIIRNSGQNHHPSPQEYRLLATTSDDDLPGDLQSLSWLTAVDVPRLQQMASGRVDLGGPCVPHPHPGALAGVADLHVGATPSPLLHGPAGMAPRGMPGLGPITGHRDSQMSQFPVGGQPSSGLQDPPHLYSPATQPQFPLPPGAQQVPRAQGSPGLSSRHPALGWPGTPLSLSLLTQHMGITFPPCSCHGVIHSVPPKLLP

SEQ ID NO: 8128 - DNA, 712 bp, Homo sapiens
aaattgtgcggttaacggtcaaagcccccctgcctactttgacactcatttaaagatgacagggaacaatagagatttgttctgtgcaaccctttcttgttatgccggcgacatcagctccgcacatgaaactgcccgatatttcattccacctgccacctccctcccgcctcggtcgactctctcctctgctactttgcttgtccccactttaacacaaagagacagctctgtgttcacagcacctaacagtgttgaaaaagaatgctatttaaaacccgagttgagacatcacctttccaaacccatgactgcttcctggctcactaaacacgaaccagaaattaatgctgcaaagagcagagacaagagattcgactgtgttagccaggatggtctcgatctcctgacttcgtgatctgcccgcctcagcctcccaaagtgctgggattacaggcttgagccactgtgcctggcttcaggctgggatttttatagcttattatggcaagggaggagacggagagtaaaagaagaaggaagagcatacacagtcaccccttgtgtgacaaatatgcaagaaataaagataaatgtgtacaattcttacaattttacttttctgaattttgctattgcactgaatgatttgtgataagacagatggggatgaaaaatatacttattaaataaacagctattaaaagcccct

SEQ ID NO: 8129 - protein, 120 aa, Homo sapiens; identical to SEQ ID NO: 918

SEQ ID NO: 8130 - DNA, 2858 bp, Homo sapiens
gtgcgctgccgtaccggtcacgtggacgtttggtcacgtgactgcgtccgtggtcctcccgtaggaaccggcggactcggttggcgttgtggggcagggggtggtggagcaagatggcggctcatctgtcctacggccgagtgaacctaaacgtgttgcgcgaggcggtgcgtcgcgagctgcgcgagttcctggacaagtgcgcaggaagcaaggcaatagtttgggatgaatacctaactggaccctttggcctgattgcacagtattcactattgaaggaacatgaagtggaaaaaatgttcacacttaaaggaaatcgtttgccggcagctgatgtgaagaatataattttttttgtcagacccaggctagagttgatggatataatcgctgaaaacgtgctcagtgaagatagacgaggcccaacgagagattttcatattctgtttgtgccacgccgtagcctgttgtgcgaacagcggttgaaggatctgggtgtcttgggatcctttattcacagggaggagtacagcttagatctcattccattcgatggggatctcttatccatggaatcagagggtgcattcaaacaagtggccaatatgatgatcaggatgaagagagagtttacaggaagccagaattcaatatttcctgtttttgataatctcttgttgcttgatcggaatgtggatttattaacacctcttgccactcagctgacatatgaaggactcattgatgaaatttatggcattcagaacagttatgtgaaattacctccagagaaatttgcacctaagaaacagggcgatggtggtaaggacctccccacggaagcaaagaagctgcagctgaattctgcagaggagctctatgctgagatccgagataagaacttcaacgcagttggctctgtgctcagcaagaaagcaaagatcatctctgcagcattcgaggaaagacacaatgctaagaccgtgggggagatcaagcagtttgtttcccagttgccccacatgcaggcagcaaggggctcgcttgcaaaccatacctcaattgcagaattgatcaaagatgtcactacttctgaagacttttttgataaattaaccgtggaacaggagtttatgtctggaatagacactgataaggtcaacaattacattgaggattgtatcgcccaaaagcactcgttgatcaaggtgttaagactagtttgcctccaatccgtgtgtaatagtgggctcaaacaaaaagttttggattattacaaaagagagattctccagacatacggctatgagcacatattgaccttacacaacctggagaaggccggcctgctgaaaccgcagacggggggcagaaacaattacccaactatacggaaaacattacgcctctggatggatgatgttaatgagcaaaaccccacggacatatcgtatgtgtacagtgggtatgccccgctcagtgtgcggctggcccagctgctttcccggcctggctggcggagcatcgaggaggtcctccgcatcctcccagggccccactttgaggagcggcagccactgcccacaggactgcagaagaaacgtcaaccgggagaaaaccgagtgactctgatatttttccttgggggcgtaaccttcgctgaaattgctgccctgcgatttctctcccagttggaagatggagaaatcagagcctcattcccttagtagtgaagcattgatgaggagagcagtgtctttggtaacagatagcacctctacctttctctctcagaccacatatgcgttgattgaagctattactgaatatactaaggctgtttataccttaacttctctttaccgacaatatacaagtttacttgggaaaatgaattcagaggaggaagatgaagtgtggcaggtgatcataggagccagagctgagatgacttcaaaacaccaagagtacttgaagctggaaaccacttggatgactgcagttggtctttcagagatggcagcagaagctgcatatcaaactggcgcagatcaggcctctataaccgccaggaatcacattcagctggtgaaactgcaggtggaagaggtgcaccagctctcccggaaagcagaaaccaagctggcagaagcacagatagaagagctccgtcagaaaacacaggaggaaggggaggagcgggctgagtcggagcaggaggcctacctgcgtgaggattgagggcctgagcacactgccctgtctccccactcagtggggaaagcaggggcagatgccaccctgcccagggttggcatgactgtctgtgcaccgagaagaggcggcagatcctgccctggccaatcaggcgagacgcctttgtgagctgtgagtgcctcctgtggtctcaggcttgcgctggacctggttcttagcccttgggcactgcaccctgtttaacatttcaccccactctgtacagctgctcttacccattttttttacctcacacccaaagcattttgcctacctgggtcagagagaggagtcctttttgtcatgcccttaagttcagcaactgtttaacctgttttcagtcttatttacgtcgtcaaaaatgatttagtacttgttccctctgttgggatgccagttgtggcagggggaggggaacctgtccagtttgtacgatttctttgtatgtatttctgatgtgttctctgatctgcccccactgtcctgtgaggacagctgaggccaaggagtgaaaaacctattactactaagagaaggggtgcagagtgtttacctggtgctctcaacaggacttaacatcaacaggacttaacacaggc

SEQ ID NO: 8131 - protein, 538 aa, Homo sapiens
MAAHLSYGRVNLNVLREAVRRELREFLDKCAGSKAIVWDEYLTGPFGLIAQYSLLKEHEVEKMFTLKGNRLPAADVKNIIFFVRPRLELMDIIAENVLSEDRRGPTRDFHILFVPRRSLLCEQRLKDLGVLGSFIHREEYSLDLIPFDGDLLSMESEGAFKQVANMMIRMKREFTGSQNSIFPVFDNLLLLDRNVDLLTPLATQLTYEGLIDEIYGIQNSYVKLPPEKFAPKKQGDGGKDLPTEAKKLQLNSAEELYAEIRDKNFNAVGSVLSKKAKIISAAFEERHNAKTVGEIKQFVSQLPHMQAARGSLANHTSIAELIKDVTTSEDFFDKLTVEQEFMSGIDTDKVNNYIEDCIAQKHSLIKVLRLVCLQSVCNSGLKQKVLDYYKREILQTYGYEHILTLHNLEKAGLLKPQTGGRNNYPTIRKTLRLWMDDVNEQNPTDISYVYSGYAPLSVRLAQLLSRPGWRSIEEVLRILPGPHFEERQPLPTGLQKKRQPGENRVTLIFFLGGVTFAEIAALRFLSQLEDGEIRASFP

SEQ ID NO: 8132 - DNA, 4589 bp, Homo sapiens
gtgcgctgccgtaccggtcacgtggacgtttggtcacgtgactgcgtccgtggtcctcccgtaggaaccggcggactcggttggcgttgtggggcagggggtggtggagcaagatggcggctcatctgtcctacggccgagtgaacctaaacgtgttgcgcgaggcggtgcgtcgcgagctgcgcgagttcctggacaagtgcgcaggaagcaaggcaatagtttgggatgaatacctaactggaccctttggcctgattgcacagtattcactattgaaggaacatgaagtggaaaaaatgttcacacttaaaggaaatcgtttgccggcagctgatgtgaagaatataattttttttgtcagacccaggctagagttgatggatataatcgctgaaaacgtgctcagtgaagatagacgaggcccaacgagagattttcatattctgtttgtgccacgccgtagcctgttgtgcgaacagcggttgaaggatctgggtgtcttgggatcctttattcacagggaggagtacagcttagatctcattccattcgatggggatctcttatccatggaatcagagggtgcattcaaagagtgctacctggagggtgaccagacgagcctgtaccacgcagccaaggggctgatgaccctgcaagctctgtatggaacgatcccccagatctttgggaaaggagaatgcgctcggcaagtggccaatatgatgatcaggatgaagagagagtttacaggaagccagaattcaatatttcctgtttttgataatctcttgttgcttgatcggaatgtggatttattaacacctcttgccactcagctgacatatgaaggactcattgatgaaatttatggcattcagaacagttatgtgaaattacctccagagaaatttgcacctaagaaacagggcgatggtggtaaggacctccccacggaagcaaagaagctgcagctgaattctgcagaggagctctatgctgagatccgagataagaacttcaacgcagttggctctgtgctcagcaagaaagcaaagatcatctctgcagcattcgaggaaagacacaatgctaagaccgtgggggagatcaagcagtttgtttcccagttgccccacatgcaggcagcaaggggctcgcttgcaaaccatacctcaattgcagaattgatcaaagatgtcactacttctgaagacttttttgataaattaaccgtggaacaggagtttatgtctggaatagacactgataaggtcaacaattacattgaggattgtatcgcccaaaagcactcgttgatcaaggtgttaagactagtttgcctccaatccgtgtgtaatagtgggctcaaacaaaaagttttggattattacaaaagagagattctccagacatacggctatgagcacatattgaccttacacaacctggagaaggccggcctgctgaaaccgcagacggggggcagaaacaattacccaactatacggaaaacattacgcctctggatggatgatgttaatgagcaaaaccccacggacatatcgtatgtgtacagtgggtatgccccgctcagtgtgcggctggcccagctgctttcccggcctggctggcggagcatcgaggaggtcctccgcatcctcccagggccccactttgaggagcggcagccactgcccacaggactgcagaagaaacgtcaaccgggagaaaaccgagtgactctgatatttttccttgggggcgtaaccttcgctgaaattgctgccctgcgatttctctcccagttggaagatggaggtacagaatatgtcattgccaccactaaactaatgaatggaaccagttggatagaggctctgatggaaaaacctttctaggatgttcagaggagacttaacaagtgtactgcagaataaactacctctttgaagaaattgctgaaaggaagtaaaaccccatagaagaaacatgggaatacagaatatattctggggtcagcttcttaaattatactactgtttactgctttctccgtctcttttgtattccctttttttttttcctttgagacggagtcttgctctgtcacccagactagagtgcagtggcacggtctcacctcactgcaacctccacctcctaggttcaagcaattctcctgcctcagcctcctgagtagctgggactacaggcatgcaccaccacacccggctaatttttgtatttttagtagccatggtgtttcaccatgttggccaggctggtctcaaactcctgacctcaggtgatccacctgcctcggcctcccacagtgctgggattacaggcctgagccaccgtgcctggcccctaatctgctgaagaaagaagaatagaagaaaatcaacctgagtaaaagcagcactggttttgagttttctaagctcagggtcttcattagagacctctggaaatacattaaggatggtgggggtagataatccattcagccagacaaacggggccagctcttaaaataagaaagctgagactgaggaggtgaaactgaaaataaaaagagaaagttcatcctctaatccccagtgctgtatttcttcaaggcgcatcaggcctaggacagtggttaagtgttgggagctggagatcattttatcactgagttgagatttctttttcctgcagagtgtgggagattatatttagggtcatcagtcactgtcgcaactgatcactaaggcaagtttgcttccttctacttcttacaaagcaagaggtttaggggagcttcttgcccagaaacaaagtttatgctctatgtgatcagctacatctccttaggttccatacttatcaggggcttttgacatggaagaatgtgataattggggagcaaccttctgagaattcagcctttgaagtaattcaaagacagtttcttagcacacacgttaactccagacacagcagtggtgggtgcctccattgaggtttccgttttctcttctgtccatcaagggcccaacatccaactggtcccacagtgagcaggggcaactcttgcttcttcagcatctggccacttcgtttccatggtaactgccacgtgtacttttctagcagtctgtggccactccgtactcagctgaaaacactgtttcagccccctctctggtgacctcagccttctccaggtgtatctcttgatgatcttggagaccagcagccacagctgctgctactcctgcaggagactgtcaggctgtggtggggggcaggggtgttggaggagaagttgaaaatccgtgtgttctctgcccctctgctcctccatcttagcttctggaggagttaaggcaccaagggcaccaagtcaggttggcagttttgctgcccttgcccaagcctccagcaaaactagctggtcccctgctttgctgggtcccagccaggtgtgattttggttgttgattagtaaccacacattgtttttccccacctttttcattagtggaggtttttgttttgttttgtttttgtttgtttgagacagagtctcacgctcttttcagactggagtgcagtggtgcgatgtcagctcactgcaacctccacttcccgggttcagacgattctcatgcctcagcctcctgagtagctgggattacagatgtgcaccaccacacctggctaatttttgtatttttagtagagatggggtttcaccatattggccaggctggtctcaaactcctgacctcaggcgattggcccacctcggcctcccaaagtgctgggattacaggtgtgaaccaccgtgcccggcccattagtggagttctgatgggcacggtaaatattattaatgaaagagaaattctgtatacttttttaaaaatctctttaatgaaagaatgaagagtggcagagataataattgaaagattagtttctcatggaattaatttggccttgatattcagtatttggaaatgtcttaaagaaaaccattttcattgtagaaaatccttttttaaatacttgttatatcccagggagattagtttataccttccacctcaggcagtcatcagctgctttagagaatggaatccaccctgcccctccattttttggttcctggggctcaattcaagtctggtcaagtctccctggctggggattctgtcctgggaacagatactcagttgtagtctcatgtgtctgcactcacccaagactctatatacttgcttgctcagagcatagttagggcagctcctaaaaatgcattcagcagaagactgaaaaacttcaattgcttcatttgtatgcaaatagaaaatggtagataattatatattatacgcctttgtgtaagttcatttaatacttgaagcagtctttgtctcaaaagagtatgcccttactgagaaaggatatgtgaacggtacatttattgttggggagagtggattgtttacatcatgtctggacttttgtctagttgggtagacagttctacaccagcagcccccttaataaagaagtctacacagacactg

SEQ ID NO: 8133 - protein, 596 aa, Homo sapiens; identical to SEQ ID NO: 920

SEQ ID NO: 8134 - DNA, 2601 bp, Homo sapiens
gtgcgctgccgtaccggtcacgtggacgtttggtcacgtgactgcgtccgtggtcctcccgtaggaaccggcggactcggttggcgttgtggggcagggggtggtggagcaagatggcggctcatctgtcctacggccgagtgaacctaaacgtgttgcgcgaggcggtgcgtcgcgagctgcgcgagttcctggacaagtgcgcaggaagcaaggcaatagtttgggatgaatacctaactggaccctttggcctgattgcacagtattcactattgaaggaacatgaagtggaaaaaatgttcacacttaaaggaaatcgtttgccggcagctgatgtgaagaatataattttttttgtcagacccaggctagagttgatggatataatcgctgaaaacgtgctcagtgaagatagacgaggcccaacgagagattttcatattctgtttgtgccacgccgtagcctgttgtgcgaacagcggttgaaggatctgggtgtcttgggatcctttattcacagggaggagtacagcttagatctcattccattcgatggggatctcttatccatggaatcagagggtgcattcaaagagtgctacctggagggtgaccagacgagcctgtaccacgcagccaaggggctgatgaccctgcaagctctgtatggaacgatcccccagatctttgggaaaggagaatgcgctcggcaagtggccaatatgatgatcaggatgaagagagagtttacaggaagccagaattcaatatttcctgtttttgataatctcttgttgcttgatcggaatgtggatttattaacacctcttgccactcagctgacatatgaaggactcattgatgaaatttatggcattcagaacagttatgtgaaattacctccagagaaatttgcacctaagaaacagggcgatggtggtaaggacctccccacggaagcaaagaagctgcagctgaattctgcagaggagctctatgctgagatccgagataagaacttcaacgcagttggctctgtgctcagcaagaaagcaaagatcatctctgcagcattcgaggaaagacacaatgctaagaccgtgggggagatcaagcagtttgtttcccagttgccccacatgcaggcagcaaggggctcgcttgcaaaccatacctcaattgcagaattgatcaaagatgtcactacttctgaagacttttttgataaattaaccgtggaacaggagtttatgtctggaatagacactgataaggtcaacaattacattgaggattgtatcgcccaaaagcactcgttgatcaaggtgttaagactagtttgcctccaatccgtgtgtaatagtgggctcaaacaaaaagttttggattattacaaaagagagattctccagacatacggctatgagcacatattgaccttacacaacctggagaaggccggcctgctgaaaccgcagacggggggcagaaacaattacccaactatacggaaaacattacgcctctggatggatgatgttaatgagcaaaaccccacggacatatcgtatgtgtacagtgggtatgccccgctcagtgtgcggctggcccagctgctttcccggcctggctggcggagcatcgaggaggtcctccgcatcctcccagggccccactttgaggagcggcagccactgcccacaggactgcagaagaaacgtcaaccgggagaaaaccgagtgactctgatatttttccttgggggcgtaaccttcgctgaaattgctgccctgcgatttctctcccagttggaagatggaggtacagaatatgtcattgccaccactaaactaatgaatggaaccagttggatagaggctctgatggaaaaacctttctaggatgttcagaggagacttaacaagtgtactgcagaataaactacctctttgaagaaattgctgaaaggaagtaaaaccccatagaagaaacatgggaatacagaatatattctggggtcagcttcttaaattatactactgtttactgctttctccgtctcttttgtattccctttttttttttcctttgagacggagtcttgctctgtcacccagactagagtgcagtggcacggtctcacctcactgcaacctccacctcctaggttcaagcaattctcctgcctcagcctcctgagtagctgggactacaggcatgcaccaccacacccggctaatttttgtatttttagtagccatggtgtttcaccatgttggccaggctggtctcaaactcctgacctcaggtgatccacctgcctcggcctcccacagtgctgggattacaggcctgagccaccgtgcctggcccctaatctgctgaagaaagaagaatagaagaaaatcaacctgagtaaaagcagcactggttttgagttttctaagctcagggtcttcattagagacctctggaaatacattaaggatggtgggggtagataatccattcagccagacaaacggggccagctcttaaaataagaaagctgagactgaggaggtgaaactgaaaataaaaagagaaagttcatcctct

SEQ ID NO: 8135 - protein, 596 aa, Homo sapiens; identical to SEQ ID NO: 920

SEQ ID NO: 8136 - DNA, 2055 bp, Homo sapiens
gtgcgctgccgtaccggtcacgtggacgtttggtcacgtgactgcgtccgtggtcctcccgtaggaaccggcggactcggttggcgttgtggggcagggggtggtggagcaagatggcggctcatctgtcctacggccgagtgaacctaaacgtgttgcgcgaggcggtgcgtcgcgagctgcgcgagttcctggacaagtgcgcaggaagcaaggcaatagtttgggatgaatacctaactggaccctttggcctgattgcacagtattcactattgaaggaacatgaagtggaaaaaatgttcacacttaaaggaaatcgtttgccggcagctgatgtgaagaatataattttttttgtcagacccaggctagagttgatggatataatcgctgaaaacgtgctcagtgaagatagacgaggcccaacgagagattttcatattctgtttgtgccacgccgtagcctgttgtgcgaacagcggttgaaggatctgggtgtcttgggatcctttattcacagggaggagtacagcttagatctcattccattcgatggggatctcttatccatggaatcagagggtgcattcaaagagtgctacctggagggtgaccagacgagcctgtaccacgcagccaaggggctgatgaccctgcaagctctgtatggaacgatcccccagatctttgggaaaggagaatgcgctcggcaagtggccaatatgatgatcaggatgaagagagagtttacaggaagccagaattcaatatttcctgtttttgataatctcttgttgcttgatcggaatgtggatttattaacacctcttgccactcagctgacatatgaaggactcattgatgaaatttatggcattcagaacagttatgtgaaattacctccagagaaatttgcacctaagaaacagggcgatggtggtaaggacctccccacggaagcaaagaagctgcagctgaattctgcagaggagctctatgctgagatccgagataagaacttcaacgcagttggctctgtgctcagcaagaaagcaaagatcatctctgcagcattcgaggaaagacacaatgctaagaccgtgggggagatcaagcagtttgtttcccagttgccccacatgcaggcagcaaggggctcgcttgcaaaccatacctcaattgcagaattgatcaaagatgtcactacttctgaagacttttttgataaattaaccgtggaacaggagtttatgtctggaatagacactgataaggtcaacaattacattgaggattgtatcgcccaaaagcactcgttgatcaaggtgttaagactagtttgcctccaatccgtgtgtaatagtgggctcaaacaaaaagttttggattattacaaaagagagattctccagacatacggctatgagcacatattgaccttacacaacctggagaaggccggcctgctgaaaccgcagacggggggcagaaacaattacccaactatacggaaaacattacgcctctggatggatgatgttaatgagcaaaaccccacggacatatcgtatgtgtacagtgggtatgccccgctcagtgtgcggctggcccagctgctttcccggcctggctggcggagcatcgaggaggtcctccgcatcctcccagggccccactttgaggagcggcagccactgcccacaggactgcagaagaaacgtcaaccgggagaaaaccgagtgactctgatatttttccttgggggcgtaaccttcgctgaaattgctgccctgcgatttctctcccagttggaagatggaggtacagaatatgtcattgccaccactaaactaatgaatggaaccagttggatagaggctctgatggaaaaacctttctaggatgttcagaggagacttaacaagtgtactgcagaataaactacctctttgaagaaattgctgaaaggaagtaaaaccccatagaagaaacatgggaatacagaatatattctggggtcagcttcttaaattatactactgtttactgctt

SEQ ID NO: 8137 - protein, 596 aa, Homo sapiens; identical to SEQ ID NO: 920

SEQ ID NO: 8138 - DNA, 875 bp, Homo sapiens
gtgcgctgccgtaccggtcacgtggacgtttggtcacgtgactgcgtccgtggtcctcccgtaggaaccggcggactcggttggcgttgtggggcagggggtggtggagcaagatggcggctcatctgtcctacggccgagtgaacctaaacgtgttgcgcgaggcggtgcgtcgcgagctgcgcgagttcctggacaagtgcgcaggaagcaaggcaatagtttgggatgaatacctaactggaccctttggcctgattgcacagtattcactattgaaggaacatgaagtggaaaaaatgttcacacttaaaggaaatcgtttgccggcagctgatgtgaagaatataattttttttgtcagacccaggctagagttgatggatataatcgctgaaaacgtgctcagtgaagatagacgaggcccaacgagagattttcatattctgtttgtgccacgccgtagcctgttgtgcgaacagcggttgaaggatctgggtgtcttgggatcctttattcacagggaggagtacagcttagatctcattccattcgatggggatctcttatccatggaatcagagggtgcattcaaagagtgctacctggagggtgaccagacgagcctgtaccacgcagccaaggggctgatgaccctgcaagctctgtatggaacgatcccccagatctttgggaaaggagaatgcgctcgggtgagaaccggctgctttgtggtggtaaaggagggcccttcacaccccaaaagggaggaggaacgggaagctccttacaaacaaattcagttgatcttaattatttatgaatactgtactcatgaatttgcctactgattaaaatgcacttataaccctcca

SEQ ID NO: 8139 - protein, 245 aa, Homo sapiens
MAAHLSYGRVNLNVLREAVRRELREFLDKCAGSKAIVWDEYLTGPFGLIAQYSLLKEHEVEKMFTLKGNRLPAADVKNIIFFVRPRLELMDIIAENVLSEDRRGPTRDFHILFVPRRSLLCEQRLKDLGVLGSFIHREEYSLDLIPFDGDLLSMESEGAFKECYLEGDQTSLYHAAKGLMTLQALYGTIPQIFGKGECARVRTGCFVVVKEGPSHPKREEEREAPYKQIQLILIIYEYCTHEFAY

SEQ ID NO: 8140 - DNA, 1277 bp, Homo sapiens
gtgcgctgccgtaccggtcacgtggacgtttggtcacgtgactgcgtccgtggtcctcccgtaggaaccggcggactcggttggcgttgtggggcagggggtggtggagcaagatggcggctcatctgtcctacggccgagtgaacctaaacgtgttgcgcgaggcggtgcgtcgcgagctgcgcgagttcctggacaagtgcgcaggaagcaaggcaatagtttgggatgaatacctaactggaccctttggcctgattgcacagtattcactattgaaggaacatgaagtggaaaaaatgttcacacttaaaggaaatcgtttgccggcagctgatgtgaagaatataattttttttgtcagacccaggctagagttgatggatataatcgctgaaaacgtgctcagtgaagatagacgaggcccaacgagagattttcatattctgtttgtgccacgccgtagcctgttgtgcgaacagcggttgaaggatctgggtgtcttgggatcctttattcacagggaggagtacagcttagatctcattccattcgatggggatctcttatccatggaatcagagggtgcattcaaatcttgctctgttgccccggctggagtgcagtggcacaatctcagctcactgcaacctccacctcctgagttcaagtgattctgctgcctcagtcacctgagtagctgggattacaggcacatgccaccacacctggctaatttttgtatttttagtagagaaggggtttcaccattttggtcaggctggtctagaactcccgacctcatgatcctccccgctcagcctcccaaagtgctgggattacaggcgtgagccaccgcacccagccctcaatgtcttttgcccttgaacgttcatctgatctggagttttaagtggttttgccaaaaagcgtgtcttttgacatattctcgatggtctgccatattcagggaaacgttaaaatataccacacttgaaagagtagtccggcgacactctcaataataaccaaacgctccccaccatgtctgccatccttcctccctggggcagagggcctgacaagtgacaaccccgctctctcttcctcaggccctggaccctcagggccccctcagttctggctgtggacagcagggacatgttgggttggtaggggtggagggaattgataaaatgtaccatattgacttatgagtggataatggttgtaaaaaaacctaaataattccaaataaaagctaactgttactgagc

SEQ ID NO: 8141 - protein, 186 aa, Homo sapiens
MAAHLSYGRVNLNVLREAVRRELREFLDKCAGSKAIVWDEYLTGPFGLIAQYSLLKEHEVEKMFTLKGNRLPAADVKNIIFFVRPRLELMDIIAENVLSEDRRGPTRDFHILFVPRRSLLCEQRLKDLGVLGSFIHREEYSLDLIPFDGDLLSMESEGAFKSCSVAPAGVQWHNLSSLQPPPPEFK

SEQ ID NO: 8142 - DNA, 672 bp, Homo sapiens
catgaaattctctcctttaaggtgcaaaattcagtggtttttagtgtatttacaaagttgtgcaactatctccactctctaagtatggcacattttaactattccgaaaagaatccccatgcccagtagcagtctgtcgctatctttccttccctcagcctctggcagccactaatctagttcagtctgtatgaattcgcttattctggagttttccttttcttctttttttgagatagagtctcactcttttgcccaggttggagtgcagtgacgtgataatacctcactgcagccttgacctcctaggcttgaacgaattttcagcctcagcctcccagagtgctgggattacaggcgtgggccattgcgcccaaccctcttggctcttttgtaccttgttccctagtggtttgcttacacgaaatcctacctgatggtaatatagatttccttctaacattttataggaaaatttcaatataccaaaaaattgaattgtacagtgaacacctgtctatccaccacttatcttctggattaacagttttctatatgtgctttatcacatacctgtgatggtatactcatttttaattaatccatatttgtgtatttaatgggaattggtagcagccgaagcaaactctcttggagtgacaaaatctgtgc

SEQ ID NO: 8143 - protein, 65 aa, Homo sapiens
SLTLLPRLECSDVIIPHCSLDLLGLNEFSASASQSAGITGVGHCAQPSWLFCTLFPSGLLTRNPT

SEQ ID NO: 8144 - DNA, 2505 bp, Homo sapiens
taaataaataaaataattaattaattcatggcctggcaccgtggctcacacatgtattcccagcactttgggaggccaagccgggtggatcacctgaggtcaggagtttgagaccatcctggccaacatggcaaaaccccgtctctactaaaaatacaaaaatcagccaggcatggtggtgcatgcctgtaatcccagctattcaggaggctgagacagtagaattgcttgaacccaggagacagaggctgcagtgagccgagatcctgccactgcactccagcctgggcgacagagcgagactccgtctcaaaaaaaaaaaaaaaacaaaacaaaacaaatgaagtttacccatgttatacctagaaacattcaatgaagtgtaatttaaatttttttttaaaatataaaatagcatctcctcagtaatgaacatttgaagaaatctgaaaggtgtgagggggtaaaagaaactgccatagccttaccacctagacatggcctcatttaagttcagctctttactcacacaatctcagcatgcctgtcctccgggagagtgaaaagcatgggttcctaatagccgctgttggccccttctgcacactttgccgccagagcttaaaggtataaacttcatgacttcttgatgctccagcttatatatattcttgacattttacacattttttttttaacaaatcagattgatttcctaaattcagtaatagtggaccttcaaaggaagaatcaagacctcaagatgaaggtggagatgatgtcagaagcagccctgaatgggaacggggatgacctaaacaattatgacagtgatgatcaggagaaacagtccaagaagaaacctcgcctcttctgtgacatttgtgactgctttgatctccacgacacagaggattgtcctacccaggcacagatgtcagaggaccctccccattccacacaccatggcagtcggggtgaggaacgcccatactgtgaaatctgtgagatgtttggacactgggccaccaactgcaatgacgacgaaaccttctgatgaagcctccagtggagaactgggcttgctcagacgcactcgcattgacacaacgtaacaccagcattgtgtgtgcagacttcaggagaactcatgttattttttaaccccgtcaacaaatctaggaaaatattttgatcttcaacaaattgccctttagtctccccgtatgagttagaataataaatatttagtaggtgagttttcacctcgaattttgttttcttgatttttacgtttgaagacattgcaccagatgccattacatttattggccccccgaccttgtagaaaaacccctaccctcacaataccttatttaagtaactttaaattatgccgttacttttcatatttgcactaagatatttccaggctgcatttgtatatttagattttttggttaagctttgacactggaatgagttgaaaaaatgtgccattttgcattttcatctactcatttaaagtattttattcttattcaaagaaatatctgagctctttgcactacctgttatcagtagtgcctttacttcaggcttgataatacttaggtgtgattataaaatcatgaagcaggtaaagggaggggcaagcccccaaactgctgtggggacattttataatctatatgctgcacccacttaatctactgtggtgttttgtttattagttttgcataatttcagcttctatatattgtatgtatatattttttaaaaatctatattttgggaaaaaaacatacacaatgtgtctttctttttggacatttacctttttgaaaaagaaaacacttaaaatgatcattaggacataacagactaggccagacatagcatcttgtggctttgcaaccattttcatttgtttgttttccttttatttcttcaccagatttaaataactggaggaattttctccaatttttttttccttctctggcaggtatccccagcagtcaattaacaataagccagtataaaacacctaaataaccaatctacaatctcccttcacaagtttttttactgtttttagatgaatgtacgatgagaaattcaacgttaataattctggattttcttatcacaaaaaagaaaatgaaggacctcaaagcacctgaacagtttatcgaccagtttgaatctatttatcttcatttgaatgtcttctagaatatgtaaaaagtcataaaatgtatcttccatgctacatgtacaataagaacttctataattgtatatatgcctttgatgtattttcccctcaagattatcaactgtgtgttcgacagtgaatattcaatctggtaccagttgaaatttttggttataaatgtaatacgaattgtttcacaaacagaaaacatgtaaagcagtattaaaatttggccaaacaagtgttctgtatctactttaataaatggttattcttttttgttt

SEQ ID NO: 8145 - protein, 135 aa, Homo sapiens [sequence omitted]

SEQ ID NO: 8146 - DNA, 1841 bp, Homo sapiens
ttcatctgctgctgacaacacttttcttccaatcagcaaatgattgatttcctaaattcagtaatagtggaccttcaaaggaagaatcaagacctcaagatgaaggtggagatgatgtcagaagcagccctgaatgggaacggggatgacctaaacaattatgacagtgatgatcaggagaaacagtccaagaagaaacctcgcctcttctgtgacatttgtgactgctttgatctccacgacacagaggattgtcctacccaggcacagatgtcagaggaccctccccattccacacaccatggcagtcggggtgaggaacgcccatactgtgaaatctgtgagatgtttggacactgggccaccaactgcaatgacgacgaaaccttctgatgaagcctccagtggagaactgggcttgctcagacgcactcgcattgacacaacgtaacaccagcattgtgtgtgcagacttcaggagaactcatgttattttttaaccccgtcaacaaatctaggaaaatattttgatcttcaacaaattgccctttagtctccccgtatgagttagaataataaatatttagtaggtgagttttcacctcgaattttgttttcttgatttttacgtttgaagacattgcaccagatgccattacatttattggccccccgaccttgtagaaaaacccctaccctcacaataccttatttaagtaactttaaattatgccgttacttttcatatttgcactaagatatttccaggctgcatttgtatatttagattttttggttaagctttgacactggaatgagttgaaaaaatgtgccattttgcattttcatctactcatttaaagtattttattcttattcaaagaaatatctgagctctttgcactacctgttatcagtagtgcctttacttcaggcttgataatacttaggtgtgattataaaatcatgaagcaggtaaagggaggggcaagcccccaaactgctgtggggacattttataatctatatgctgcacccacttaatctactgtggtgttttgtttattagttttgcataatttcagcttctatatattgtatgtatatattttttaaaaatctatattttgggaaaaaaacatacacaatgtgtctttctttttggacatttacctttttgaaaaagaaaacacttaaaatgatcattaggacataacagactaggccagacatagcatcttgtggctttgcaaccattttcatttgtttgttttccttttatttcttcaccagatttaaataactggaggaattttctccaatttttttttccttctctggcaggtatccccagcagtcaattaacaataagccagtataaaacacctaaataaccaatctacaatctcccttcacaagtttttttactgtttttagatgaatgtacgatgagaaattcaacgttaataattctggattttcttatcacaaaaaagaaaatgaaggacctcaaagcacctgaacagtttatcgaccagtttgaatctatttatcttcatttgaatgtcttctagaatatgtaaaaagtcataaaatgtatcttccatgctacatgtacaataagaacttctataattgtatatatgcctttgatgtattttcccctcaagattatcaactgtgtgttcgacagtgaatattcaatctggtaccagttgaaatttttggttataaatgtaatacgaattgtttcacaaacagaaaacatgtaaagcagtattaaaatttggccaaacaagtgttctgtatctactttaataaatggttattcttttttgttt

SEQ ID NO: 8147 - protein, 117 aa, Homo sapiens
MIDFLNSVIVDLQRKNQDLKMKVEMMSEAALNGNGDDLNNYDSDDQEKQSKKKPRLFCDICDCFDLHDTEDCPTQAQMSEDPPHSTHHGSRGEERPYCEICEMFGHWATNCNDDETF

SEQ ID NO: 8148 - DNA, 2464 bp, Homo sapiens
taaataaataaaataattaattaattcatggcctggcaccgtggctcacacatgtattcccagcactttgggaggccaagccgggtggatcacctgaggtcaggagtttgagaccatcctggccaacatggcaaaaccccgtctctactaaaaatacaaaaatcagccaggcatggtggtgcatgcctgtaatcccagctattcaggaggctgagacagtagaattgcttgaacccaggagacagaggctgcagtgagccgagatcctgccactgcactccagcctgggcgacagagcgagactccgtctcaaaaaaaaaaaaaaaacaaaacaaaacaaatgaagtttacccatgttatacctagaaacattcaatgaagtgtaatttaaatttttttttaaaatataaaatagcatctcctcagtaatgaacatttgaagaaatctgaaaggtgtgagggggtaaaagaaactgccatagccttaccacctagacatggcctcatttaagttcagctctttactcacacaatctcagcatgcctgtcctccgggagagtgaaaagcatgggttcctaatagccgctgttggccccttctgcacactttgccgccagagcttaaaggtataaacttcatgacttcttgatgctccagcttatatatattcttgacattttacacattttttttttaacaaatcagattgatttcctaaattcagtaatagtggaccttcaaaggaagaatcaagacctcaagatgaaggtggagatgatgtcagaagcagccctgaatgggaacggggatgacctaaacaattatgacagtgatgatcaggagaaacagtccaagaagaaacctcgcctcttctgtgacatttgtgactgctttgatctccacgacacagaggattgtcctacccaggcacagatgtcagaggaccctccccattccacacaccatggcagtcggggtgaggaacgcccatactgtgaaatctgtgagatgtttggacactgggccaccaactgcaatgacgacgaaaccttctgatgaagcctccagtggagaactgggcttgctcagacgcactcgcattgacacaacgtaacaccagcattgtgtgtgcagacttcaggagaactcatgttattttttaaccccgtcaacaaatctaggaaaatattttgatcttcaacaaattgccctttagtctccccgtatgagttagaataataaatatttagtaggtgagttttcacctcgaattttgttttcttgatttttacgtttgaagacattgcaccagatgccattacatttattggccccccgaccttgtagaaaaacccctaccctcacaataccttatttaagtaactttaaattatgccgttacttttcatatttgcactaagatatttccaggctgcatttgtatatttagattttttggttaagctttgacactggaatgagttgaaaaaatgtgccattttgcattttcatctactcatttaaagtattttattcttattcaaagaaatatctgagctctttgcactacctgttatcagtagtgcctttacttcaggcttgataatacttaggtgtgattataaaatcatgaagcaggtaaagggaggggcaagcccccaaactgctgtggggacattttataatctatatgctgcacccacttaatctactgtggtgttttgtttattagttttgcataatttcagcttctatatattgtatgtatatattttttaaaaatctatattttgggaaaaaaacatacacaatgtgtctttctttttggacatttacctttttgaaaaagaaaacacttaaaatgatcattaggacataacagactaggccagacatagcatcttgtggctttgcaaccattttcatttgtttgttttccttttatttcttcaccagatttaaataactggaggaattttctccaatttttttttccttctctggcaggtatccccagcagtcaattaacaataagccagtataaaacacctaaataaccaatctacaatctcccttcacaagtttttttactgtttttagatgaatgtacgatgagaaattcaacgttaataattctggattttcttatcacaaaaaagaaaatgaaggacctcaaagcacctgaacagtttatcgaccagtttgaatctatttatcttcatttgaatgtcttctagaatatgtaaaaagtcataaaatgtatcttccatgctacatgtacaataagaacttctataattgtatatatgcctttgatgtattttcccctcaagattatcaactgtgtgttcgacagtgaatattcaatctggtaccagttgaaatttttggttataaatgtaatacgaattgtttcacaaacagaaaacatgtaaagcagtattaaaatttggccaaacaagt

SEQ ID NO: 8149 - protein, 135 aa, Homo sapiens [sequence omitted]

SEQ ID NO: 8150 - DNA, 1800 bp, Homo sapiens
ttcatctgctgctgacaacacttttcttccaatcagcaaatgattgatttcctaaattcagtaatagtggaccttcaaaggaagaatcaagacctcaagatgaaggtggagatgatgtcagaagcagccctgaatgggaacggggatgacctaaacaattatgacagtgatgatcaggagaaacagtccaagaagaaacctcgcctcttctgtgacatttgtgactgctttgatctccacgacacagaggattgtcctacccaggcacagatgtcagaggaccctccccattccacacaccatggcagtcggggtgaggaacgcccatactgtgaaatctgtgagatgtttggacactgggccaccaactgcaatgacgacgaaaccttctgatgaagcctccagtggagaactgggcttgctcagacgcactcgcattgacacaacgtaacaccagcattgtgtgtgcagacttcaggagaactcatgttattttttaaccccgtcaacaaatctaggaaaatattttgatcttcaacaaattgccctttagtctccccgtatgagttagaataataaatatttagtaggtgagttttcacctcgaattttgttttcttgatttttacgtttgaagacattgcaccagatgccattacatttattggccccccgaccttgtagaaaaacccctaccctcacaataccttatttaagtaactttaaattatgccgttacttttcatatttgcactaagatatttccaggctgcatttgtatatttagattttttggttaagctttgacactggaatgagttgaaaaaatgtgccattttgcattttcatctactcatttaaagtattttattcttattcaaagaaatatctgagctctttgcactacctgttatcagtagtgcctttacttcaggcttgataatacttaggtgtgattataaaatcatgaagcaggtaaagggaggggcaagcccccaaactgctgtggggacattttataatctatatgctgcacccacttaatctactgtggtgttttgtttattagttttgcataatttcagcttctatatattgtatgtatatattttttaaaaatctatattttgggaaaaaaacatacacaatgtgtctttctttttggacatttacctttttgaaaaagaaaacacttaaaatgatcattaggacataacagactaggccagacatagcatcttgtggctttgcaaccattttcatttgtttgttttccttttatttcttcaccagatttaaataactggaggaattttctccaatttttttttccttctctggcaggtatccccagcagtcaattaacaataagccagtataaaacacctaaataaccaatctacaatctcccttcacaagtttttttactgtttttagatgaatgtacgatgagaaattcaacgttaataattctggattttcttatcacaaaaaagaaaatgaaggacctcaaagcacctgaacagtttatcgaccagtttgaatctatttatcttcatttgaatgtcttctagaatatgtaaaaagtcataaaatgtatcttccatgctacatgtacaataagaacttctataattgtatatatgcctttgatgtattttcccctcaagattatcaactgtgtgttcgacagtgaatattcaatctggtaccagttgaaatttttggttataaatgtaatacgaattgtttcacaaacagaaaacatgtaaagcagtattaaaatttggccaaacaagt

SEQ ID NO: 8151 - protein, 117 aa, Homo sapiens; identical to SEQ ID NO: 8147

SEQ ID NO: 8152 - DNA, 3004 bp, Homo sapiens
taggtacacatatgtaaacacatgctagcctgctctttgggctgttttcactgtgtcctgcgttcctccctgttcctccttcgtctttccctttctcttctcactcccacaaccctctcattaaaggcctcatccccgccctctgctgataaccaagtgctgagtcaggccgagaacataaaccaggcgctctgaatttctccttccaggctccccatgctttcattctgcacctgagaaaaccattttaacattttctgttctagcctttatgtaattaccattaatttctatgagctaatttaatgtcctcttcagagtctatggctggaaagtaataatccttcagtttgagtaataataataatctttactactgttttggcccataacatcttaaacacccattcttggaacttgctacaaaagttactgaaattagtgagaaccaattgatatttccagcataaagctgctctgcatgacatctgtataactgctttgcatgtgtgtattttaattgtcgttattgcttggtaataatttattcaagaattaacaaacttcaacttggggttagattttagtagaatattggggagggtgcaaccgttttttttttttttaattctacctcttccaaatttattaacttgtttctttaagttcaaatggatacaatcacatgcagactctggcatgtctatgcataggtaaactttttctcccctcacagtaagtaaaatttcaagtaaaattttgtgagcataatggccttaactccctataaaacttccctgttatatttttttttttacattaactaacattaattatgtgtttgttctagaacagttgtacactgaccagtctttcggttgatttgtggaacttttaactctttggtcttttagagaatccaagttcataaaagacgcagatgaagagaaagcttccttgcagaaatccatcagtataactagtgccttactcacagaaaaggatgccgagctggagaaactgagaaatgaggtcacagtgctcaggggagaaaacgcctctgccaagtccttgcattcagttgttcagactctagagtctgataaggtgaagctcgagctcaaggtaaagaacttggagcttcaactcaaagaaaacaagaggcagctcagcagctcctcaggtaatacagacactcaggcagacgaggatgaaagagcccaggagagtcaggtaatgttcctgccttattgctttactttcttgctgtttttcaaaatcattgaatcttttcgtttattttccttctcatttgatgccttttgtatcatttagtcttttgaattggtaatgcattcctctagtccaaacattaaacagaattaaaaatatatacattaaatgtcttcctccaaaccttctctctcttctgctcagttcccaaccctgcaaacagttaattactgttatttgtgtctttccttttcagagattttttaaagtgtgtatacaagccagcactaatacagtcttccctcccttttttttttttaacataaataatggcatactacataaacggttctgcacttattttttttatagctatgtagtgttccattacgtggatttactataatttagtcagttccctattggttgacaatgacactgggatgtttctgatcctttgggtgtattataaacaatgccgtaaggaattatcttgggcagctatcattttatatattagtatttctgcaggatgaattcctagaagtagaattgctctgtcaaagggtttgttactcatctgaaccttaaaaagactggtttcttgaaaactcagtctcttaaagcgaaaattaacaaaacaactttagttttaaactaaaaatgggattaggccaggaatggtggcttatccctgtaattccagcactttgggaggccaaggtgggatgattgcttgagcccaaaagtttgagaccaacctggacatagcgagacctcatctctacaaaaaaaaaaaaacaaaaaaaacaaaaaacaatcctgcagcctgagtgacagagcaacaccctgtctcaaaacaattacttaattaaaaaaaagtttttaagggcctgggccaggtgcagtggctcacgcctataattccagctttttggaaggctgtggcaagcggactgtttgagatcaggagatcgagaccagcctgagcaacaatggcaagaccccatctctacaaaaaataaaattagttaggcatggcgccatgctcccatagtcccagttaccccagaagctgaggcaggaggatcacttgagtccagaaggttgaggctgcagtgagccatgatcatgccaccgcacttaggcctgactgacaaagcaagaacctgtctcagaaaaaaaaaaggtggggtggggggcccgggcacagcagctcacacctgcaatcccagcactttggtaggccaaggtaggcagatcgctggagcccgagaccagcctgcgcaacatgggcactccaagctgggtgacagagcaaggccctgtctcaaaacaaacaaaaatttgtaaaaagggattatataaaggcaaactattctgtacttggaaatataattgtatatagcaacaaacatctgtcttttaattttaatatactttgtatgtattagtcatgttcaaaattcaaaagtacaaaagccacattttatatttaaataaaagaaaaactcaccttgagatgttagttgccagacacctcctttgaggggcacaaaacgattcaacactgtacaaacttaccatggattagcattgtcctctttgtatgtctactgggcttaataactaacagtgtcttctcttcccccttcctttctgcttcggtttgtttcatctgctgctgacaacacttttcttccaatcagcaaatggttcgtttcatgtttcctaatttgcgtgcacacgtgtgtgtgtgtgtgtgtgtgtg

SEQ ID NO: 8153 - protein, 75 aa, Homo sapiens
MIMPPHLGLTDKARTCLRKKKGGVGGPGTAAHTCNPSTLVGQGRQIAGARDQPAQHGHSKLGDRARPCLKTNKNL

SEQ ID NO: 8154 - DNA, 1545 bp, Homo sapiens
aatttcttaattttttggtggagatgaggtctcgtcatgttgctcaggccgctcttaaactcctggctttaagccattctcccaccttgccctcccaaagtgcaaagatgcatttttaaacttgctatgtctctaaggcatttctggtggctgtctgcttgaattcaccagggtagtgatgatagatttttttttttttttttaaatataaggactgggtctcactatgttgccccagctggtctcaaactcctggcctcaagcgatcctcctgcctccacctcccaaattgctgggattataggagtggcctaccatgcccaacgtgtttttttgtttgtttgttttgtttttttaaaggctgtgtgttacttagtttcttaagtgttttgtttgggttttattccacaggaaggttgaggaccttcagttccgggttgaagaagaatcaattaccaaaggtgatcttgagcaaaagagccagatttctgaagatcctgagaatacgcagaccaaactggagcatgcccgcattaaggagcttgaacagagcctgctctttgaaaagaccaaagctgacaaactccagagggagttagaagacactagggtggctacagtttcagaaaagtcacgtataatggaactggagaaagacctagcattgagagtacaggaagtagctgagctccgaagaaggctagagtccaataagcctgctggggatgtggacatgtcactttcccttttgcaagagataagctctttgcaagaaaagttagaagtcacccgtactgaccaccagagagaaataacttctctgaaggagcattttggagcccgggaagaaactcatcagaaggagataaaggctctgtataccgccacggaaaagctttccaaagagaacgagtcattgaaaagcaagctggagcatgccaacaaagagaactcagatgtgatagctctatggaagtccaaactggagactgccatcgcatcccaccagcaggcgatggaagaactgaaggtatctttcagcaaagggcttggaacagagacggcagaatttgctgaactaaaaacacaaatagagaaaatgagactagattaccaacacgaaatagaaaatttgcagaatcaacaagactctgaacgggctgcccatgctaaagagatggaagccttgagggctaaactgatgaaagttattaaagaaaaggaaaacagtctggaagccatcaggtcgaaactggacaaagcagaagaccagcatctcgtagaaatggaagacacgttaaacaaattacaggaagctgaaataaaggtaaaggagctagaggtactgcaagccaaatgcaatgaacaaaccaaggttattgataattttacatcacagctcaaggctactgaagaaaagctcttggatcttgatgcacttcggaaagccagttccgaaggtaaatcggaaatgaagaaacttagacagcagcttgaggcagctgagaaacagattaaacatttagagattgaaaagaatgctga

SEQ ID NO: 8155 - protein, 300 aa, Homo sapiens
MELEKDLALRVQEVAELRRRLESNKPAGDVDMSLSLLQEISSLQEKLEVTRTDHQREITSLKEHFGAREETHQKEIKALYTATEKLSKENESLKSKLEHANKENSDVIALWKSKLETAIASHQQAMEELKVSFSKGLGTETAEFAELKTQIEKMRLDYQHEIENLQNQQDSERAAHAKEMEALRAKLMKVIKEKENSLEAIRSKLDKAEDQHLVEMEDTLNKLQEAEIKVKELEVLQAKCNEQTKVIDNFTSQLKATEEKLLDLDALRKASSEGKSEMKKLRQQLEAAEKQIKHLEIEKN

SEQ ID NO: 8156 - DNA, 1207 bp, Homo sapiens
ctgacacttcatctggcctcatgtgttttccattttttctttctgaacagactagcccatgccccctgcccaccaccatcctttgtccctggtattcatcctcactgcccacctcatctcacctccacctcttcccttctccattcccctttggttcaccctttggcagaaggtactggtggctcagcctgcatgccgctgtctctcctctcgtgctggcatgtcatggtggcactgttgtgttctcttcctcttcctttttactaacagacgcagaccaaactggagcatgcccgcattaaggagcttgaacagagcctgctctttgaaaagaccaaagctgacaaactccagagggagttagaagacactagggtaatggttttcactatttaatgaagcagacccatgcatgtgaagggtggacacctcaggtgacatgctttatagttggcctgagccttgacccagtggttcaacctgagtttggtcttggtaccattcaggtgtttgtgagctgagactgatgagtaggaacaggtgttttatatctcgtcttttgtcaaaagtaaagactcattcctttggtaacccaaccaaatcaggatcagaaactttacaactgaataaatgaatggatataactgtatttgaagttatttatattaataccatgaaatatatttctccagttggccacaagcagtcaattgtcctcttgttctcaaatatctagttactaggctttctaaataattttttgttattgttgttttactttagctctcttcctgccttcttccctggcctcttggagaaggaaatggaaacatgggctgtgtttcatgagagttaaaaactttcaccccagttacctttttatcttggaaggctgatctctgcatctccctccttcctgtcgctcgggggattgaaacctcagtggacactgggcgcagtggctcttgcttcttatcccagcactttgggaggctgaggcaggcagattacttgaggtcaggagtttgagaccagcctggccaacatggagaaaccccatctctactaaaaatactaaaattatccgggcgtggtgacacatgcctgtaatcccagctactagggaggctgaggcaggagaatcacttgaacctgggaggcagaggttgcggtgagccgagatcacgccattgcactccagcctggg

SEQ ID NO: 8157 - protein, 101 aa, Homo sapiens
MPPAHHHPLSLVFILTAHLISPPPLPFSIPLWFTLWQKVLVAQPACRCLSSRAGMSWWHCCVLFLFLFTNRRRPNWSMPALRSLNRACSLKRPKLTNSRGS

SEQ ID NO: 8158 - DNA, 1465 bp, Homo sapiens
aggctgttcaaaatgtttgcccagcttctggcaggatatgagctgatgcctgccccgattctacagacaccatgagatttaatccagagactgacttcactatagaacccacagttgtatcaatggttggggaaagatagtggcaacaggcaaaggagaaacagctctgacatacaaagaaaatgagtatgctaaagccaagtgggcttaaggcccccaccaagatcctgaagcctggaagcacagctctgaagacacctacggctgttgtagctccagtagaaaaaaccatatccagtgaaaaagcatcaagcactccatcatctgagactcaggaggaatttgtggatgactttcgagttggggagcgagtttgggtgaatggaaataagcctggatttatccagtttcttggagaaacccagtttgcaccaggccagtgggctggaattgttttagatgaacccataggcaagaacgatggttcggtggcaggagttcggtatttccagtgtgaacctttaaagggcatatttacccgaccttcaaagttaacaaggaaggtgcaagcagaagatgaagctaatggcctgcagacaacgcccgcctcccgagctacttcaccgctgtgcacttctacggccagcatggtgtcttcctccccctccaccccttcaaacatccctcagaaaccatcacagccagcagcaaaggaaccttcagctacgcctccgatcagcaaccttacaaaaactgccagtgaatctatctccaacctttcagaggctggctcaatcaagaaaggagaaagagagctcaaaatcggagacagagtattggttggtggcactaaggctggtgtagtccggtttcttggggagaccgactttgccaagggggagtggtgtggcgtggagttagatgagccacttgggaagaatgatggcgctgttgctggaacaaggtattttcagtgtcaacccaaatatggcttgttcgctcctgtccacaaagttaccaagattggcttcccttccactacaccagccaaagccaaggccaacgcagtgaggcgagtgatggcgaccacgtccgccagcctgaagcgcagcccttctgcctcttccctcagctccatgagctcagtggcctcctctgtgagcagcaggcccagtcggacaggactacatgtcctggaattggaagccaaaatggaccagctgcgaacaatggtggaagctgctgacagggagaaggtggagcttctcaaccagcttgaagaggagaaaaggaaggttgaggaccttcagttccgggttgaagaagaatcaattaccaaaggtgatcttgagcaaaagagccagatttctgaagatcctgagaatgtaagagggcacttaactgtgtggatatttcccttgttaacaaagattgatcacagattaaaatgcttattgatatactc

SEQ ID NO: 8159 - protein, 426 aa, Homo sapiens
MSMLKPSGLKAPTKILKPGSTALKTPTAVVAPVEKTISSEKASSTPSSETQEEFVDDFRVGERVWVNGNKPGFIQFLGETQFAPGQWAGIVLDEPIGKNDGSVAGVRYFQCEPLKGIFTRPSKLTRKVQAEDEANGLQTTPASRATSPLCTSTASMVSSSPSTPSNIPQKPSQPAAKEPSATPPISNLTKTASESISNLSEAGSIKKGERELKIGDRVLVGGTKAGVVRFLGETDFAKGEWCGVELDEPLGKNDGAVAGTRYFQCQPKYGLFAPVHKVTKIGFPSTTPAKAKANAVRRVMATTSASLKRSPSASSLSSMSSVASSVSSRPSRTGLHVLELEAKMDQLRTMVEAADREKVELLNQLEEEKRKVEDLQFRVEEESITKGDLEQKSQISEDPENVRGHLTVWIFPLLTKIDHRLKCLLI

SEQ ID NO: 8160 - DNA, 478 bp, Homo sapiens
gtttctcctttgcctgttgccactatctttccccaaccattgatacaactgtgggttctatagtgaagtcagtctctggattaaatctgcaaagagaaagaaataaaaagattttataatctacaggagcaagtaggaacaacaggtagctttcatagactaaagctttcctttcatttgacaataatccatctccaggctgaacctaggaacctagaagactctggttattaaacacatgaaaatgctgctgaaatggatttaaaggcaatttactatcctcaagacaagcagttagccaggtgccatgacccactcctcacatctgtaatcccagcactttgggaggctaagataggaggactgtttgaggctgagggggaaggatttcatgagcccaggagtttgaggctgcagtgagccatgatcgatcacaccactgtactccagcctgggtgacagagcaagaccccaactc

SEQ ID NO: 8161 - protein, 54 aa, Homo sapiens
MDLKAIYYPQDKQLARCHDPLLTSVIPALWEAKIGGLFEAEGEGFHEPRSLRLQ

SEQ ID NO: 8162 - DNA, 833 bp, Homo sapiens
ctgagattagcagcatctaatctcagttttctccactgctgaccagcatcagcaacacaggcagaaaaaaaattcttttgagccacagtaaaacggcttcaaccgaaagagtgaagaaacagactctactgagctgctttctccacagaaacaagagtgcagtacagccaagccaggatggaattctagtcctgttttgggtatcaaatccaaatcctgtaagcaaaaggtcaaggattcagaagtgaaaggaaagactgtggctctaactttgccaaagtgaaaagtacagacctctgccatcagtgaagaaagaacccagatctgataagagcttcaaacaggctcagcacctcctggcacacatagagcggcatcacgttgccccaagaaaatcacatctctacacatcagaccctttccagtccattttgccccatccacaaaatgaaaatgccactttatttactaaatctaaaaattctgttgggaggcaaaggagagttgaagaatttgcaatgaatttaacctgccaggagagggagtttaacaccaagcttccagaaacaggctgcgtggtagctacaacgtccagaaacccaggtttcaacgcggccctgcttcaagacccaaaggaaattcagcaccaggcgggtgaagtgacttacctgtgcacagctgcactcgcagacttcggagcccccacctaattctaaaatgctgtatgtccatgaacttaataacagaaggtcaggggagagacgttctgagagcaacggaaatctatcttaagataaagatgtttctgaggctgatttttcaagtcaaacttg

SEQ ID NO: 8163 - protein, 63 aa, Homo sapiens [sequence omitted]

SEQ ID NO: 8164 - DNA, 1832 bp, Homo sapiens
gaaccttttttggccaagtgattgtgtcaggtagtcttttagtattcagtcttaattattttgcaggcaagtttagttttccttcaacacattattttccttaatttccaataaaggaaaagtaacataagaaggaaaaatgtaatttgagatctccactgtacctcctttgagcaaaatctcaaaacatgacattttccaaatacatgtgttttttttttccttctcttttcatcattaggaatggaggatctttggttccataccaatgcaggcatgtcagcagaaggatgtgtttgccaattaccttacttctaacttccaagcgccaggtgtgaagtctggcaacaagaggtcttcatctcactctagcccaggtagtccaaagaagcagaagaatgaaagcaactcagcgggatctcccgccgacatggagctcgattcagatatggaggtaccacatggttctcagagcagcgaaagttttcagtttcaaccaccattacctcctgacactcctccactcccccggggaactcctccacccgtcttcacccctccactcccaaagggcaccccgccgctgactcccagtgactcaccccagaccagaacagcatctggagctgtggatgaggacgcactgactctagaagaacttgaagaacagcagaggcggatctgggcagctcttgagcaggccgagagcgtaaacagcgactccgacgttcctgtggacacacctttaactggcaattccgttgcctcatcaccttgtccaaatgagctagacctccctgtcccggagggaaaaacatctgaaaagcagacgctggatgagcctgaggtaccagagatttttacaaagaaatcagaagctggacatgcctccagtccagactctgaggtgacatcactttgtcagaaggaaaaagcagagttggctccggtaaacactgaaggtgcccttcttgataatggcagtgtcgtaccaaactgtgacatcagcaatgggggcagccagaagctctttcctgcagacaccagtccttcaacggccactaaaattcatagccctatacctgacatgagcaaatttgcaactggaatcacgccatttgaatttgagaatatggcagaatctactggaatgtacctcaggataagaagcttgttaaagaactcaccccgaaaccagcagaaaaacaaaaaggcctctgaataatggcttgacttagcactgagagctatttaataactttgttccgttaattagtactaattaagtggatagatagaatggttttcctgtttgtccctcccatgtttaaaaatctatccaaggttcatgttccaaagtcaagcctattttaaagaaagactgagctcactagttcagtatattttattctcactgacaaaacttggggggagatgtgaatatgacctggtttagagagggtttgttaaggtttatactatttttggattgtgactatccgtcgagagtgatggtttttatctgtcttttgtacattgttttccctttctacattttgctaattatcctgtatataagtttaatatatcactttttaaaagaaaaaattctaccattttaaattcatgtttcaactcctacaaccaaatgagaaaaatcagggatgagcagctttatcccatttggggtatttttgtaagtgatttacatgtgtcaattttagtaatacttttacttttttgtaacttcatccttcatatatgcttgctatacaggtatgttcatctttgtgtacagaggtttaataaattagttttcatatacataatct

SEQ ID NO: 8165 - protein, 318 aa, Homo sapiens [sequence omitted]

SEQ ID NO: 8166 - DNA, 4767 bp, Homo sapiens
gtgcagctttcgcggcctgcgtctggagaaaaccctagcgggtggctccgtgcggccagagctctagagagtggtgccgccttccaaccttcttccccaagccctggtggccggctccgcctcttctcgaatcttttccacagcccaaaatggccgcagaggtgtattttggcgatctagagctcttcgagccgttcgaccacccagaggagtcgattccgaagcccgttcacactcgcttcaaggacgacgacggcgacgaggaggacgaaaatggggtcggcgacgcggagctacgggagcggcttcggcagtgcgaggagaccatcgagcagctccgcgccgagaatatcctttcctctcgctgggccctgtcacccgggtgtggggccggggcagcgccaggcgtggggccggggcagcgccgggcgagggcgagggcgcgggcggaagttccaggagggccagaattccaagtgctttctgtcacccgccggcggaccgagagtctagggttcggggcgcgcaggctgcctcggcgcagacctcttcccctcagggaggccgtctcctgaccagacccactcctgcctcccacccgggtgccgtgtttagggttattttaggctgctcacctgacagattgtacacaagcccttaattgcccccctctgtttgaggtcgtggtgaggtttcatatttcgcagccacgctcaaattgtgccgtcatgttacagttgtaggtgatgaaataccggctgcttagacgcgggatcggtttttataccggggcaaacgctagtggtcccagaatgcagagttgggggcctcaaggaatccgggtgtgctgagataattggttaattgcttgattaaaattggggattaattttagagttcttccactcggagctcgcttctgtgctgaagatgctttgcaacgccttgaggaaaacgcgccaaagaagtttctgttagacttgagttacaagattgcagatttttcttgatttgctagtatgtttttttttacgttcgtagagttttataggtagatagataactttggttcgggtagttttccttttaaaatttgtagagaactgaaagtggctgatatgttagcttttttagggggacggggtcggggaatggagtctcagtctgttgcccaggctggagtgcagtggcgcgatctcggctcactgcaacctccgcctcccgggttcaagcgattctcctgcctcagcctcccgaatagctgggattacaggcgcccgccacggcgcccagtcagtatatcagtttttaaggtttgtgaagcgcgatttattttttcagaatgtcgtcttcctccacattgtgaggaaaattttcagaatacaaaaagttgaggccgggcgctgtggctcaagcctgtaatcccagcactttgggaggccgaggcgggtggatcatgaggtcaggaggatcatgaggatcaggtggatcatgaggatcaggaggtcagcctggccaacatggtgaaaccccgtctctactaaaaatacaaaattagccgggcgtggtggcgcgtgcttgtaatcccagctactcaggaggctgaggcaggagaatcccttgaacctgggaggcggaggttgcagtgagccaagatcacaccattgcactccagcctgggcgacagggtgagactgtgtctcaaaaaaaaaaaaaaaaagttgaaaggattctacagtggacatccatagatttattccaaattctaaagttgttaacagctcgttatactgcattctctttatcacatagtggttgttgaaaggtttgacaggaacactgatgcttcaataatggttttggttcagtttgttagtctgttgaacttcaggatcgtgtcttagaatatatgttcgaaaggataaaaaccgtactttaattttgggtttcaaaagcctacccctgcaacaaaatagaagctcaataagtgtgtcatcctcaaaatatccgtgggtcttttgtctttataatattctgacaccaaaagtgagagaagtagtagttgaattttatgatttgcattgttaaatgagggcttatcttccttaacaaataataacatcaagaacttaaacgaaaattgaacattctgactcgaccgagtggaatattggtgaacgatactaagttagatggacctatattacagattctattcatgaacaatgctatttcaaagcaatatcatcaagaaatagaggaatttgtatcaaatttagtaaaaagatttgaggaacagcagaaaaatgatgtggaaaagacttcctttaatcttttgccccagccatccagtattgtgctagaggaggaccacaaagtggaagagtcctgtgccattaaaaacaacaaggaagctttcagtgttgtaggaagtgtcctgtattttactaatttttgccttgataaattggggcaaccgcttctaaatgaaaaccctcagctttccgaaggatgggaaatacccaagtatcctacatagtgaatgaagatcttttatgcatcttgccactaagttcacctttaaaacaatttccaaattttgcagaccatgataactattccttaataaaattcactaaaggtaccatcaagtcttcagccacattgtttctctagaagggcaagaaatacaagtaaaggcaaaaaggccaaagcctcactgtttcaattgtggttctgaagaacaccaaatgaaagattgcccaatgcctcggaatgctgctcgaataagtgaaaagagaaaagagtatatggatgcctgtggagaagcaaacaatcagaatttccagcagcgataccacgcagaagaagtagaagaaagatttggaagattcaagccaggagttattagtgaggaacttcaagatgcactaggtgtgacagacaagagtcttccaccttttatctatcggatgcgccagctagggtacccaccagggtggctcaaagaggctgaattggagaattcggggcttgcactctatgatggaaaagatggcactgatggggaaacagaagttggagaaatacaacagaataaaagtgtcacttacgatctctcaaaattggtcaactatcctggttttaatatatctactcccagaggaattccagacgaatggaggatctttggttccataccaatgcaggcatgtcagcagaaggatgtgtttgccaattaccttacttctaacttccaagcgccaggtgtgaagtctggcaacaagaggtcttcatctcactctagcccaggtagtccaaagaagcagaagaatgaaagcaactcagcgggatctcccgccgacatggagctcgattcagatatggaggtaccacatggttctcagagcagcgaaagttttcagtttcaaccaccattacctcctgacactcctccactcccccggggaactcctccacccgtcttcacccctccactcccaaagggcaccccgccgctgactcccagtgactcaccccagaccagaacagcatctggagctgtggatgaggacgcactgactctagaagaacttgaagaacagcagaggcggatctgggcagctcttgagcaggccgagagcgtaaacagcgactccgacgttcctgtggacacacctttaactggcaattccgttgcctcatcaccttgtccaaatgagctagacctccctgtcccggagggaaaaacatctgaaaagcagacgctggatgagcctgaggtaccagagatttttacaaagaaatcagaagctggacatgcctccagtccagactctgaggtgacatcactttgtcagaaggaaaaagcagagttggctccggtaaacactgaaggtgcccttcttgataatggcagtgtcgtaccaaactgtgacatcagcaatgggggcagccagaagctctttcctgcagacaccagtccttcaacggccactaaaattcatagccctatacctgacatgagcaaatttgcaactggaatcacgccatttgaatttgagaatatggcagaatctactggaatgtacctcaggataagaagcttgttaaagaactcaccccgaaaccagcagaaaaacaaaaaggcctctgaataatggcttgacttagcactgagagctatttaataactttgttccgttaattagtactaattaagtggatagatagaatggttttcctgtttgtccctcccatgtttaaaaatctatccaaggttcatgttccaaagtcaagcctattttaaagaaagactgagctcactagttcagtatattttattctcactgacaaaacttggggggagatgtgaatatgacctggtttagagagggtttgttaaggtttatactatttttggattgtgactatccgtcgagagtgatggtttttatctgtcttttgtacattgttttccctttctacattttgctaattatcctgtatataagtttaatatatcactttttaaaagaaaaaattctaccattttaaattcatgtttcaactcctacaaccaaatgagaaaaatcagggatgagcagctttatcccatttggggtatttttgtaagtgatttacatgtgtcaattttagtaatacttttacttttttgtaacttcatccttcatatatgcttgctatacaggtatgttcatctttgtgtacagaggtttaataaattagttttcatatacataatct

SEQ ID NO: 8167 - protein, 469 aa, Homo sapiens
MKDCPMPRNAARISEKRKEYMDACGEANNQNFQQRYHAEEVEERFGRFKPGVISEELQDALGVTDKSLPPFIYRMRQLGYPPGWLKEAELENSGLALYDGKDGTDGETEVGEIQQNKSVTYDLSKLVNYPGFNISTPRGIPDEWRIFGSIPMQACQQKDVFANYLTSNFQAPGVKSGNKRSSSHSSPGSPKKQKNESNSAGSPADMELDSDMEVPHGSQSSESFQFQPPLPPDTPPLPRGTPPPVFTPPLPKGTPPLTPSDSPQTRTASGAVDEDALTLEELEEQQRRIWAALEQAESVNSDSDVPVDTPLTGNSVASSPCPNELDLPVPEGKTSEKQTLDEPEVPEIFTKKSEAGHASSPDSEVTSLCQKEKAELAPVNTEGALLDNGSVVPNCDISNGGSQKLFPADTSPSTATKIHSPIPDMSKFATGITPFEFENMAESTGMYLRIRSLLKNSPRNQQKNKKASE

SEQ ID NO: 8168 - DNA, 2964 bp, Homo sapiens
atgccgtcctccgggcaatcgcaagcccgataggccccgctgcattccgggagttgtagtctctagcgactggccccgccccgtgtgcagctttcgcggcctgcgtctggagaaaaccctagcgggtggctccgtgcggccagagctctagagagtggtgccgccttccaaccttcttccccaagccctggtggccggctccgcctcttctcgaatcttttccacagcccaaaatggccgcagaggtgtattttggcgatctagagctcttcgagccgttcgaccacccagaggagtcgattccgaagcccgttcacactcgcttcaaggacgacgacggcgacgaggaggacgaaaatggggtcggcgacgcggagctacgggagcggcttcggcagtgcgaggagaccatcgagcagctccgcgccgagaatcaagaacttaaacgaaaattgaacattctgactcgaccgagtggaatattggtgaacgatactaagttagatggacctatattacagattctattcatgaacaatgctatttcaaagcaatatcatcaagaaatagaggaatttgtatcaaatttagtaaaaagatttgaggaacagcagaaaaatgatgtggaaaagacttcctttaatcttttgccccagccatccagtattgtgctagaggaggaccacaaagtggaagagtcctgtgccattaaaaacaacaaggaagctttcagtgttgtaggaagtgtcctgtattttactaatttttgccttgataaattggggcaaccgcttctaaatgaaaaccctcagctttccgaaggatgggaaatacccaagtaccatcaagtcttcagccacattgtttctctagaagggcaagaaatacaagtaaaggcaaaaaggccaaagcctcactgtttcaattgtggttctgaagaacaccaaatgaaagattgcccaatgcctcggaatgctgctcgaataagtgaaaagagaaaagagtatatggatgcctgtggagaagcaaacaatcagaatttccagcagcgataccacgcagaagaagtagaagaaagatttggaagattcaagccaggagttattagtgaggaacttcaagatgcactaggtgtgacagacaagagtcttccaccttttatctatcggatgcgccagctagggtacccaccagggtggctcaaagaggctgaattggagaattcggggcttgcactctatgatggaaaagatggcactgatggggaaacagaagttggagaaatacaacagaataaaagtgtcacttacgatctctcaaaattggtcaactatcctggttttaatatatctactcccagaggaattccagacgaatggaggatctttggttccataccaatgcaggcatgtcagcagaaggatgtgtttgccaattaccttacttctaacttccaagcgccaggtgtgaagtctggcaacaagaggtcttcatctcactctagcccaggtagtccaaagaagcagaagaatgaaagcaactcagcgggatctcccgccgacatggagctcgattcagatatggaggtaccacatggttctcagagcagcgaaagttttcagtttcaaccaccattacctcctgacactcctccactcccccggggaactcctccacccgtcttcacccctccactcccaaagggcaccccgccgctgactcccagtgactcaccccagaccagaacagcatctggagctgtggatgaggacgcactgactctagaagaacttgaagaacagcagaggcggatctgggcagctcttgagcaggccgagagcgtaaacagcgactccgacgttcctgtggacacacctttaactggcaattccgttgcctcatcaccttgtccaaatgagctagacctccctgtcccggagggaaaaacatctgaaaagcagacgctggatgagcctgaggtaccagagatttttacaaagaaatcagaagctggacatgcctccagtccagactctgaggtgacatcactttgtcagaaggaaaaagcagagttggctccggtaaacactgaaggtgcccttcttgataatggcagtgtcgtaccaaactgtgacatcagcaatgggggcagccagaagctctttcctgcagacaccagtccttcaacggccactaaaattcatagccctatacctgacatgagcaaatttgcaactggaatcacgccatttgaatttgagaatatggcagaatctactggaatgtacctcaggataagaagcttgttaaagaactcaccccgaaaccagcagaaaaacaaaaaggcctctgaataatggcttgacttagcactgagagctatttaataactttgttccgttaattagtactaattaagtggatagatagaatggttttcctgtttgtccctcccatgtttaaaaatctatccaaggttcatgttccaaagtcaagcctattttaaagaaagactgagctcactagttcagtatattttattctcactgacaaaacttggggggagatgtgaatatgacctggtttagagagggtttgttaaggtttatactatttttggattgtgactatccgtcgagagtgatggtttttatctgtcttttgtacattgttttccctttctacattttgctaattatcctgtatataagtttaatatatcactttttaaaagaaaaaattctaccattttaaattcatgtttcaactcctacaaccaaatgagaaaaatcagggatgagcagctttatcccatttggggtatttttgtaagtgatttacatgtgtcaattttagtaatacttttacttttttgtaacttcatccttcatatatgcttgctatacaggtatgttcatctttgtgtacagaggtttaataaattagttttcatatacataatct

SEQ ID NO: 8169 - protein, 707 aa, Homo sapiens; identical to SEQ ID NO: 928

SEQ ID NO: 8170 - DNA, 1407 bp, Homo sapiens
attccaagtgctttctgtcacccgccggcggaccgagagtctagggttcggggcgcgcaggctgcctcggcgcagacctcttcccctcagggaggccgtctcctgaccagacccactcctgcctcccacccgggtgccgtgtttagggttattttaggctgctcacctgacagattgtacacaagcccttaattgcccccctctgtttgaggtcgtggtgaggtttcatatttcgcagccacgctcaaattgtgccgtcatgttacagttgtaggtgatgaaataccggctgcttagacgcgggatcggtttttataccggggcaaacgctagtggtcccagaatgcagagttgggggcctcaaggaatccgggtgtgctgagataattggttaattgcttgattaaaattggggattaattttagagttcttccactcggagctcgcttctgtgctgaagatgctttgcaacgccttgaggaaaacgcgccaaagaagtttctgttagacttgagttacaagattgcagatttttcttgatttgctatggaatattggtgaacgatactaagttagatggacctatattacagattctattcatgaacaatgctatttcaaagcaatatcatcaagaaatagaggaatttgtatcaaatttagtaaaaagatttgaggaacagcagaaaaatgatgtggaaaagacttcctttaatcttttgccccagccatccagtattgtgctagaggaggaccacaaagtggaagagtcctgtgccattaaaaacaacaaggaagctttcagtgttgtaggaagtgtcctgtattttactaatttttgccttgataaattggggcaaccgcttctaaatgaaaaccctcagctttccgaaggatgggaaatacccaagtatcctacatagtgaatgaagatcttttatgcatcttgccactaagttcacctttaaaacaatttccaaattttgcagaccatgataactattccttaataaaattcactaaaggtaccatcaagtcttcagccacattgtttctctagaagggcaagaaatacaagtaaaggcaaaaaggtttgtgtggggagttgttttgttttacttatttacttttttaaccaaaatcataaacttttggcttgaaaagttcatgttctttactgctggtttactctaaggttaattacagattgagctagaattttaatccatacatatatgttaaatgtttaaatgaatcatctgcttcctggaattcattggttctcacctaatgtgcctgggtgggtggaaaggtataattgttgctgtcaatttgattgcagtcttataaccatctgccttctttccatgttacctaacggaaatatgatcaatgtgttcaccttg

SEQ ID NO: 8171 - protein, 106 aa, Homo sapiens
MNNAISKQYHQEIEEFVSNLVKRFEEQQKNDVEKTSFNLLPQPSSIVLEEDHKVEESCAIKNNKEAFSVVGSVLYFTNFCLDKLGQPLLNENPQLSEGWEIPKYPT

SEQ ID NO: 8172 - DNA, 1334 bp, Homo sapiens
atgccgtcctccgggcaatcgcaagcccgataggccccgctgcattccgggagttgtagtctctagcgactggccccgccccgtgtgcagctttcgcggcctgcgtctggagaaaaccctagcgggtggctccgtgcggccagagctctagagagtggtgccgccttccaaccttcttccccaagccctggtggccggctccgcctcttctcgaatcttttccacagcccaaaatggccgcagaggtgtattttggcgatctagagctcttcgagccgttcgaccacccagaggagtcgattccgaagcccgttcacactcgcttcaaggacgacgacggcgacgaggaggacgaaaatggggtcggcgacgcggagctacgggagcggcttcggcagtgcgaggagaccatcgagcagctccgcgccgagaatcaagaacttaaacgaaaattgaacattctgactcgaccgagtggaatattggtgaacgatactaagttagatggacctatattacagattctattcatgaacaatgctatttcaaagcaatatcatcaagaaatagaggaatttgtatcaaatttagtaaaaagatttgaggaacagcagaaaaatgatgtggaaaagacttcctttaatcttttgccccagccatccagtattgtgctagaggaggaccacaaagtggaagagtcctgtgccattaaaaacaacaaggaagctttcagtgttgtaggaagtgtcctgtattttactaatttttgccttgataaattggggcaaccgcttctaaatgaaaaccctcagctttccgaaggatgggaaatacccaagtatcctacatagtgaatgaagatcttttatgcatcttgccactaagttcacctttaaaacaatttccaaattttgcagaccatgataactattccttaataaaattcactaaaggtaccatcaagtcttcagccacattgtttctctagaagggcaagaaatacaagtaaaggcaaaaaggtttgtgtggggagttgttttgttttacttatttacttttttaaccaaaatcataaacttttggcttgaaaagttcatgttctttactgctggtttactctaaggttaattacagattgagctagaattttaatccatacatatatgttaaatgtttaaatgaatcatctgcttcctggaattcattggttctcacctaatgtgcctgggtgggtggaaaggtataattgttgctgtcaatttgattgcagtcttataaccatctgccttctttccatgttacctaacggaaatatgatcaatgtgttcaccttg

SEQ ID NO: 8173 - protein, 205 aa, Homo sapiens [sequence omitted]

SEQ ID NO: 8174 - DNA, 361 bp, Homo sapiens
ggggcttcaccatgttggccaggctggtctcgaactcctggcctcgagtgatctgtccacctcaacctcccaaagtgctggaattaacaggcatgagccactgcacctggcctcacatgaactttttagtccctggcaccagttggaataactggctgcagtggtgactacaggtttaaattttagaatttagaaatatttcagattttttttttttgagatggagtctcgctctgtcgcccaggctggagtgcagtggcatgacctcggctcactgcagcctccacctcctgggttcaagcgattctgctttctcctgcctcaaaaaaaaaaaaaaaattaaagagtatatgtgaggcca

SEQ ID NO: 8175 - protein, 40 aa, Homo sapiens
MESRSVAQAGVQWHDLGSLQPPPPGFKRFCFLLPQKKKKN

SEQ ID NO: 8176 - DNA, 571 bp, Homo sapiens
gtgcagctttcgcggcctgcgtctggagaaaaccctagcgggtggctccgtgcggccagagctctagagagtggtgccgccttccaaccttcttccccaagccctggtggccggctccgcctcttctcgaatcttttccacagcccaaaatggccgcagaggtgtattttggcgatctagagctcttcgagccgttcgaccacccagaggagtcgattccgaagcccgttcacactcgcttcaaggacgacgacggcgacgaggaggacgaaaatggggtcggcgacgcggagctacgggagcggcttcggcagtgcgaggagaccatcgagcagctccgcgccgagaatcaagaacttaaacgaaaattgaacattctgactcgaccgagtggaatattggtgaacgatactaagttagatggacctatattacagattctattcatgaacaatgctatttcaaagtaagtaattttttccctttcctaaatataataatgtgtttatggaacaattttctctataaatatgctgttttcatttgtactcatatcatttttattatttta

SEQ ID NO: 8177 - protein, 106 aa, Homo sapiens
MAAEVYFGDLELFEPFDHPEESIPKPVHTRFKDDDGDEEDENGVGDAELRERLRQCEETIEQLRAENQELKRKLNILTRPSGILVNDTKLDGPILQILFMNNAISK

SEQ ID NO: 8178 - DNA, 2414 bp, Homo sapiens
aagctgtgcgacgcgccgggcctcctcgcctttgtgccatccgggtctctcgcgcgagcgatttagtctgaggcgaagcttcggagcggccggtactgttgaaagcgacaagtggaggcgccgctctagcggccgggactctgaactatggcggctagtgatacagagcgagatggactagccccagaaaagacatcaccagatagagataagaaaaaagagcagtcagaagtatctgtttctcctagagcttcaaaacatcattattcaagatcacgatcaaggtcaagagaaagaaaacgaaagtcagataatgaaggaagaaaacacaggagccggagcagaagcaaagagcgtgcttatgcgcgaagagactgaactgaagacgctgcagactcagatagcaaaataataagcctacttcatgataagggaagaagacatgaatccaaagataaatcctctaagaaacataagtctgaggaacataatgacaaagaacattcttctgataaaggaagagagcgactaaattcatctgaaaatggtgaggacaggcacaaacgcaaagaaagaaagtcatcaagaggcagaagtcactcaagatctaggtctcgtgaaagacgccatcgtagtagaagcagggagcggaagaagtctcgatccaggagtagggagcggaagaaatcgagatccagaagcagagagaggaagaaatcgagatccagaagcagggaaagaaaacggcggatcaggtctcgttcccgctcaagatcaagacacaggcataggactagaagcaggagtaggacaaggagtaggagtcgagatagaaagaagagaattgaaaagccgagaagatttagcagaagtttaagccggactccaagtccacctcccttcagaggcagaaacacagcaatggatgcacaggaagctttagctagaaggttggaaagggcaaagaaattacaagaacagcgagaaaaggaaatggttgaaaaacaaaaacaacaagaaatagctgcagctgcagctactggaggttctgttctcaatgttgctgccctgttggcatcaggaacacaagtaacacctcagatagccatggcagctcagatggcagccctgcaagctaaagctttggcagagacaggaatagctgttcctagctactataacccagccgctgttaatccaatgaaatttgctgaacaagagaaaaaaaggaaaatgctttggcagggcaagaaagaaggggacaaatcccaatctgctgaaatatgggaaaaattgaattttggaaacaaggaccaaaatgtcaaatttaggaaattgatgggtattaagagtgaagatgaagctggatgtagctcagttgatgaagaaagttacaagactctgaagcagcaggaagaagtatttcgaaatttagatgctcagtatgaaatggcaagatcacaaacccacacacaaagaggaatgggtttgggtttcacatcttcaatgcgaggaatggatgcagtttgaaaatgatcacacttgtaaagtttgggacttatagacttcttgttctgatgtcacgtccttgttcaccaaacagctagcactctagcttgcatgggtgttgcattgactttaatttattgaaaaatacaaatttttgtaaatatcagatcagtgatactggtgttagtgttgtaatcaggttaaacccacttccattaaacttgacaggactatagaaggataatattttttagttcatgaattctacttttcaaatatataaaagctgcaggtggggataaaatctcatacatggattttttcgtgtccgctgtcttgtgtacttttgtacttaaccttgtacagttattttcatctcttgaaacatgaaagaaatgttatgtagatgttctttagaagatctggccatttggtacataatccagcacagataagctgggtggtaatgataataaaaatggttttctcaaaactggtgttaatttaagttacctgggatgtttctttgaatttgttttatagtttctgtagcatttggcaattgctgttagaaaacactagctagaaatcccctccccaccaccctttttaaggccagttaactatactacagtcaataccgtggtgagcaaaaatgtaaaaggtggaaggagaaaacttactaaaatagtatgttttcctattataagggacagacttggtattcagtatttgtcaaatattacatgtgttattcaggagatagattaatgcattaaagggatgtaagcacttttattttaataaagtgccttataacaagttctttgcatgctttttgctcattatccctttgaagtcttctccagcatagactataaaatattaaaatattagaaattttt

SEQ ID NO: 8179 - protein, 202 aa, Homo sapiens; identical to SEQ ID NO: 934

SEQ ID NO: 8180 - DNA, 2347 bp, Homo sapiens
tttctcccagcaagctgtgcgacgcgccgggcctcctcgcctttgtgccatccgggtctctcgcgcgagcgatttagtctgaggcgaagcttcggagcggccggtactgttgaaagcgacaagtggaggcgccgctctagcggccgggactctgaactatggcggctagtgatacagagcgagatggactagccccagaaaagacatcaccagatagagataagaaaaaagagcagtcagaagtatctgtttctcctagagcttcaaaacatcattattcaagatcacgatcaaggtcaagagaaagaaaacgaaagtcagataatgaaggaagaaaacacaggagccggagcagaagcaaagagggaagaagacatgaatccaaagataaatcctctaagaaacataagtctgaggaacataatgacaaagaacattcttctgataaaggaagagagcgactaaattcatctgaaaatggtgaggacaggcacaaacgcaaagaaagaaagtcatcaagaggcagaagtcactcaagatctaggtctcgtgaaagacgccatcgtagtagaagcagggagcggaagaagtctcgatccaggagtagggagcggaagaaatcgagatccagaagcagagagaggaagaaatcgagatccagaagcagggaaagaaaacggcggatcaggtctcgttcccgctcaagatcaagacacaggcataggactagaagcaggagtaggacaaggagtaggagtcgagatagaaagaagagaattgaaaagccgagaagatttagcagaagtttaagccggactccaagtccacctcccttcagaggcagaaacacagcaatggatgcacaggaagctttagctagaaggttggaaagggcaaagaaattacaagaacagcgagaaaaggaaatggttgaaaaacaaaaacaacaagaaatagctgcagctgcagctactggaggttctgttctcaatgttgctgccctgttggcatcaggaacacaagtaacacctcagatagccatggcagctcagatggcagccctgcaagctaaagctttggcagagacaggaatagctgttcctagctactataacccagccgctgttaatccaatgaaatttgctgaacaagagaaaaaaaggaaaatgctttggcagggcaagaaagaaggggacaaatcccaatctgctgaaatatgggaaaaattgaattttggaaacaaggaccaaaatgtcaaatttaggaaattgatgggtattaagagtgaagatgaagctggatgtagctcagttgatgaagaaagttacaagactctgaagcagcaggaagaagtatttcgaaatttagatgctcagtatgaaatggcaagatcacaaacccacacacaaagaggaatgggtttgggtttcacatcttcaatgcgaggaatggatgcagtttgaaaatgatcacacttgtaaagtttgggacttatagacttcttgttctgatgtcacgtccttgttcaccaaacagctagcactctagcttgcatgggtgttgcattgactttaatttattgaaaaatacaaatttttgtaaatatcagatcagtgatactggtgttagtgttgtaatcaggttaaacccacttccattaaacttgacaggactatagaaggataatattttttagttcatgaattctacttttcaaatatataaaagctgcaggtggggataaaatctcatacatggattttttcgtgtccgctgtcttgtgtacttttgtacttaaccttgtacagttattttcatctcttgaaacatgaaagaaatgttatgtagatgttctttagaagatctggccatttggtacataatccagcacagataagctgggtggtaatgataataaaaatggttttctcaaaactggtgttaatttaagttacctgggatgtttctttgaatttgttttatagtttctgtagcatttggcaattgctgttagaaaacactagctagaaatcccctccccaccaccctttttaaggccagttaactatactacagtcaataccgtggtgagcaaaaatgtaaaaggtggaaggagaaaacttactaaaatagtatgttttcctattataagggacagacttggtattcagtatttgtcaaatattacatgtgttattcaggagatagattaatgcattaaagggatgtaagcacttttattttaataaagtgccttataacaagttctttgcatgctttttgctcattatccctttgaagtcttctccagcatagactataaaatattaaaatattagaaattttt

SEQ ID NO: 8181 - protein, 434 aa, Homo sapiens; identical to SEQ ID NO: 930

SEQ ID NO: 8182 - DNA, 2329 bp, Homo sapiens
aagctgtgcgacgcgccgggcctcctcgcctttgtgccatccgggtctctcgcgcgagcgatttagtctgaggcgaagcttcggagcggccggtactgttgaaagcgacaagtggaggcgccgctctagcggccgggactctgaactatggcggctagtgatacagagcgagatggactagccccagaaaagacatcaccagatagagataagaaaaaagagcagtcagaagtatctgtttctcctagagcttcaaaacatcattattcaagatcacgatcaaggtcaagagaaagaaaacgaaagtcagataatgaaggaagaaaacacaggagccggagcagaagcaaagagcgtgcttatgcgcgaagagactgaactgaagacgctgcagactcagatagcaaaataataagcctacttcatgataagggaagaagacatgaatccaaagataaatcctctaagaaacataagtctgaggaacataatgacaaagaacattcttctgataaaggaagagagcgactaaattcatctgaaaatggtgaggacaggcacaaacgcaaagaaagaaagtcatcaagaggcagaagtcactcaagatctaggtctcgtgaaagacgccatcgtagtagaagcagggagcggaagaagtctcgatccaggagtagggagcggaagaaatcgagatccagaagcagagagaggaagaaatcgagatccagaagcagggaaagaaaacggcggatcaggtctcgttcccgctcaagatcaagacacaggcataggactagaagcaggagtaggacaaggagtaggagtcgagatagaaagaagagaattgaaaagccgagaagatttagcagaagtttaagccggactccaagtccacctcccttcagaggcagaaacacagcaatggatgcacaggaagctttagctagaaggttggaaagggcaaagaaattacaagaacagcgagaaaaggaaatggttgaaaaacaaaaacaacaagaaatagctgcagctgcagctactggaggttctgttctcaatgttgctgccctgttggcatcaggaacacaagtaacacctcagatagccatggcagctcagatggcagccctgcaagctaaagctttggcagagacaggaatagctgttcctagctactataacccagccgctgttaatccaatgaaatttgctgaacaagagaaaaaaaggaaaatgctttggcagggcaagaaagaaggggacaaatcccaatctgctgaaatatgggaaaaattgaattttggaaacaaggaccaaaatgtcaaatttaggaaattgatgggtattaagagtgaagatgaagctggatgtagctcagttgatgaagaaagttacaagactctgaagcagcaggaagaagtatttcgaaatttagatgctcagtatgaaatggcaagatcacaaacccacacacaaagaggaatgggtttgggtttcacatcttcaatgcgaggaatggatgcagtttgaaaatgatcacacttgtaaagtttgggacttatagacttcttgttctgatgtcacgtccttgttcaccaaacagctagcactctagcttgcatgggtgttgcattgactttaatttattgaaaaatacaaatttttgtaaatatcagatcagtgatactggtgttagtgttgtaatcaggttaaacccacttccattaaacttgacaggactatagaaggataatattttttagttcatgaattctacttttcaaatatataaaagctgcaggtggggataaaatctcatacatggattttttcgtgtccgctgtcttgtgtacttttgtacttaaccttgtacagttattttcatctcttgaaacatgaaagaaatgttatgtagatgttctttagaagatctggccatttggtacataatccagcacagataagctgggtggtaatgataataaaaatggttttctcaaaactggtgttaatttaagttacctgggatgtttctttgaatttgttttatagtttctgtagcatttggcaattgctgttagaaaacactagctagaaatcccctccccaccaccctttttaaggccagttaactatactacagtcaataccgtggtgagcaaaaatgtaaaaggtggaaggagaaaacttactaaaatagtatgttttcctattataagggacagacttggtattcagtatttgtcaaatattacatgtgttattcaggagatagattaatgcattaaagggatgtaagcacttttattttaataaagtgccttataac

SEQ ID NO: 8183 - protein, 202 aa, Homo sapiens; identical to SEQ ID NO: 934

SEQ ID NO: 8184 - DNA, 2262 bp, Homo sapiens
tttctcccagcaagctgtgcgacgcgccgggcctcctcgcctttgtgccatccgggtctctcgcgcgagcgatttagtctgaggcgaagcttcggagcggccggtactgttgaaagcgacaagtggaggcgccgctctagcggccgggactctgaactatggcggctagtgatacagagcgagatggactagccccagaaaagacatcaccagatagagataagaaaaaagagcagtcagaagtatctgtttctcctagagcttcaaaacatcattattcaagatcacgatcaaggtcaagagaaagaaaacgaaagtcagataatgaaggaagaaaacacaggagccggagcagaagcaaagagggaagaagacatgaatccaaagataaatcctctaagaaacataagtctgaggaacataatgacaaagaacattcttctgataaaggaagagagcgactaaattcatctgaaaatggtgaggacaggcacaaacgcaaagaaagaaagtcatcaagaggcagaagtcactcaagatctaggtctcgtgaaagacgccatcgtagtagaagcagggagcggaagaagtctcgatccaggagtagggagcggaagaaatcgagatccagaagcagagagaggaagaaatcgagatccagaagcagggaaagaaaacggcggatcaggtctcgttcccgctcaagatcaagacacaggcataggactagaagcaggagtaggacaaggagtaggagtcgagatagaaagaagagaattgaaaagccgagaagatttagcagaagtttaagccggactccaagtccacctcccttcagaggcagaaacacagcaatggatgcacaggaagctttagctagaaggttggaaagggcaaagaaattacaagaacagcgagaaaaggaaatggttgaaaaacaaaaacaacaagaaatagctgcagctgcagctactggaggttctgttctcaatgttgctgccctgttggcatcaggaacacaagtaacacctcagatagccatggcagctcagatggcagccctgcaagctaaagctttggcagagacaggaatagctgttcctagctactataacccagccgctgttaatccaatgaaatttgctgaacaagagaaaaaaaggaaaatgctttggcagggcaagaaagaaggggacaaatcccaatctgctgaaatatgggaaaaattgaattttggaaacaaggaccaaaatgtcaaatttaggaaattgatgggtattaagagtgaagatgaagctggatgtagctcagttgatgaagaaagttacaagactctgaagcagcaggaagaagtatttcgaaatttagatgctcagtatgaaatggcaagatcacaaacccacacacaaagaggaatgggtttgggtttcacatcttcaatgcgaggaatggatgcagtttgaaaatgatcacacttgtaaagtttgggacttatagacttcttgttctgatgtcacgtccttgttcaccaaacagctagcactctagcttgcatgggtgttgcattgactttaatttattgaaaaatacaaatttttgtaaatatcagatcagtgatactggtgttagtgttgtaatcaggttaaacccacttccattaaacttgacaggactatagaaggataatattttttagttcatgaattctacttttcaaatatataaaagctgcaggtggggataaaatctcatacatggattttttcgtgtccgctgtcttgtgtacttttgtacttaaccttgtacagttattttcatctcttgaaacatgaaagaaatgttatgtagatgttctttagaagatctggccatttggtacataatccagcacagataagctgggtggtaatgataataaaaatggttttctcaaaactggtgttaatttaagttacctgggatgtttctttgaatttgttttatagtttctgtagcatttggcaattgctgttagaaaacactagctagaaatcccctccccaccaccctttttaaggccagttaactatactacagtcaataccgtggtgagcaaaaatgtaaaaggtggaaggagaaaacttactaaaatagtatgttttcctattataagggacagacttggtattcagtatttgtcaaatattacatgtgttattcaggagatagattaatgcattaaagggatgtaagcacttttattttaataaagtgccttataac

SEQ ID NO: 8185 - protein, 434 aa, Homo sapiens; identical to SEQ ID NO: 930

SEQ ID NO: 8186 - DNA, 2015 bp, Homo sapiens
aagctgtgcgacgcgccgggcctcctcgcctttgtgccatccgggtctctcgcgcgagcgatttagtctgaggcgaagcttcggagcggccggtactgttgaaagcgacaagtggaggcgccgctctagcggccgggactctgaactatggcggctagtgatacagagcgagatggactagccccagaaaagacatcaccagatagagataagaaaaaagagcagtcagaagtatctgtttctcctagagcttcaaaacatcattattcaagatcacgatcaaggtcaagagaaagaaaacgaaagtcagataatgaaggaagaaaacacaggagccggagcagaagcaaagagcgtgcttatgcgcgaagagactgaactgaagacgctgcagactcagatagcaaaataataagcctacttcatgataagggaagaagacatgaatccaaagataaatcctctaagaaacataagtctgaggaacataatgacaaagaacattcttctgataaaggaagagagcgactaaattcatctgaaaatggtgaggacaggcacaaacgcaaagaaagaaagtcatcaagaggcagaagtcactcaagatctaggtctcgtgaaagacgccatcgtagtagaagcagggagcggaagaagtctcgatccaggagtagggagcggaagaaatcgagatccagaagcagagagaggaagaaatcgagatccagaagcagggaaagaaaacggcggatcaggtctcgttcccgctcaagatcaagacacaggcataggactagaagcaggagtaggacaaggagtaggagtcgagatagaaagaagagaattgaaaagccgagaagatttagcagaagtttaagccggactccaagtccacctcccttcagaggcagaaacacagcaatggatgcacaggaagctttagctagaaggttggaaagggcaaagaaattacaagaacagcgagaaaaggaaatggttgaaaaacaaaaacaacaagaaatagctgcagctgcagctactggaggttctgttctcaatgttgctgccctgttggcatcaggaacacaagtaacacctcagatagccatggcagctcagatggcagccctgcaagctaaagctttggcagagacaggaatagctgttcctagctactataacccagccgctgttaatccaatgaaatttgctgaacaagagaaaaaaaggaaaatgctttggcagggcaagaaagaaggggacaaatcccaatctgctgaaatatgggaaaaattgaattttggaaacaaggaccaaaatgtcaaatttaggaaattgatgggtattaagagtgaagatgaagctggatgtagctcagttgatgaagaaagttacaagactctgaagcagcaggaagaagtatttcgaaatttagatgctcagtatgaaatggcaagatcacaaacccacacacaaagaggaatgggtttgggtttcacatcttcaatgcgaggaatggatgcagtttgaaaatgatcacacttgtaaagtttgggacttatagacttcttgttctgatgtcacgtccttgttcaccaaacagctagcactctagcttgcatgggtgttgcattgactttaatttattgaaaaatacaaatttttgtaaatatcagatcagtgatactggtgttagtgttgtaatcaggttaaacccacttccattaaacttgacaggactatagaaggataatattttttagttcatgaattctacttttcaaatatataaaagctgcaggtggggataaaatctcatacatggattttttcgtgtccgctgtcttgtgtacttttgtacttaaccttgtacagttattttcatctcttgaaacatgaaagaaatgttatgtagatgttctttagaagatctggccatttggtacataatccagcacagataagctgggtggtaatgataataaaaatggttttctcaaaactggtgttaattt

SEQ ID NO: 8187 - protein, 202 aa, Homo sapiens; identical to SEQ ID NO: 934

SEQ ID NO: 8188 - DNA, 1948 bp, Homo sapiens
tttctcccagcaagctgtgcgacgcgccgggcctcctcgcctttgtgccatccgggtctctcgcgcgagcgatttagtctgaggcgaagcttcggagcggccggtactgttgaaagcgacaagtggaggcgccgctctagcggccgggactctgaactatggcggctagtgatacagagcgagatggactagccccagaaaagacatcaccagatagagataagaaaaaagagcagtcagaagtatctgtttctcctagagcttcaaaacatcattattcaagatcacgatcaaggtcaagagaaagaaaacgaaagtcagataatgaaggaagaaaacacaggagccggagcagaagcaaagagggaagaagacatgaatccaaagataaatcctctaagaaacataagtctgaggaacataatgacaaagaacattcttctgataaaggaagagagcgactaaattcatctgaaaatggtgaggacaggcacaaacgcaaagaaagaaagtcatcaagaggcagaagtcactcaagatctaggtctcgtgaaagacgccatcgtagtagaagcagggagcggaagaagtctcgatccaggagtagggagcggaagaaatcgagatccagaagcagagagaggaagaaatcgagatccagaagcagggaaagaaaacggcggatcaggtctcgttcccgctcaagatcaagacacaggcataggactagaagcaggagtaggacaaggagtaggagtcgagatagaaagaagagaattgaaaagccgagaagatttagcagaagtttaagccggactccaagtccacctcccttcagaggcagaaacacagcaatggatgcacaggaagctttagctagaaggttggaaagggcaaagaaattacaagaacagcgagaaaaggaaatggttgaaaaacaaaaacaacaagaaatagctgcagctgcagctactggaggttctgttctcaatgttgctgccctgttggcatcaggaacacaagtaacacctcagatagccatggcagctcagatggcagccctgcaagctaaagctttggcagagacaggaatagctgttcctagctactataacccagccgctgttaatccaatgaaatttgctgaacaagagaaaaaaaggaaaatgctttggcagggcaagaaagaaggggacaaatcccaatctgctgaaatatgggaaaaattgaattttggaaacaaggaccaaaatgtcaaatttaggaaattgatgggtattaagagtgaagatgaagctggatgtagctcagttgatgaagaaagttacaagactctgaagcagcaggaagaagtatttcgaaatttagatgctcagtatgaaatggcaagatcacaaacccacacacaaagaggaatgggtttgggtttcacatcttcaatgcgaggaatggatgcagtttgaaaatgatcacacttgtaaagtttgggacttatagacttcttgttctgatgtcacgtccttgttcaccaaacagctagcactctagcttgcatgggtgttgcattgactttaatttattgaaaaatacaaatttttgtaaatatcagatcagtgatactggtgttagtgttgtaatcaggttaaacccacttccattaaacttgacaggactatagaaggataatattttttagttcatgaattctacttttcaaatatataaaagctgcaggtggggataaaatctcatacatggattttttcgtgtccgctgtcttgtgtacttttgtacttaaccttgtacagttattttcatctcttgaaacatgaaagaaatgttatgtagatgttctttagaagatctggccatttggtacataatccagcacagataagctgggtggtaatgataataaaaatggttttctcaaaactggtgttaattt

SEQ ID NO: 8189 - protein, 434 aa, Homo sapiens; identical to SEQ ID NO: 930

SEQ ID NO: 8190 - DNA, 1385 bp, Homo sapiens
gcagctgcagctactggaggttctgttctcaatgttgctgccctgttggcatcaggaacacaagtaacacctcagatagccatggcagctcagatggcagccctgcaagctaaagctttggcagagacaggaatagctgttcctagctactataacccagccgctgttaatccaatgaaatttgctgaacaagagaaaaaaaggaaaatgctttggcagggcaagaaagaaggggtaagttctcttattctgcttttctgtcgtttattcctaattagtaattgcttagaaaaacaaatttgggttgaaaaatattactttcggcttaactttgtaagaacctggggtggccagacgcgggtggcttatgcctttaatcccagcactttgggatgccaagtgagcggatcagttgaggtaaggagtccaagaccagcctggccaacatggcaaaaccctgtctctactgaaaagaagataaaaatcagctgggtgtggtggcacacacctgtaatcccaggtgcttgggaggctgaggcaggagaatcgcttgagcctgggatgcagagcctacatacagtgcccaccaccatgccaggctagttttttgtatttttagtagagacggggtttcacctagtcatccaggctagtctcgatcccctgacctcaggtgatttgcccacctcggccttccaaagtgctgggattataggagtgaagcacggcgccaacctcttgcttgtatttctttgctttgtggtttcttaagtcttgaaataattaaacttacattgattgaatgctatccatggtgtttttttttttaatttagacattgttgagagatttcatgtcctaaaaaatatttaaattttacatattttaaagttcagtgtttgttaacaggacaaatcccaatctgctgaaatatgggaaaaattgaattttggaaacaaggaccaaaatgtcaaatttaggaaattgatgggtattaaggtgagtttcacatgtgccaggggatctttgtattagctattagccctcctgcactgttcttccctcattttcttagttctggtctttactcaggtgtcagcgtttttgagttctttcccaccaccttttgtgaaataacaagcaatcccattctgaaacatttccatctcccctacccactgtcctccctacacacacacttggagagagagagagagacggggttttgctctgcttgctctgtcacttgggctggagtacagtggtgcagtcatacctcactgcagccttaaacttcgaggctcaagcagtccttccacctcggcctctcaaagccctggatcacagttctgagccactgcgcccagcctccatccccattttct

SEQ ID NO: 8191 - protein, 173 aa, Homo sapiens [sequence omitted]

SEQ ID NO: 8192 - DNA, 1024 bp, Homo sapiens
ccgggtctctcgcgcgagcgatttagtctgaggcgaagcttcggagcggccggtactgttgaaagcgacaagtggaggcgccgctctagcggccgggactctgaactatggcgataatgaaggaagaaaacacaggagccggagcagaagcaaagagcgtgcttatgcgcgaagagactgaactgaagacgctgcagactcagatagcaaaataataagcctacttcatgataagggaagaagacatgaatccaaagataaatcctctaagaaacataagtctgaggaacataatgacaaagaacattcttctgataaaggaagagagcgactaaattcatctgaaaatggtgaggacaggcacaaacgcaaagaaagaaagtcatcaagaggcagaagtcactcaagatctaggtctcgtgaaagacgccatcgtagtagaagcagggagcggaagaagtctcgatccaggagtagggagcggaagaaatcgagatccagaagcagagagaggaagaaatcgagatccagaagcagggaaagaaaacggcggatcaggtctcgttcccgctcaagatcaagacacaggcataggactagaagcaggagtaggacaaggagtaggagtcgagatagaaagaagagaattgaaaagccgagaagatttagcagaagtttaagccggactccaagtccacctcccttcagaggcagaaacacagcaatggatgcacaggaagctttagctagaaggttggaaagggcaaagaaattacaagaacagcgagaaaaggaaatggttgaaaaacaaaaacaacaagaaatagctgcagctgcagctactggaggttctgttctcaatgttgctgccctgttggcatcaggaacacaagtaacacctcagatagccatggcagctcagatggcagccctgcaagctaaagctttggcagagacaggaatagctgttcctagctactataacccagccgctgttaatccaatgaaatttgctgaacaagag

SEQ ID NO: 8193 - protein, 110 aa, Homo sapiens [sequence omitted]

SEQ ID NO: 8194 - DNA, 1154 bp, Homo sapiens
tttctcccagcaagctgtgcgacgcgccgggcctcctcgcctttgtgccatccgggtctctcgcgcgagcgatttagtctgaggcgaagcttcggagcggccggtactgttgaaagcgacaagtggaggcgccgctctagcggccgggactctgaactatggcggctagtgatacagagcgagatggactagccccagaaaagacatcaccagatagagataagaaaaaagagcagtcagaagtatctgtttctcctagagcttcaaaacatcattattcaagatcacgatcaaggtcaagagaaagaaaacgaaagtcagataatgaaggaagaaaacacaggagccggagcagaagcaaagagggaagaagacatgaatccaaagataaatcctctaagaaacataagtctgaggaacataatgacaaagaacattcttctgataaaggaagagagcgactaaattcatctgaaaatggtgaggacaggcacaaacgcaaagaaagaaagtcatcaagaggcagaagtcactcaagatctaggtctcgtgaaagacgccatcgtagtagaagcagggagcggaagaagtctcgatccaggagtagggagcggaagaaatcgagatccagaagcagagagaggaagaaatcgagatccagaagcagggaaagaaaacggcggatcaggtctcgttcccgctcaagatcaagacacaggcataggactagaagcaggagtaggacaaggagtaggagtcgagatagaaagaagagaattgaaaagccgagaagatttagcagaagtttaagccggactccaagtccacctcccttcagaggcagaaacacagcaatggatgcacaggaagctttagctagaaggttggaaagggcaaagaaattacaagaacagcgagaaaaggaaatggttgaaaaacaaaaacaacaagaaatagctgcagctgcagctactggaggttctgttctcaatgttgctgccctgttggcatcaggaacacaagtaacacctcagatagccatggcagctcagatggcagccctgcaagctaaagctttggcagagacaggaatagctgttcctagctactataacccagccgctgttaatccaatgaaatttgctgaacaagag

SEQ ID NO: 8195 - protein, 331 aa, Homo sapiens
MAASDTERDGLAPEKTSPDRDKKKEQSEVSVSPRASKHHYSRSRSRSRERKRKSDNEGRKHRSRSRSKEGRRHESKDKSSKKHKSEEHNDKEHSSDKGRERLNSSENGEDRHKRKERKSSRGRSHSRSRSRERRHRSRSRERKKSRSRSRERKKSRSRSRERKKSRSRSRERKRRIRSRSRSRSRHRHRTRSRSRTRSRSRDRKKRIEKPRRFSRSLSRTPSPPPFRGRNTAMDAQEALARRLERAKKLQEQREKEMVEKQKQQEIAAAAATGGSVLNVAALLASGTQVTPQIAMAAQMAALQAKALAETGIAVPSYYNPAAVNPMKFAEQ

SEQ ID NO: 8196 - DNA, 2070 bp, Homo sapiens
gcctttgtgccatccgggtctctcgcgcgagcgatttagtctgaggcgaagcttcggagcggccggtactgttgaaagcgacaagtggaggcgccgctctagcggccgggactctgaactatggcggctagtgatacagagcgagatggactagccccagaaaagacatcaccagatagagataagaaaaaagagcagtcagaagtatctgtttctcctagagcttcaaaacatcattattcaagatcacgatcaaggtcaagagaaagaaaacgaaagtcagataatgaaggaagaaaacacaggagccggagcagaagcaaagagcgtgcttatgcgcgaagagactgaactgaagacgctgcagactcagatagcaaaataataagcctacttcatgataaggtaactattagtcattcaaactcctatttcccttaaatatatcttaaatcagttaagggttttaatgttttttttaaattaatagtaatgttatgtttgaaaaactggtttgaaataaactttaaaacctttagaagtttaaccacttaagacttttccagtctgcctcgttatagcaaaaccaaggaaaatttcttttctaagctcctatagagaactggcaatgaaactaaaatttaattgtgtctccaggtctcttatttttctgcaaataataaattatgtactatgatcattttcagataaatcatcatgcatgttccaaaatgattggccaagttttatttttaagaaacattaatcgtgagtggaaagaaacatgctatggccttttgggagacagtagtgtcttattacagtggaaaagtggtagcgtgggcatcagaaaaacatggggaaggttcagctcacccatgtagctttgtaactttagatcttagttatacataaaataaggggattaagttagaggatcttagtttccttccagaattaaaatttagtgattcagagatgtctaggattttaaactttcactacaagatgaatttgacagatcttcctgtagggaactgtagtatgtagcacttctactttggtatttggtaggatgagacttgatcatgcagttaatttgagctgagtctctgaatgcacatgtgaaggccttggtctttttaaagtgtgggggcagtatgtattgtgtgatggcatgtggattgttatacctagtttggtttctttaaaattgaaacatacagttgccatttctaccctaggtacatgaagtgtaatactcctctaagcctattgggatactgcaagatgaaaagtgattgcttcacagtttagacattgggaggaaaatcaagagctgtcttttagaggatgtagcaggcagtataactgtaaaagggacactgcatctctgtgtaaaataatttgaaattatagaaaatattagtacttagtaataattatatttagctacctaattgaaatgcgtttctggtgcactttttgtgtcattatctccattacttacttaaacttaacattatgtaatctggatttagaagttgatgtatatacatggtctgtattcttttagataaacataagggattcctcttttgtctggcataatggcttttcaatatttcaactttaaaaatcattgtttctgttgtattgaaaatattttggggaggaactacattttgggtgtttatagtaaaaaaaatagtaattacatctgcaacatttgggtgatgtgaaactagatcttttttttatttgccacacactcctaaggttactaatgttgcatcacaacatttttgtctactgatacccatactaactctctttgttgcactattttcctgaaagaaccaacttcttcttaaaacagggaagaagacatgaatccaaagataaatcctctaagaaacataagtctgaggaacataatgacaaagaacattcttctgataaaggaagagagcgactaaattcatctgaaaatggtgaggacaggcacaaacgcaaagaaagaaagtcatcaagaggcagaagtcactcaagatctaggtctcgtgaaag

SEQ ID NO: 8197 - protein, 76 aa, Homo sapiens
MAASDTERDGLAPEKTSPDRDKKKEQSEVSVSPRASKHHYSRSRSRSRERKRKSDNEGRKHRSRSRSKERAYARRD

SEQ ID NO: 8198 - DNA, 2887 bp, Homo sapiens
cgccgggcctcctcgcctttgtgccatccgggtctctcgcgcgagcgatttagtctgaggcgaagcttcggagcggccggtactgttgaaagcgacaagtggaggcgccgctctagcggccgggactctgaactatggcggctagtgatacagagcgagatggactagccccagaaaagacatcaccagatagagataagaaaaaagagcagtcagaagtatctgtttctcctagagcttcaaaacatcattattcaagatcacgatcaaggtcaagagaaagaaaacgaaagtcagataatgaaggaagaaaacacaggagccggagcagaagcaaagaggtaattaacactttgtagtgaataggtactttaaaatacttataaagtgtctggtagaaagatttgtatgaatataagacgttgtcaaggtaagtacaaaacttgaaatttaaaaggtttattgggttataaaataagcatgattttgattcatcatttttgaagaagatgtttatgtgaaaagtaccttcaaaactttaattttattatattgtgaaaatattcacaataaaaatttcatatgaagaatatgattggtttttttaggcctgtcacacagagcttccattaatctgaggtcccgagtctcctggtgcctgacagttgctcaggatttttaaacagcaatcatctttacatagcaataccctagatatctgtgcgctgctttttccttatgaacgataacaggagttctcttttcttttgcaaactagttcagtttccctaatagtagtattgaattttgaaataaaggtttgagtgagggacagctgaaaaggtggcggtgacaccaaaacttgaggaaaaagaaaggcagcagctgtattgcaaaggagttacttgttcacccacctgagaagacaaagaatgagccaataaggaagtgtagaagtagtagccagaaagggagaagagtcttgtgggggctgggtaagggactcctaaaacaagagtgggcagggacttcacctcttcccgtaatggaagctctgttaaatttttaatttaggagagtttttgtgaaaatgactattttgtttagctcacatgataacatttctataataaatcatactcagcgtgcttatgcgcgaagagactgaactgaagacgctgcagactcagatagcaaaataataagcctacttcatgataaggtaactattagtcattcaaactcctatttcccttaaatatatcttaaatcagttaagggttttaatgttttttttaaattaatagtaatgttatgtttgaaaaactggtttgaaataaactttaaaacctttagaagtttaaccacttaagacttttccagtctgcctcgttatagcaaaaccaaggaaaatttcttttctaagctcctatagagaactggcaatgaaactaaaatttaattgtgtctccaggtctcttatttttctgcaaataataaattatgtactatgatcattttcagataaatcatcatgcatgttccaaaatgattggccaagttttatttttaagaaacattaatcgtgagtggaaagaaacatgctatggccttttgggagacagtagtgtcttattacagtggaaaagtggtagcgtgggcatcagaaaaacatggggaaggttcagctcacccatgtagctttgtaactttagatcttagttatacataaaataaggggattaagttagaggatcttagtttccttccagaattaaaatttagtgattcagagatgtctaggattttaaactttcactacaagatgaatttgacagatcttcctgtagggaactgtagtatgtagcacttctactttggtatttggtaggatgagacttgatcatgcagttaatttgagctgagtctctgaatgcacatgtgaaggccttggtctttttaaagtgtgggggcagtatgtattgtgtgatggcatgtggattgttatacctagtttggtttctttaaaattgaaacatacagttgccatttctaccctaggtacatgaagtgtaatactcctctaagcctattgggatactgcaagatgaaaagtgattgcttcacagtttagacattgggaggaaaatcaagagctgtcttttagaggatgtagcaggcagtataactgtaaaagggacactgcatctctgtgtaaaataatttgaaattatagaaaatattagtacttagtaataattatatttagctacctaattgaaatgcgtttctggtgcactttttgtgtcattatctccattacttacttaaacttaacattatgtaatctggatttagaagttgatgtatatacatggtctgtattcttttagataaacataagggattcctcttttgtctggcataatggcttttcaatatttcaactttaaaaatcattgtttctgttgtattgaaaatattttggggaggaactacattttgggtgtttatagtaaaaaaaatagtaattacatctgcaacatttgggtgatgtgaaactagatcttttttttatttgccacacactcctaaggttactaatgttgcatcacaacatttttgtctactgatacccatactaactctctttgttgcactattttcctgaaagaaccaacttcttcttaaaacagggaagaagacatgaatccaaagataaatcctctaagaaacataagtctgaggaacataatgacaaagaacattcttctgataaaggaagagagcgactaaattcatctgaaaatggtgaggacaggcacaaacgcaaagaaagaaagtcatcaagaggcagaagtcactcaagatctaggtctcgtgaaag

SEQ ID NO: 8199 - protein, 74 aa, Homo sapiens [sequence omitted]

SEQ ID NO: 8200 - DNA, 553 bp, Homo sapiens
gcgcgagcgatttagtctgaggcgaagcttcggagcggccggtactgttgaaagcgacaagtggaggcgccgctctagcggccgggactctgaactatggcgataatgaaggaagaaaacacaggagccggagcagaagcaaagaggtaattaacactttgtagtgaataggtactttaaaatacttataaagtgtctggtagaaagatttgtatgaatataagacgttgtcaaggtaagtacaaaacttgaaatttaaaaggtttattgggttataaaataagcatgattttgattcatcatttttgaagaagatgtttatgtgaaaagtaccttcaaaactttaattttattatattgtgaaaatattcacaataaaaatttcatatgaagaatatgattggtttttttaggcctgtcacacagagcttccattaatctgaggtcccgagtctcctggtgcctgacagttgctcaggatttttaaacagcaatcatctttacatagcaataccctagatatctgtgcgctgctttttccttatgaacgata

SEQ ID NO: 8201 - protein, 47 aa, Homo sapiens
GEASERPVLLKATSGGAALAAGTLNYGDNEGRKHRSRSRSKEVINTL

SEQ ID NO: 8202 - DNA, 657 bp, Homo sapiens
acaaagctggacaacagagaaacctccctgtgacataggctaacttaaacttacatcatcaaccattttcatctgtaaaatatactacagagcaacaacaaaaaccatcttaacactaaacaaataggaatgataggtggtcattgaggccatggaaaacttttatttccctgaggatattttatagtagcataatacaggtatccaggaaaaaaacctaccaaaaactgagtattaaaattgctctgaaattttctaagctttaatttagtactaatctatgtgtacacataaacgttaactgcaaaacagccttctattccagcagtggctctacgaggtagccactttggtttcttataatttacattttgttgcaaactctaataacggctcgaaacatagacaaatctttttccactgcgaaggaggtaagcactggattgaatactaggtcacttctctaggggactgtctttttattgaacaaggcacggcataaataaatgtttaaattcactttttaaaatactagaacccgggtttaaatttaaaggaacaaggtcagtgacaagacttaactgtaacgcttctcggacttcaaattgattacatcacgggccacttcggaaaccgcgcatcagtcagaattggtag

SEQ ID NO: 8203 - protein, 40 aa, Homo sapiens
TRHGINKCLNSLFKILEPGFKFKGTRSVTRLNCNASRTSN

SEQ ID NO: 8204 - DNA, 506 bp, Homo sapiens
gggtatcttatacacacgcaggcttattgttcagaatagataatttacgaactgtagctcctctggggccaacgaagggtttaaatttaaaggaacaaggtcagtgacaagacttaactgtaacgcttctcggacttcaaattgattacatcacgggccacttcggaaaccgcgcatcagtcagaattggtagttccacaaccttttaagttgaattttcactccctttcagcaataccttcctagctcgttaatacacaataataaggtttacacggacgaacactaattgaaattatgcaactagaagcatctcattgagcgtacaaaaaaaaaaatagctacaagtcgctctcttctcccacactaccctttacagacactgcctttttgacccaatacttttcagagaccactcctgatcgtctttctcttccccagcccctttctccaccgcaaattctcaggccctaaaaaaaacttagaataaatcactagccagggtg

SEQ ID NO: 8205 - protein, 34 aa, Homo sapiens [sequence omitted]

SEQ ID NO: 8206 - DNA, 330 bp, Homo sapiens
gccaatttaagcctgtggcatggaacctaaagactagaggcggttgtgtgagtcaggaagaggggccagatatctgagtgttcctctttagtttcttcaattgcaggagagaggttggagtcggtttttgctggcggcgatgtccagcggagagcgtttaagtatggaggcctaactgacaagtgtttcatcttgctcattctctcgtattcgcgaatctgttctgcattccgccgccagagtgatctcaaaattataaaatcagaccactcgtttgctgagttccccttctaccccttgtactgagaataaaattcaatcttgaggtcg

SEQ ID NO: 8207 - protein, 84 aa, Homo sapiens
VRKRGQISECSSLVSSIAGERLESVFAGGDVQRRAFKYGGLTDKCFILLILSYSRICSAFRRQSDLKIIKSDHSFAEFPFYPLY

SEQ ID NO: 8208 - DNA, 6947 bp, Homo sapiens
caatttaagcctgtggcatggaacctaaagactagaggcggttgtgtgagtcaggaagaggggccagatatctgagtgttcctctttagtttcttcaattgcaggaaagacagtggttcctgactcaggaagacagtctcagaaacatgtggaatgatattgagctgctaacaaatgatgataccggaagtgggtacctgagtgtcggttcaagaaaagaacatggaactgctttatatcaagtagatttgctagtgaagatctcttctgaaaaggcctcattaaatccaaagatacaggcatgcagcttaagtgatgggtttattattgtagccgaccaatcagtgatattgcttgacagtatttgtagatcacttcaattgcatcttgtctttgatactgaagtggatgtagttggcctttgtcaagaaggaaagtttcttttggttggcgagagaagtggcaacctacatcttattcatgtaacatcaaaacaaacactactcactaatgcatttgttcagaaagctaacgatgaaaatcggcggacttaccagaatcttgtcattgagaaggatggttcaaatgaaggtacctattatatgctacttcttacatacagtggatttttttgtattacaaaccttcagcttttaaaaattcaacaagcaattgagaatgtagacttcagtacagcaaaaaagttacaaggacaaatcaagtccagttttatttctactgaaaattatcatactcttggttgtctcagtcttgtggctggagatttagcaagtgaagttcctgtgataattgggggaaccggtaattgtgcattctcaaaatgggaaccagattcttccaagaaaggaatgacagttaagaaccttattgatgcagagattattaaaggtgcaaagaagttccagctgatagacaatctactttttgttcttgatactgataacgtgctgagtttatgggatatttacactctaactcctgtatggaactggccctctcttcacgtagaagagtttcttcttactacagaagcagactctccttcatcagtcacgtggcaaggaattacaaatctcaaattaatagctctgacagcttcagctaataagaagatgaaaaacctcatggtttattcattacctacaatggaaatactatattctttggaagtatctagtgtttcttctctggtccaaacaggaattagcacagataccatataccttttagaaggagtttgcaaaaatgatccaaaattgtctgaagactcagtctctgtgttagtactcagatgtcttacggaagctttaccagaaaacagattgagtcggttacttcacaaacacagatttgctgaagctgagagttttgccattcagtttggactagatgttgagcttgtttacaaggtcaagtcaaatcatatattggagaaactggcattgagttctgtggatgccagtgaacagaccgaatggcaacaacttgtagacgacgctaaggaaaatctacataagatccaggatgatgaatttgtggtgaattactgcctgaaagctcagtggataacctatgaaaccactcaagagatgctgaattatgccaaaaccaggcttttgaagaaagaagataaaactgctctcatttattctgatggcttgaaagaggtgctaagagctcatgcaaaattgactactttttatggagcatttggaccagaaaaattcagtggcagttcttggattgaatttctaaataatgaagatgatcttaaagatatttttttacagctaaaagaaggaaaccttgtttgtgcacagtatctttggcttcgacatcgggcaaactttgaaagcagatttgatgtgaaaatgctggagagcttgctcaactcaatgtctgcatcagtctctttgcaaaagctgtgtccatggtttaaaaatgatgtgattccatttgtaagaaggactgtgcctgaaggacagataattcttgcaaaatggttggaacaagcagccaggaaccttgaattaactgataaggcaaattggccagaaaatggacttcaattggcagagatattttttacagcagaaaaaacagacgagttgggattggcatcttcctggcattggatttccttgaaagattatcagaacacagaggaagtatgtcagctaaggactttggtaaataacttgcgagagttgatcacgttgcataggaagtacaactgcaaattagccctctctgattttgagaaggaaaatacaaccaccatagtgttccgaatgtttgataaagtgctggccccagagcttattccctccatcttagagaagtttataagagtttacatgagagaacatgacttgcaagaggaggaacttctcttgctgtacatagaggatttactgaatagatgcagctcaaagtccacatcactctttgaaacagcatgggaagcaaaggccatggcagtaatagcgtgtttatctgacacggacctcatatttgatgccgtgctcaagatcatgtatgcggcagtggttccttggagtgcagctgtggagcaactggtgaaacagcacctggaaatggaccatcccaaagtcaagttattacaggaaagttacaaactaatggagatgaaaaaacttttacgaggctatggaataagagaggtaaatctcttaaacaaggaaataatgagagtggttagatacattctcaaacaagatgtcccatcttctttagaagatgctttaaaggtagcccaagcgtttatgttatctgatgatgagatctacagtctaagaattattgacctgattgatagagaacagggtgaagactgtctccttctgttgaagtctttgcctcctgctgaagctgagaaaactgcagaaagagtcatcatatgggcacgactggcattacaagaagagccagatcattctaaagagggcaaggcctggagaatgtctgtagcgaagacatccgtggacattcttaagatactatgtgacattcagaaagacaatctgcagaagaaggacgaatgtgaagaaatgttgaaactatttaaagaggttgctagcttacaggagaactttgaggtctttctttcatttgaagattatagcaatagttccctggtagcagatctccgtgagcagcacattaaagctcacgaagttgcacaggcgaaacacaaacctgggagcaccccagagcccatagctgctgaggtgaggagcccaagcatggaatcaaagctgcacagacaggcactggccctgcagatgtccaaacaagagctggaggcagagctgaccttgagagccttaaaagatgggaacatcaaaacagcactgaaaaaatgcagcgacttgtttaagtatcactgcaatgctgacactgggaaattgctatttctgacatgtcagaagctttgtcagatgttggctgataatgtcccagtgacagtgcctgtgggactgaatcttccttccatgatacatgatctagcaagccaagctgccaccatttgcagtccagattttttactagatgctttagaactatgtaaacatactttaatggctgtagagctttccagacaatgccaaatggatgactgtggaatcctcatgaaagcttcttttgggacacataaagatccatatgaagagtggtcttacagtgacttcttcagtgaagatggaattgttcttgagtcacagatggtgcttccagtgatttatgaactgatttcatctcttgtgcctctagctgaaagcaagagatatcccttggagtctaccagtttgccatactgctcccttaatgaaggagatggccttgttttacctgttataaattccatctctgccctgcttcagaatcttcaggaatctagccagtgggagctagccctaagatttgtggttggttcatttggtacctgtcttcagcactctgtgtcaaacttcatgaatgccactttgagtgaaaagttatttggagagactacattagttaaatcaaggcatgttgttatggaattgaaagaaaaagctgttatatttatcagggaaaatgctacaacactactgcacaaagtatttaattgtcgcttggtagatcttgacctggcgttgggttactgcactctcttacctcaaaaagatgtgtttgaaaatctctggaagctcatagataaagcatggcagaattacgacaaaatcttggcaatatctctggtgggctctgagctggcaagtctctatcaggaaatagaaatggggcttaagttccgtgaactcagtactgatgcccagtggggcattcgtcttggtaaacttggtatttcttttcaaccagttttcaggcaacattttctcaccaagaaagacctcattaaagctcttgtggagaatatagatatggacacaagcctcattttggaatattgcagcacatttcagttggactgcgatgcagttcttcagctcttcattgaaacgctgctccacaacacaaatgccggccaaggccagggagatgcaagcatggactctgcaaagcggcggcatcccaaactcctggccaaagcccttgagatggttcctttactgacgagcacaaaagatttggtcatcagtcttagtggaatactacataagttggatccttatgactatgaaatgattgaagttgtcttgaaagttatagaacgagctgatgaaaagataaccaatattaatattaatcaggcattgagtattctgaaacatttgaagtcatacagaagaatttctcctcccgtggatctagaatatcagtatatgttggaacatgtcataactttgccatcagctgcccaaactagactgccttttcacctgatattctttggcacagcacagaacttctggaaaattctctctacagaactcagtgaagaatctttcccaacattgctcttaatttcgaaattaatgaagttctctctggacactctgtacgtgtctacagcaaaacacgttttcgaaaaaaaactgaagccaaagctcctgaagttaacacaagctaaatcctcaacactgattaacaaggaaataactaagatcacgcagaccatcgaatcctgcttactctctatagtcaacccagagtgggctgtagctattgccatcagccttgcccaggatatccctgaaggttccttcaagatatctgctttgaaattctgcctttatttagctgagagatggctacagaatatcccatcgcaggacgaaaaacgtgaaaaagccgaggctttgttgaagaagcttcatatccagtaccggcgatcgggcacagaagctgtgctcatagcccacaagctgaacactgaggaatatttaagagtgatcggaaagccagcacatcttattgtcagtctctacgaacatcctagcatcaatcaaagaattcagaattcatctggcacagattatcctgatattcatgcagcagctaaagaaatagccgaagtcaatgaaattaatttggaaaaagtctgggacatgttgttggaaaaatggctatgcccttcaacaaaacctggtgaaaaaccatcagaattatttgaacttcaagaagatgaagccctacgaagagtgcagtatctcctcctgtctcgtccaattgattatagttcaagaatgctgtttgtatttgcaacatcaactacaaccacattaggtatgcatcagttaacttttgcccatagaactcgagctcttcagtgtctcttctatttggctgacaaggaaactatagaatctctctttaaaaaacccattgaagaagtgaaatcttatttgagatgtataacttttctggcatcatttgagactttgaatatccccatcacatatgaattattttgcagcagtcctaaagaaggaatgattaagggtctgtggaaaaaccacagccacgagtccatggcagtaagattggtgactgagctgtgtttagaatacaaaatctatgacctgcagctttggaatggactcttgcaaaagcttctgggcttcaatatgattccttatctaaggaaagttttaaaagccatctccagtatccattctttatggcaggttccctacttcagcaaagcgtggcagcgtgtgatacagataccactgctttcagcctcttgtcctttaagtcctgatcagctgtcagattgttctgagagtctcatcgctgtcctcgaatgtccagtctcaggtgatcttgacctgatcggagtcgccaggcagtatatccagttagaacttccggcttttgcattagcttgtctgatgctcatgccccactcagagaaaagacaccagcaaattaagaattttctgggttcctgtgaccctcaggttattttaaagcaattggaagagcatatgaacacgggccagctagcaggattttcacatcaaattagaagtctgattttgaataatatcatcaataagaaggagtttgggattttggcaaagaccaaatactttcaaatgttgaagatgcatgcgatgaataccaacaatatcactgagctagtgaactatttggcaaatgacttaagtttagatgaagcttcagtcttgataactgaatattcaaagcactgcgggaaacctgtgcctccagacactgctccctgtgaaattctgaagatgtttcttagtggattatcgtaaatcactgaacctttttttcaagaaggacaagaattttggagtctgctattaatggaccatatttattacagtttttaaattgtacaatctctgtattatagctatttgtctaacattaccccacatgtaataaataaaacaatatgagcataattgccccataaagaactc

SEQ ID NO: 8209 - protein, 2209 aa, Homo sapiens; identical to SEQ ID NO: 936

SEQ ID NO: 8210 - DNA, 491 bp, Homo sapiens
gcggttgtgtgagtcaggaagaggggccagatatctgagtgttcctctttagtttcttcaattgcaggaaagacagtggttcctgactcaggaagacagtctcagaaacatgtggaatgatattgagctgctaacaaatgatgataccggaagtgggtacctgagtgtcggttcaagaaaagaaacatctctgcactttctccaagcttctaatttttaccccagtgccaagaaatagcagaaccaaactggaagccacctggctagaagtctgggaggagtggtccgcaactgtaaacccccagcactgcagccggtggcctagaaaggcgtgtggagcaaaaagccagcacacagaagtgttaattacacctgttattctgactttgtagtcctttgccatacttgcgaataacttaagtgaatttgatgttactggaattagtttgcctttattttgccagttgaaaaaaaagatttctaaaaaactc

SEQ ID NO: 8211 - protein, 42 aa, Homo sapiens
MWNDIELLTNDDTGSGYLSVGSRKETSLHFLQASNFYPSAKK

SEQ ID NO: 8212 - DNA, 538 bp, Homo sapiens
ggatgtggcgagctagtgattaaaaaaaacttttttttttatttgaccgagattgtgccacttcactgcagcctgggtgacagtgagactccagctcaaaaaaataaagtaaaataatataaacatgcctgtaatcccatctattcaggatgctgaggtggcaggattgcttgagcccaggaattcaagtccagcctgagcacatagtgagatcccatctcaaaaaaacaaataaaacaaacaagagtgaaaaatagttatttctacgtgtagtgattatctgaggagggtcctataggaagctacatggctctgaggaagatgtcgggagttctagggtctgagataagaaggaaatgtactttgcattgtgtgatctttggaactgggttttttttagttttttgtttttacctttatgaagaagaaaactaattaaaatgcatttaaagataatccacttaaaaggtataaccttaattttttttaaaactgacttttttcccttctttgtctattcagtggcagttcttggatt

SEQ ID NO: 8213 - protein, 42 aa, Homo sapiens
MALRKMSGVLGSEIRRKCTLHCVIFGTGFFLVFCFYLYEEEN

SEQ ID NO: 8214 - DNA, 1262 bp, Homo sapiens
attttttgtattttagtagagacagggtttcactgtattggccaggatggtctcccatctcttgacctcgtgatccgcccacgtcggcctcccaaagtgctgggattacagacatgagctaccgcgcccagccttgagctttatttttgacattgtaaaagaacagacaagcaggcagggcgcaatcttgtctttgacaggatctcattctgtcacccaggctggagtgcagtggcattatcatggctcactgcagccttgacctctagggcctaagtgatcctcccagcttagcctcctgagtagctgggactacaggcatgcaccaccatgcccagctaattgttttgtatttttttgtagagacaaggtttccatgttggccaagctggtctcaaactcctgacctcaagtgatccacccgcctcagcctcccacagtgctgggattataggcatgagccaaaaccctgttttctttaccaaaaatataagacattttatttgccaacagttgacttatcagaaaggtaatcagtacagaaatgctatatgttttgaagcttaattcttctgcagtaatggaactggtgttctgttgacattaacaatcaaacttttcagatgaagaggcaatggttaggatgactaagaggagtttcggacccatgtacacctcaaatctcagaatgatggctgggttgggtagtgtgaggttggaggagctatagacaaatgtttctttttgaaaaaggatactaagaaggcaagtcatgatgttgcccttactctgatacatttcagtgtagagggtttttttgctttgtttttttctttttatttctagatttcttttcaaccagttttcaggcaacattttctcaccaagaaagacctcattaaagctcttgtggagaatatagatatggacacaagcctcattttggaatattgcagcacatttcagttggactgcgatgcagttcttcagctcttcattgaaacgctgctccacaacacaaatgccggccaaggccagggagatgcaagcatggactctgcaaagcggcggcatcccaaactcctggccaaagcccttgagatggttcctttactgacgagcacaaaagatttggtcatcagtcttagtggaatactacataaggtgatttaaataacctctcctgctgtcgaagagtatgaagtcactacagaactaattgtgaagaattaaggaaacatttgccatgtaggaagtgaaaa

SEQ ID NO: 8215 - protein, 82 aa, Homo sapiens
MDTSLILEYCSTFQLDCDAVLQLFIETLLHNTNAGQGQGDASMDSAKRRHPKLLAKALEMVPLLTSTKDLVISLSGILHKVI

SEQ ID NO: 8216 - DNA, 2415 bp, Homo sapiens
tatagtttagatgaataatgttaaagagaatactagaaaaggttttgatcctctttctgaaaacaagatggtctcaggaatggaaacttttgatggtatactattagatgattttatgacagtttaggattgggttactcttactggacaaaagttttttattttaatataggcattgagtattctgaaacatttgaagtcatacagaagaatttctcctcccgtggatctagaatatcagtatatgttggaacatgtcataactttgccatcagctgcccaaactagactgccttttcacctgatattctttggcacagcacagaacttctggaaaattctctctacagaactcagtgaagaatctttcccaacattgctcttaatttcgaaattaatgaagttctctctggacactctgtacgtgtctacagcaaaacacgttttcgaaaaaaaactgaagccaaagctcctgaagttaacacaagctaaatcctcaacactgattaacaaggaaataactaagatcacgcagaccatcgaatcctgcttactctctatagtcaacccagagtgggctgtagctattgccatcagccttgcccaggatatccctgaaggttccttcaagatatctgctttgaaattctgcctttatttagctgagagatggctacagaatatcccatcgcaggacgaaaaacgtgaaaaagccgaggctttgttgaagaagcttcatatccagtaccggcgatcgggcacagaagctgtgctcatagcccacaagctgaacactgaggaatatttaagagtgatcggaaagccagcacatcttattgtcagtctctacgaacatcctagcatcaatcaaagaattcagaattcatctggcacagattatcctgatattcatgcagcagctaaagaaatagccgaagtcaatgaaattaatttggaaaaagtctgggacatgttgttggaaaaatggctatgcccttcaacaaaacctggtgaaaaaccatcagaattatttgaacttcaagaagatgaagccctacgaagagtgcagtatctcctcctgtctcgtccaattgattatagttcaagaatgctgtttgtatttgcaacatcaactacaaccacattaggtatgcatcagttaacttttgcccatagaactcgagctcttcagtgtctcttctatttggctgacaaggaaactatagaatctctctttaaaaaacccattgaagaagtgaaatcttatttgagatgtataacttttctggcatcatttgagactttgaatatccccatcacatatgaattattttgcagcagtcctaaagaaggaatgattaagggtctgtggaaaaaccacagccacgagtccatggcagtaagattggtgactgagctgtgtttagaatacaaaatctatgacctgcagctttggaatggactcttgcaaaagcttctgggcttcaatatgattccttatctaaggaaagttttaaaagccatctccagtatccattctttatggcagagatggaggtcttgctatgttgcctaggctggtcttagaactcctgagctgaaacaatcctcctgccttggcctcccaaagtactgggattacaggttccctacttcagcaaagcgtggcagcgtgtgatacagataccactgctttcagcctcttgtcctttaagtcctgatcagctgtcagattgttctgagagtctcatcgctgtcctcgaatgtccagtctcaggtgatcttgacctgatcggagtcgccaggcagtatatccagttagaacttccggcttttgcattagcttgtctgatgctcatgccccactcagagaaaagacaccagcaaattaagaattttctgggttcctgtgaccctcaggttattttaaagcaattggaagagcatatgaacacgggccagctagcaggattttcacatcaaattagaagtctgattttgaataatatcatcaataagaaggagtttgggattttggcaaagaccaaatactttcaaatgttgaagatgcatgcgatgaataccaacaatatcactgagctagtgaactatttggcaaatgacttaagtttagatgaagcttcagtcttgataactgaatattcaaagcactgcgggaaacctgtgcctccagacactgctccctgtgaaattctgaagatgtttcttagtggattatcgtaaatcactgaacctttttttcaagaaggacaagaattttggagtctgctattaatggaccatatttattacagtttttaaattgtacaatctctgtattatagctatttgtctaacattaccccacatgtaataaataaaacaatatgagcataattgccccataaagaactc

SEQ ID NO: 8217 - protein, 443 aa, Homo sapiens
MLEHVITLPSAAQTRLPFHLIFFGTAQNFWKILSTELSEESFPTLLLISKLMKFSLDTLYVSTAKHVFEKKLKPKLLKLTQAKSSTLINKEITKITQTIESCLLSIVNPEWAVAIAISLAQDIPEGSFKISALKFCLYLAERWLQNIPSQDEKREKAEALLKKLHIQYRRSGTEAVLIAHKLNTEEYLRVIGKPAHLIVSLYEHPSINQRIQNSSGTDYPDIHAAAKEIAEVNEINLEKVWDMLLEKWLCPSTKPGEKPSELFELQEDEALRRVQYLLLSRPIDYSSRMLFVFATSTTTTLGMHQLTFAHRTRALQCLFYLADKETIESLFKKPIEEVKSYLRCITFLASFETLNIPITYELFCSSPKEGMIKGLWKNHSHESMAVRLVTELCLEYKIYDLQLWNGLLQKLLGFNMIPYLRKVLKAISSIHSLWQRWRSCYVA

SEQ ID NO: 8218 - DNA, 710 bp, Homo sapiens
ggtctcaggaatggaaacttttgatggtatactattagatgattttatgacagtttaggattgggttactcttactggacaaaagttttttattttaatataggcattgagtattctgaaacatttgaagtcatacagaagaatttctcctcccgtggatctagaatatcagtatatgttggaacatgtcataactttgccatcagctgcccaaactagactgccttttcacctgatattctttggcacagcacagaacttctggaaaattctctctacagaactcagtgaagaatctttcccaacattgctcttaatttcgaaattaatgaaggtaatggattaaaacattgtaagacatttctgtatcctgcaattaattctgaccccgtatagaagatttttctgctgctttcatgtaaaaccttatatgtgaatatgtgcttcagccataaccttccttttctttgaagttctctctggacactctgtacgtgtctacagcaaaacacgttttcgaaaaaaaactgaagccaaagctcctgaagttaacacaagctaaatcctcaacactgattaacaaggaaataactaagatcacgcagaccatcgaatcctgcttactctctatagtcaacccagagtgggctgtagctattgccatcagccttgcccaggatatccctgaaggtatgagctcttcttttaaa

SEQ ID NO: 8219 - protein, 56 aa, Homo sapiens
MLEHVITLPSAAQTRLPFHLIFFGTAQNFWKILSTELSEESFPTLLLISKLMKVMD

SEQ ID NO: 8220 - DNA, 772 bp, Homo sapiens
tcctgttgcccaggctggagtgcaatggtgcgatctcggctcactgcaacctctgcctcccgggttgaagagattctcctgccttatcctccctagtagctgggattacaggtttgctgaaatgaaaatgcgaccttttgcaagggacatgcaagatgaaaccttctatttccttggcagcccagaggaatcatgtgcacgataccttaatttgctggtgtcttttctctgagtggggcatgagcatcagacaagctaatgcaaaagccggaagttctaactggatatactgcctggcgactccgatcaggtcaagatcacctgagactggacatcttcgagagagaacattaattagttaataatctggcagattcactagattatattggcctttctagctttccatagtcatctgcctgtccaagttttcaataattttaaacactaaagtgctggtgcatgacatatgcttaggaatgagtaacacaagtctttgacagcactctacacagaataaaagaatttacccatgggaacacggactactgtttgctatcatgattatgtctgaaagcctacagatgcctaaagataggcttctaaattctcagaagactcaaaaccttttttttttttttttttgagaaacagtctagctctgtcacccaggctggagtacgatggcatgatcttagctcactgcaaccaacacctcccgggttcaagtgattctccctcctcagcttcctgagtagctgggattacaggc

SEQ ID NO: 8221 - protein, 68 aa, Homo sapiens
MKPSISLAAQRNHVHDTLICWCLFSEWGMSIRQANAKAGSSNWIYCLATPIRSRSPETGHLRERTLIS

SEQ ID NO: 8222 - DNA, 2504 bp, Homo sapiens
aatgtttggatttctccaccaggagggaggacaaacaagctttcttcttgccttctgggcagctttgtgtgctctccagcacggagtccgaggaggaacagcgaagctgaaaatgaaaattactctggcgctggacccaatcgctcctctacggcatcaatctcatcggacccccccaccctaccgcctctcagaaatgaccacttttgcaaaattgcatgcatttccaagcttcatccggctccaggcttggcctctcccagaggcaggcggcttgtgagacgggctccagagaaaggacctccctgggtctctcatttcctggctgaagtttctcttctcgctgctgtggcagcatccaacccacacacacaggacccgcatcctgggtgatgaagtcagacacgcagcagctgggtgagtgctaacgctcagataagcatctgtgccattgtggggactccctgggctgctctgcacccggacacttgctctgtccccgccatgtacaacgggtcgtgctgccgcatcgagggggacaccatctcccaggtgatgccgccgctgctcattgtggcctttgtgctgggcgcactaggcaatggggtcgccctgtgtggtttctgcttccacatgaagacctggaagcccagcactgtttaccttttcaatttggccgtggctgatttcctccttatgatctgcctgccttttcggacagactattacctcagacgtagacactgggcttttggggacattccctgccgagtggggctcttcacgttggccatgaacagggccgggagcatcgtgttccttacggtggtggctgcggacaggtatttcaaagtggtccacccccaccacgcggtgaacactatctccacccgggtggcggctggcatcgtctgcaccctgtgggccctggtcatcctgggaacagtgtatcttttgctggagaaccatctctgcgtgcaagagacggccgtctcctgtgagagcttcatcatggagtcggccaatggctggcatgacatcatgttccagctggagttctttatgcccctcggcatcatcttattttgctccttcaagattgtttggagcctgaggcggaggcagcagctggccagacaggctcggatgaagaaggcgacccggttcatcatggtggtggcaattgtgttcatcacatgctacctgcccagcgtgtctgctagactctatttcctctggacggtgccctcgagtgcctgcgatccctctgtccatggggccctgcacataaccctcagcttcacctacatgaacagcatgctggatcccctggtgtattatttttcaagcccctcctttcccaaattctacaacaagctcaaaatctgcagtctgaaacccaagcagccaggacactcaaaaacacaaaggccggaagagatgccaatttcgaacctcggtcgcaggagttgcatcagtgtggcaaatagtttccaaagccagtctgatgggcaatgggatccccacattgttgagtggcactgaacaagcagaccaacaacactgaggaagatagagtggtgacttagaattaactcgtgctaaggggtcgggggctttgaaaatgccacccccctttcttattgcaagacggcttctcgcacatgaactgcatccttctcattctgtcggaaatgaaattcacacaactataccttttggggaggttccagttgattgaaagagtgttccaaccacatcctccagggaaaatccctcgaccaagagtccaatctgattttgcacttccctgacttcttgctaagccgtctacaccaggagggtttgctgaaatgaaaatgcgaccttttgcaagggacatgcaagatgaaaccttctatttccttggcagcccagaggaatcatgtgcacgataccttaatttgctggtgtcttttctctgagtggggcatgagcatcagacaagctaatgcaaaagccggaagttctaactggatatactgcctggcgactccgatcaggtcaagatcacctgagactggacatcttcgagagagaacattaattagttaataatctggcagattcactagattatattggcctttctagctttccatagtcatctgcctgtccaagttttcaataattttaaacactaaagtgctggtgcatgacatatgcttaggaatgagtaacacaagtctttgacagcactctacacagaataaaagaatttacccatgggaacacggactactgtttgctatcatgattatgtctgaaagcctacagatgcctaaagataggcttctaaattctcagaagactcaaaaccttttttttttttttttttgagaaacagtctagctctgtcacccaggctggagtacgatggcatgatcttagctcactgcaaccaacacctcccgggttcaagtgattctccctcctcagcttcctgagtagctgggattacaggc

SEQ ID NO: 8223 - protein, 49 aa, Homo sapiens
MNCILLILSEMKFTQLYLLGRFQLIERVFQPHPPGKIPRPRVQSDFALP

SEQ ID NO: 8224 - DNA, 542 bp, Homo sapiens
ttcgctcctgttgcccaggctggagtgcaatggtgcgatctcggctcactgcaacctctgcctcccgggttgaagagattctcctgccttatcctccctagtagctgggattacaggtttgctgaaatgaaaatgcgaccttttgcaagggacatgcaagatgaaaccttctatttccttggcagcccagaggaatcatgtgcacgataccttaatttgctggtgtcttttctctgagtggggcatgagcatcagacaagctaatgcaaaagccggaagttctaactggatatactgcctggcgactccgatcaggtcaagatcacctgagactggacatcttcgagagagaacattaattagttaataatctggcagattcactagattatattggcctttctagctttccatagtcatctgcctgtccaagttttcaataattttaaacactaaagtgctggtgcatgacatatgcttaggaatgagtaacacaagtctttgacagcactctacacagaataaaagaatttacccatggg

SEQ ID NO: 8225 - protein, 68 aa, Homo sapiens; identical to SEQ ID NO: 8221

SEQ ID NO: 8226 - DNA, 2269 bp, Homo sapiens
aatgtttggatttctccaccaggagggaggacaaacaagctttcttcttgccttctgggcagctttgtgtgctctccagcacggagtccgaggaggaacagcgaagctgaaaatgaaaattactctggcgctggacccaatcgctcctctacggcatcaatctcatcggacccccccaccctaccgcctctcagaaatgaccacttttgcaaaattgcatgcatttccaagcttcatccggctccaggcttggcctctcccagaggcaggcggcttgtgagacgggctccagagaaaggacctccctgggtctctcatttcctggctgaagtttctcttctcgctgctgtggcagcatccaacccacacacacaggacccgcatcctgggtgatgaagtcagacacgcagcagctgggtgagtgctaacgctcagataagcatctgtgccattgtggggactccctgggctgctctgcacccggacacttgctctgtccccgccatgtacaacgggtcgtgctgccgcatcgagggggacaccatctcccaggtgatgccgccgctgctcattgtggcctttgtgctgggcgcactaggcaatggggtcgccctgtgtggtttctgcttccacatgaagacctggaagcccagcactgtttaccttttcaatttggccgtggctgatttcctccttatgatctgcctgccttttcggacagactattacctcagacgtagacactgggcttttggggacattccctgccgagtggggctcttcacgttggccatgaacagggccgggagcatcgtgttccttacggtggtggctgcggacaggtatttcaaagtggtccacccccaccacgcggtgaacactatctccacccgggtggcggctggcatcgtctgcaccctgtgggccctggtcatcctgggaacagtgtatcttttgctggagaaccatctctgcgtgcaagagacggccgtctcctgtgagagcttcatcatggagtcggccaatggctggcatgacatcatgttccagctggagttctttatgcccctcggcatcatcttattttgctccttcaagattgtttggagcctgaggcggaggcagcagctggccagacaggctcggatgaagaaggcgacccggttcatcatggtggtggcaattgtgttcatcacatgctacctgcccagcgtgtctgctagactctatttcctctggacggtgccctcgagtgcctgcgatccctctgtccatggggccctgcacataaccctcagcttcacctacatgaacagcatgctggatcccctggtgtattatttttcaagcccctcctttcccaaattctacaacaagctcaaaatctgcagtctgaaacccaagcagccaggacactcaaaaacacaaaggccggaagagatgccaatttcgaacctcggtcgcaggagttgcatcagtgtggcaaatagtttccaaagccagtctgatgggcaatgggatccccacattgttgagtggcactgaacaagcagaccaacaacactgaggaagatagagtggtgacttagaattaactcgtgctaaggggtcgggggctttgaaaatgccacccccctttcttattgcaagacggcttctcgcacatgaactgcatccttctcattctgtcggaaatgaaattcacacaactataccttttggggaggttccagttgattgaaagagtgttccaaccacatcctccagggaaaatccctcgaccaagagtccaatctgattttgcacttccctgacttcttgctaagccgtctacaccaggagggtttgctgaaatgaaaatgcgaccttttgcaagggacatgcaagatgaaaccttctatttccttggcagcccagaggaatcatgtgcacgataccttaatttgctggtgtcttttctctgagtggggcatgagcatcagacaagctaatgcaaaagccggaagttctaactggatatactgcctggcgactccgatcaggtcaagatcacctgagactggacatcttcgagagagaacattaattagttaataatctggcagattcactagattatattggcctttctagctttccatagtcatctgcctgtccaagttttcaataattttaaacactaaagtgctggtgcatgacatatgcttaggaatgagtaacacaagtctttgacagcactctacacagaataaaagaatttacccatggg

SEQ ID NO: 8227 - protein, 49 aa, Homo sapiens; identical to SEQ ID NO: 8223

SEQ ID NO: 8228 - DNA, 378 bp, Homo sapiens
tgtacagttcagtggtatgtggccattttttaaaaatcacaaagtttttaaaaagcaagatgtgcgaaatagtgtgtataaatacacacaatctatttgtagatctttcgatcttcaaatgtgaaacacttataacagccacctactcccgagctcctcagttatgtcttatcaaaacgtaaagtgtttttctcactgattgcacattgaagtattagccccagaagagatataaaaagattttctttttttttgagacggagtcttgctctgtcgcccaggctggagtgcagtggtgcgatctcggctcactgcaagctccacctcccgggagaattgcttgaacccaggtggcctgggcaacagcaagactatctc

SEQ ID NO: 8229 - protein, 40 aa, Homo sapiens
MCEIVCINTHNLFVDLSIFKCETLITATYSRAPQLCLIKT

SEQ ID NO: 8230 - DNA, 1946 bp, Homo sapiens
cagatgcagacacagtgctgctctttctgaaaagtgtgcaggatgtttccttatatgtccgagaggctgacggaacagagaaactggtgtttagagtgacttcgagtgagagtaaggcactgaaacatgagcggccgaattctataaagattctgggaactgctataagtaactattgtaaaaagactccaagcaataacatcacctgtgtaacatatcacgtaaatattgttttagaagaggagagtactaaggatgcacagaaaacatcttggttggtgtgtaacagtgtgggtgggcgagggatcagtagtaagcttgactctttagctgatgaactgaaatttgtcccaatcattggaatagccatgcctttatcaagcagagatgatgaagcaaaaggagcaacgtctgatttctcaggaaaagcattttgtttccttcctttaccacctggtgaggaaagcagcacaggcctcccagttcacatcagtgggttctttggccttactgataaccgcaggagcataaaatggagagagctggaccagtggagagacccggcagccttatggaatgagtttcttgtcatgaatgttgtccccaaagcttatgctactctgatcttagattcaataaaacgtctggagatggaaaagagctctgatttccccttgtcagttgatgttatctataagctttggccggaggcgagcaaagtcaaggtgcactggcaaccggtgttagagcctctattcagcgagctgttgcagaatgcagtgatttattcaattagctgtgactgggtcaggttggagcaggtgtacttctcagaacttgatgaaaatttagaatacacaaaaactgtgctcaactacctccagagctcagggaagcagattgccaaggtaccagggaatgtggatgctgctgttcagctcacagctgcctctggcacaacacctgtgaggaaggtgacgcccgcgtgggtgcggcaggtgctgcggaagtgtgcacacctgggctgtgctgaagaaaagcttcaccttctagaatttgtgctttctgaccaagcctacagtgagctgcttgggctggagctgctccctttacaaaatggcaattttgtccccttctcctcatctgtatcagaccaagatgtcatttatattacctcagcagaatatccaaggtcccttttcccaagtcttgaaggaagatttattttggataacttgaaacctcaccttgtggctgctttaaaggaagctgcccaaacccgaggcttcctgtttgatgaagatagcaacggaaaactcaaaatggtggcagttcttattaccagttgttagtattgtttctggaaactgcttgccaagacaacatttattaactgttagaacacttgctttatgtttgtgtgtacatattttccacaaatgttataatttatatagtgtggttgaacaggatgcaatcttttgttgtctaaaggtgctgcagttaaaaaaaaaacaaccttttctttcaatatggcatgtagtggagtttttttaactttaaaaacatcaaaaattgttaaaatcattgtgttatctagtagtttataattatcggcttatatttccccatgaatgatcagaactgacatttaattcatgtttgtctcgccatgcttctttactttaacatatttcttttgcagaatgtaaaaggtaatgataattagtttatataagtgtactggctgtaaatgatgctaaatatactttatgcaattaagggcttacagaacatgttgaaactttttttacttttattgggaataaggaatgtttgcacctccacattttattgcttctggatgtgaaatcatgtaattatttctgctgttatataaagtgccatacttttaataaaggaaaatgtacatatgaaatcatcgt

SEQ ID NO: 8231 - protein, 327 aa, Homo sapiens
MPLSSRDDEAKGATSDFSGKAFCFLPLPPGEESSTGLPVHISGFFGLTDNRRSIKWRELDQWRDPAALWNEFLVMNVVPKAYATLILDSIKRLEMEKSSDFPLSVDVIYKLWPEASKVKVHWQPVLEPLFSELLQNAVIYSISCDWVRLEQVYFSELDENLEYTKTVLNYLQSSGKQIAKVPGNVDAAVQLTAASGTTPVRKVTPAWVRQVLRKCAHLGCAEEKLHLLEFVLSDQAYSELLGLELLPLQNGNFVPFSSSVSDQDVIYITSAEYPRSLFPSLEGRFILDNLKPHLVAALKEAAQTRGFLFDEDSNGKLKMVAVLITSC

SEQ ID NO: 8232 - DNA, 14884 bp, Homo sapiens
agttatctgactggatcaagattggagatctgacttccaaaaattgtcatctttttgtaaaccttcaatcaaaaggcttaaaagggggaggtcgatttggtcagacaacgccaccacttgttgattttctcaaggacattttgagaagatatccagaaggaggacagattcttaaggaattaattcagaatgcagaagatgctggggcgacagaagttaaatttttatatgatgaaactcaatacggaacagagactctttggtcaaaagatatggcgccatatcaggggccagctctctatgtgtacaacaacgcggttttcaccccagaggactggcacggcattcaagaaatagcaagaagcaggaaaaaggatgatcctctgaaggtcggaagatttggaattgggtttaattctgtctatcatataacagatgttccttgtatctttagtggtgaccaaatcgggatgctagatcctcatcaaacactttttggcccacatgaatcaggccaatgttggaatctcaaagatgacagcaaagaaattagtgaactttcagaccagtttgcaccatttgttggcatttttggaagcaccaaggaaacatttataaacggcaattttccaggaacatttttccgtttccctcttcgcctacaaccttcacaacttagtagtaacctctacaataagcagaaggttcttgagttgtttgagtcttttagggcagatgcagacacagtgctgctctttctgaaaagtgtgcaggatgtttccttatatgtccgagaggctgacggaacagagaaactggtgtttagagtgacttcgagtgagagtaaggcactgaaacatgagcggccgaattctataaagattctgggaactgctataagtaactattgtaaaaagactccaagcaataacatcacctgtgtaacatatcacgtaaatattgttttagaagaggagagtactaaggatgcacagaaaacatcttggttggtgtgtaacagtgtgggtgggcgagggatcagtagtaagcttgactctttagctgatgaactgaaatttgtcccaatcattggaatagccatgcctttatcaagcagagatgatgaagcaaaaggagcaacgtctgatttctcaggaaaagcattttgtttccttcctttaccacctggtgaggaaagcagcacaggcctcccagttcacatcagtgggttctttggccttactgataaccgcaggagcataaaatggagagagctggaccagtggagagacccggcagccttatggaatgagtttcttgtcatgaatgttgtccccaaagcttatgctactctgatcttagattcaataaaacgtctggagatggaaaagagctctgatttccccttgtcagttgatgttatctataagctttggccggaggcgagcaaagtcaaggtgcactggcaaccggtgttagagcctctattcagcgagctgttgcagaatgcagtgatttattcaattagctgtgactgggtcaggttggagcaggtgtacttctcagaacttgatgaaaatttagaatacacaaaaactgtgctcaactacctccagagctcagggaagcagattgccaaggtaccagggaatgtggatgctgctgttcagctcacagctgcctctggcacaacacctgtgaggaaggtgacgcccgcgtgggtgcggcaggtgctgcggaagtgtgcacacctgggctgtgctgaagaaaagcttcaccttctagaatttgtgctttctgaccaagcctacagtgagctgcttgggctggagctgctccctttacaaaatggcaattttgtccccttctcctcatctgtatcagaccaagatgtcatttatattacctcagcagaatatccaaggtcccttttcccaagtcttgaaggaagatttattttggataacttgaaacctcaccttgtggctgctttaaaggaagctgcccaaacccgaggaagaccatgtactcagctgcagcttctaaatccagaacgatttgcacgtcttatcaaggaagtaatgaatacattctggcctggcagagaattgattgttcaatggtatccatttgatgaaaacagaaatcacccatctgtttcatggcttaagatggtttggaaaaatctttatatacatttttcagaggatttgactttatttgatgagatgccacttatccccagaactatactagaggaaggtcagacatgtgtggaactcattagactcaggattccatcgttagtcattttagacgatgaatctgaagcacagcttccagaatttttagcagacattgtacaaaaacttggagggtttgtccttaaaaaattagatgcatctatacaacatccgcttattaaaaaatatattcattcaccattaccaagtgctgttttgcagataatggagaagatgccattgcagaaattgtgtaatcaaataacttcgctacttccaacacacaaagatgccctgaggaagttcttggctagtttaaccgatagcagtgagaaagagaaaagaattattcaagaattggcaatattcaagcgcattaaccattcttctgatcagggaatttcctcttatacaaaattgaaaggttgtaaagtcttacaccatactgccaaactcccagcagatctgcgactttctatttcagtaatagacagtagtgatgaagctactattcgtctggcaaacatgttgaaaatagaacagttaaagaccactagctgcttaaagcttgttttaaaagatattgaaaatgcattttattcacatgaagaggtaacacagcttatgttatgggtccttgagaatctatcttctcttaaaaatgagaatccaaatgtgcttgagtggttaacaccattaaaattcatccagatatcacaggaacagatggtatcagctggtgaactctttgaccctgatatagaagtactaaaggatctcttttgtaatgaagaaggaacctatttcccaccctcagtttttacctcaccagatattcttcactccttaagacagattggtttaaaaaacgaagccagtctcaaagaaaaggatgttgtgcaagtggcaaaaaaaattgaagccttacaggtcggtgcttgtcctgatcaagatgttcttctgaagaaagccaaaaccctcttactggttttaaataagaatcacacactgttgcaatcatctgaaggaaagatgacattgaagaaaataaaatgggttccagcctgcaaggaaaggcctccaaattatccaggctctttggtctggaaaggagatctctgtaatctctgtgcaccaccagatatgtgtgatgtaggccatgcaattctcattggctcctcacttcctcttgttgaaagtatccatgtaaacctggaaaaagcattagggatcttcacaaaacctagccttagtgctgtcttaaaacactttaaaattgttgttgattggtattcttcaaaaacctttagtgatgaagactactatcaattccagcatattttgcttgagatttacggattcatgcatgatcatctaaatgaagggaaagattcttttagagccttaaaatttccatgggtttggactggcaaaaagttttgtccacttgcccaggctgtgattaaaccaatccatgatcttgaccttcagccttatttgcataatgtacctaaaaccatggcaaaattccaccaactatttaaggtctgtggttcaatagaggagttgacatcagatcatatttccatggttattcagaagatatatctcaaaagtgaccaagatctcagtgaacaagaaagcaaacaaaatcttcatcttatgttgaatattatcagatggctgtatagcaatcagattccagcaagccccaacacaccagttcctatacatcatagcaaaaatccttctaaacttatcatgaagccaattcacgaatgctgttattgtgacattaaagttgatgaccttaatgacttacttgaagattctgtggaaccaatcattttggtgcatgaggacatacccatgaaaactgcagaatggctaaaagttccatgccttagtacaagactgataaatcctgaaaacatgggatttgagcagtcaggacaaagagagccacttactgtaagaattaaaaatattctggaagaatacccttcagtgtcagatatttttaaagaactacttcaaaacgctgatgatgcaaatgcaacagaatgcagtttcttgattgatatgagaagaaatatggacataagagagaatctcctagacccagggatggcagcttgtcatggacctgctttgtggtcattcaacaattctcaattctcagattcagattttgtgaacataactaggttaggagaatctttaaaaaggggagaagttgacaaagttggaaaatttggtcttggatttaattctgtgtaccatatcactgacattcccatcattatgagtcgggaattcatgataatgttcgatccaaacataaatcatatcagtaaacacattaaagacaaatccaatcctgggatcaaaattaattggagtaaacaacagaaaagacttagaaaatttcctaatcagttcaaaccatttatagatgtatttggctgtcagttacctttgactgtagaagcaccttacagctataatggaacccttttccgactgtcctttagaactcaacaggaagcaaaagtgagtgaagttagtagtacgtgctacaatacagcagatatttattctcttgtggatgaatttagtctctgtggacacaggcttatcattttcactcagagtgtaaagtcaatgtatttgaagtacttgaaaattgaggaaaccaaccccagtttagcacaagatacagtaataattaaaaaaaaatcctgctcttccaaagcattgaacacacctgtcttaagtgttttaaaagaggctgctaagctcatgaagacttgcagcagcagtaataaaaagcttcccagtgatgaaccaaagtcatcttgcattcttcagatcacagtggaagaatttcaccatgtgttcagaaggattgctgatttacagtcgccactttttagaggtccagatgatgacccagctgctctctttgaaatggctaagtctggccaatcaaaaaagccatcagatgagttgtcacagaaaacagtagagtgtaccacgtggcttctgtgtacttgcatggacacaggagaggctctgaagttttccctgagtgagagtggaagaagactaggactggttccatgtggggcagtaggagttcagctgtcagaaatccaggaccagaagtggacagtgaaaccacacattggagaggtgttttgctatttacctttacgaataaaaacaggcttgccagttcatatcaatgggtgctttgctgttacatcaaataggaaagaaatctggaaaacagatacaaaaggacgatggaataccacgttcatgagacatgttattgtgaaagcttacttacaggtactgagtgtcttacgggacctggccactagtggggagctaatggattatacttactatgcagtatggcccgatcctgatttagttcatgatgatttttctgtaatttgccaaggattttatgaagatatagctcatggaaaagggaaagaactgaccaaagtcttctctgatggatctacttgggtttccatgaagaacgtaagatttctagatgactctatacttaaaagaagagatgttggttcagcagccttcaagatatttttgaaatacctcaagaagactgggtccaaaaacctttgtgctgttgaacttccttcttcggtaaaattaggatttgaagaagctggctgcaaacagatactacttgaaaacacattttcagagaaacagtttttttctgaagtgttttttccaaatattcaagaaattgaagcagaacttagagatcctttaatgatctttgttctaaatgaaaaagttgatgagttctcgggagttcttcgtgttactccatgtattccttgttccttggaggggcatcctttggttttgccatcaagattgatccaccccgaaggacgagttgcaaagttatttgatattaaagatgggagattcccttatggttctactcaggattatctcaatcctattattttgattaaactagttcagttaggtatggcaaaagatgatattttatgggatgatatgctagaacgtgcagtgtcagtagctgaaattaataaaagtgatcatgttgctgcatgcctaagaagtagtatcttattgagtcttatcgatgagaaactaaaaataagggatcctagagcaaaggattttgctgcaaaatatcaaacaatccgcttccttccatttctgacaaaaccagcaggtttttctttggactggaaaggcaacagttttaagcctgaaaccatgtttgcagcaactgacctttatacagctgaacatcaagatatagtttgtcttttgcaaccaattctaaatgaaaattcccattcttttagaggttgtggttcagtgtcattggctgttaaagagtttttgggattactcaagaagccaacagttgatctggttataaaccaattgaaagaagtagcaaaatcagttgatgatggaattacactgtaccaggagaatatcaccaatgcttgctacaaataccttcatgaagccttgatgcaaaatgaaatcactaagatgtcaattattgataagttaaaaccctttagcttcattctagttgagaatgcatatgttgactcagaaaaggtttcttttcatttaaattttgaggcggcaccatacctttatcagttgcctaataagtataaaaataatttccgcgaactttttgaaaccgtgggtgtgaggcagtcatgcactgttgaagattttgctcttgttttggaatctattgatcaagaaagaggaacaaagcaaataacagaagagaattttcagctttgccgacgaataatcagtgaaggaatatggagtctcattagagaaaagaaacaagaattttgtgagaaaaattatggcaagatattattgccagatactaatcttatgcttctccctgctaaatcgttatgctacaatgattgcccttggataaaagtaaaggataccactgtaaaatattgtcatgctgacatacccagggaagtagcagtaaaactaggagcagtcccaaagcgacacaaagccttagaaagatatgcatccaatgtctgttttacaacacttggcacagaatttgggcagaaagaaaaattgaccagcagaattaagagcatccttaatgcatatccttctgaaaaggaaatgttgaaagagcttcttcaaaatgctgatgatgcaaaggcgacagaaatctgttttgtgtttgatcctagacagcatccagttgatagaatatttgatgataagtgggccccattgcaagggccagcactttgtgtgtacaacaaccagccatttacagaagatgatgttagaggaattcagaatcttggaaaaggcacgaaagagggaaatccttataaaactggacagtatggaataggattcaattctgtgtatcatatcacagactgcccatcttttatttctggcaatgacatcctgtgtatttttgatcctcatgccagatatgcaccaggggccacatccattagtcccggacgcatgtttagagatttggatgcagattttaggacacagttctcagatgttctggatctttatctgggaacccattttaaactggataattgcacaatgttcagatttcctcttcgtaatgcagaaatggcaaaagtttcggaaatttcgtctgttccagcatcagacagaatggtccagaatcttttggacaaactgcgctcagatggggcagaacttctaatgtttcttaatcacatggaaaaaatttctatttgtgaaatagataagagtactggagctctaaatgtgctgtattcagtaaagggcaaaatcacagatggagacagattgaaaaggaaacaatttcatgcatctgtaattgatagtgttactaaaaagaggcagctcaaagacataccagttcaacaaataacctatactatggatactgaggactctgaaggaaatcttactacgtggctaatttgtaatagatcaggcttttcaagtatggagaaagtatctaaaagtgtcatatcagctcacaagaaccaagatattactcttttcccacgtggtggagtagctgcctgcattactcacaactataaaaaaccccatagggccttctgttttttgcctctttctttggagactgggctgccatttcatgtgaatggccactttgcactggattcagccagaaggaacctgtggcgtgatgataatggagttggtgttcgaagtgactggaataacagtttaatgacagcattaatagctcctgcatatgttgaattgctaatacagttaaaaaaacggtatttccctggttctgatccaacattatcagtgttacagaacacccctattcatgttgtaaaggacactttaaagaagtttttatcgtttttcccagttaaccgtcttgatctacagccagatttatattgtctagtgaaagcactttacaattgcattcacgaagacatgaaacgtcttttacctgttgtgcgggctccaaatattgatggctctgacttgcactctgcagttataattacttggatcaatatgtctacttctaataaaactagaccattttttgacaatttactacaggatgaattacaacaccttaaaaatgcagattataatatcaccacacgcaaaacagtagcagagaatgtctataggctgaaacatctccttttagaaattggtttcaacttggtttataactgtgatgaaactgctaatctttaccactgtcttatagatgcagatattcctgttagttatgtgacccctgctgatatcagatcttttttaatgacattttcctctcctgacactaattgccatattgggaagctgccttgtcgtctgcagcagactaatctaaaactttttcatagtttaaaacttttagttgattattgttttaaagatgcagaagaaaatgagattgaagttgagggattgccccttctcatcacactggacagtgttttgcaaacttttgatgcaaaacgacccaagtttctaacaacatatcatgaattgattccatcccgcaaagacttgtttatgaatacattatatttgaaatatagtaatattttattgaactgtaaagttgcaaaagtgtttgacatttccagctttgctgatttgttatcctctgtgttgcctcgagaatataagaccaaaagttgcacaaagtggaaagacaattttgcaagtgagtcttggcttaagaatgcatggcattttattagtgaatctgtaagtgtgaaagaagatcaggaagaaacaaaaccaacatttgacattgttgttgatactctaaaagactgggcattgcttccaggaacaaagtttactgtttcagccaaccagcttgtggttcctgaaggagatgttctgcttcctctcagccttatgcacattgcagtttttccaaatgcccagagtgataaagtttttcatgctctaatgaaagctggctgtattcagcttgctttgaacaaaatctgttccaaagacagtgcatttgttcctttgttgtcatgtcacacagcaaatatagagagccccacaagcatcttgaaggctctacattatatggtccaaacttcaacatttagagcagaaaaattagtagaaaatgattttgaggcacttttgatgtatttcaactgcaatttgaatcatttgatgtcccaagatgatataaaaattctaaagtcacttccgtgctataaatccatcagtggccgctatgtaagcattggaaaatttggaacatgctacgtacttacaaaaagtatcccttcagctgaagtggagaaatggacacagtcatcatcatctgcatttcttgaagaaaaaatacacttaaaagaactatatgaggtgattggttgtgtacctgtagatgatcttgaggtatatttgaaacacctcttaccaaaaattgaaaatctctcttatgatgcaaaattagagcacttgatctaccttaagaatagattatcaagtgctgaggaattatcagagattaaggaacaactttttgaaaaactggaaagtttattgataatccatgatgctaacagtagactaaagcaagcaaagcatttctatgatagaactgtgagagtttttgaagttatgcttcctgaaaaattgtttattcctaatgatttctttaagaaattggaacaacttataaaacccaaaaatcatgttacatttatgacatcctgggtggaattcttaagaaatattggactaaaatacatactttctcagcagcagttgttacagtttgctaaggaaatcagtgtgagggctaatacagaaaactggtccaaagaaacattgcaaaatacagttgatatccttctgcatcatatattccaagaacgaatggatttgttatctggaaattttctgaaagaactatctttaataccattcttatgtcctgagcgggcccccgcggaattcattagatttcatcctcaatatcaagaggtaaatggaacacttcctcttataaagttcaatggagcacaggtaaatccaaaattcaagcaatgtgatgtactccagctgttatggacatcctgccctattcttccagagaaagctacacccttaagcattaaagaacaagaaggtagtgaccttggtccacaagaacagcttgaacaagttttaaatatgcttaatgttaacctggatcctcctcttgataaggtaatcaataactgcagaaacatatgcaacataacgacgttggatgaagaaatggtaaaaactagagcaaaagtcttaaggagcatatatgaattcctcagtgcagaaaaaagggaatttcgttttcagttgcgaggggttgcttttgtgatggtagaagatggttggaaacttctgaagcctgaggaggtagtcataaacctagaatatgaatctgattttaaaccttatttgtacaagctacctttagaacttggcacatttcaccagttgttcaaacacttaggtactgaagatattatttcaactaagcaatatgttgaagtgttgagccgcatatttaaaaattctgagggcaaacaattagatcctaatgaaatgcgtacagttaagagagtagtttctggtctgttcaggagtctacagaatgattcagtcaaggtgaggagtgatctcgagaatgtacgagaccttgcgctttacctcccaagccaggatggtagattggtaaagtcaagcatcttagtgtttgacgatgcgccacattataaaagtagaatccaggggaatattggtgtgcaaatgttagttgatctcagccagtgctacttagggaaagaccatggatttcacactaagttgataatgctctttcctcaaaaacttagacctcgattattgagcagtatacttgaagaacaattagatgaagagactcccaaagtttgtcagtttggagcgttgtgttctcttcaaggaagattgcagttactcttgtcttctgaacagttcattacaggactgattagaattatgaagcatgaaaatgataatgcttttctggccaatgaagaaaaagccataagactttgcaaagccctaagagaaggattgaaagtatcctgctttgaaaagcttcaaacaacattaagagttaaaggttttaatcctattccccacagcagaagtgaaacttttgcttttttgaagcgatttggtaatgcagtcatcttgctctacattcaacattcagacagtaaagacattaatttcctgttagcattggcaatgactcttaaatcagcaactgacaatttgatttctgacacttcatatttaattgctatgctaggatgcaatgatatttacaggattggtgagaaacttgacagtttaggagtgaaatatgactcttcggagccatcaaaactggaacttccaatgcctggcacaccaattcctgctgaaattcattacactctgcttatggacccaatgaatgttttttacccgggagaatatgttgggtaccttgttgatgctgaaggtggtgatatctatggatcataccagccaacatacacatatgcaattattgtacaagaagttgaaagagaagatgctgacaattctagttttctaggaaagatatatcagatagatattggttatagtgaatataaaatagttagctctcttgatctgtataagttttcaagacctgaggaaagctctcaaagcagggacagtgctccttctacaccaaccagccccactgagttcctcacccctggcctgagaagcattcctcctcttttctctggtagagagagccacaagacttcttccaaacatcagtcccccaaaaagcttaaggttaattctttaccagaaatcttaaaagaagtgacatctgtggtggagcaagcatggaagcttccagaatcggaacgaaaaaagattattaggcggttgtatttgaaatggcatcctgacaaaaatccagagaaccatgacattgccaatgaagtttttaaacatttgcagaatgaaatcaacagattagaaaaacaggcttttctagatcaaaatgcagacagggcctccagacgaacattttcaacctcagcatcccgatttcagtcagacaaatactcatttcagagattctatacttcatggaatcaagaagcaacgagccataaatctgaaagacagcaacagaacaaagaaaaatgccccccttcagccggacagacttactctcaaaggttctttgttcctcccactttcaagtcggttggcaatccagtggaagcacgcagatggctaagacaagccagagcaaacttctcagctgccaggaatgaccttcataaaaatgccaatgagtgggtgtgctttaaatgttacctttctaccaagttagctttgattgcagctgactatgctgtgaggggaaagtctgataaagatgtaaaaccaactgcacttgctcagaaaatagaggaatatagtcagcaacttgaaggactgacaaatgatgttcacacattggaagcttatggtgtagacagtttaaaaacaagataccctgatttgcttccctttcctcagatcccaaatgacaggttcacttctgaggttgctatgagggtgatggaatgtactgcctgtatcataataaaacttgaaaattttatgcaacaaaaagtgtgaagatatttaacgaaaaaaaaggtagatcttgaatgtgttgtagcacgaataaattgctgtacttcattaagcttcattgccaattagctaggaattgttaagcacattgcagattgttcttggagaattctggagttgttatgaacatgaataccaacggaaaaccttaactgaatctaaaagaaaactattttgaagatggtggtgagctgcaaaatagctggatggatttgaatgattgggatgatacatcattgaactgcactttatataaccaaagcttagcagtttgttagataagagtctatgtatgtctctggttaggatgaagttaattttatgtttttaacatggtatttttgaaggagctaatgaaacactggacatataattggtttaaacataaggggaattaagtctttgtagtctgtcatttttttaagtggatcctcttggatgcgttattttctcatcagctggctctgatcatgaatttgttgtaattttatgttgtactcagtgcatttaagaaatggtagagtattttaatcctattacttgactaagagtgtgaaggtagtactttttagagtgcactgagtgcactttacatctttatttaaatttttttttaacatcttatgtttacaggcttcctgtttgatgaagatagcaacggaaaactcaaaatggtggcagttcttattaccagttgttagtattgtttctggaaactgcttgccaagacaacatttattaactgttagaacacttgctttatgtttgtgtgtacatattttccacaaatgttataatttatatagtgtggttgaacaggatgcaatcttttgttgtctaaaggtgctgcagttaaaaaaaaaacaaccttttctttcaatatggcatgtagtggagtttttttaactttaaaaacatcaaaaattgttaaaatcattgtgttatctagtagtttataattatcggcttatatttccccatgaatgatcagaactgacatttaattcatgtttgtctcgccatgcttctttactttaacatatttcttttgcagaatgtaaaaggtaatgataattagtttatataagtgtactggctgtaaatgatgctaaatatactttatgcaattaagggcttacagaacatgttgaaactttttttacttttattgggaataaggaatgtttgcacctccacattttattgcttctggatgtgaaatcatgtaattatttctgctgttatataaagtgccatacttttaataaaggaaaatgtacatatgaaatcatcgt

SEQ ID NO: 8233 - protein, 4432 aa, Homo sapiens; identical to SEQ ID NO: 938

SEQ ID NO: 8234 - DNA, 15137 bp, Homo sapiens
ctgctcctcggccgccgcggcttcctctagcgtttcctcctcggcgcgggctgctgcgtacgggactgcgccatgcggatcccgccctcccggcccgcgcggggcctgtggacgcggtagggccggccgtgatcgggcgccggcgtcaggggcgggcgctaggggcgcctgccgcgccgcgatgtgggagaggtgggtcccggtgaccgtgctccccggctgcgtgggctgcaggaccgtcgcggcgctggcgtcctggaccgtgcgcgatgtgaaggaacgtatcttcgcggagactggcttcccggtgtcggagcagcggctgtggcgcggcggccgcgaggtcgatttggtcagacaacgccaccacttgttgattttctcaaggacattttgagaagatatccagaaggaggacagattcttaaggaattaattcagaatgcagaagatgctggggcgacagaagttaaatttttatatgatgaaactcaatacggaacagagactctttggtcaaaagatatggcgccatatcaggggccagctctctatgtgtacaacaacgcggttttcaccccagaggactggcacggcattcaagaaatagcaagaagcaggaaaaaggatgatcctctgaaggtcggaagatttggaattgggtttaattctgtctatcatataacagatgttccttgtatctttagtggtgaccaaatcgggatgctagatcctcatcaaacactttttggcccacatgaatcaggccaatgttggaatctcaaagatgacagcaaagaaattagtgaactttcagaccagtttgcaccatttgttggcatttttggaagcaccaaggaaacatttataaacggcaattttccaggaacatttttccgtttccctcttcgcctacaaccttcacaacttagtagtaacctctacaataagcagaaggttcttgagttgtttgagtcttttagggcagatgcagacacagtgctgctctttctgaaaagtgtgcaggatgtttccttatatgtccgagaggctgacggaacagagaaactggtgtttagagtgacttcgagtgagagtaaggcactgaaacatgagcggccgaattctataaagattctgggaactgctataagtaactattgtaaaaagactccaagcaataacatcacctgtgtaacatatcacgtaaatattgttttagaagaggagagtactaaggatgcacagaaaacatcttggttggtgtgtaacagtgtgggtgggcgagggatcagtagtaagcttgactctttagctgatgaactgaaatttgtcccaatcattggaatagccatgcctttatcaagcagagatgatgaagcaaaaggagcaacgtctgatttctcaggaaaagcattttgtttccttcctttaccacctggtgaggaaagcagcacaggcctcccagttcacatcagtgggttctttggccttactgataaccgcaggagcataaaatggagagagctggaccagtggagagacccggcagccttatggaatgagtttcttgtcatgaatgttgtccccaaagcttatgctactctgatcttagattcaataaaacgtctggagatggaaaagagctctgatttccccttgtcagttgatgttatctataagctttggccggaggcgagcaaagtcaaggtgcactggcaaccggtgttagagcctctattcagcgagctgttgcagaatgcagtgatttattcaattagctgtgactgggtcaggttggagcaggtgtacttctcagaacttgatgaaaatttagaatacacaaaaactgtgctcaactacctccagagctcagggaagcagattgccaaggtaccagggaatgtggatgctgctgttcagctcacagctgcctctggcacaacacctgtgaggaaggtgacgcccgcgtgggtgcggcaggtgctgcggaagtgtgcacacctgggctgtgctgaagaaaagcttcaccttctagaatttgtgctttctgaccaagcctacagtgagctgcttgggctggagctgctccctttacaaaatggcaattttgtccccttctcctcatctgtatcagaccaagatgtcatttatattacctcagcagaatatccaaggtcccttttcccaagtcttgaaggaagatttattttggataacttgaaacctcaccttgtggctgctttaaaggaagctgcccaaacccgaggaagaccatgtactcagctgcagcttctaaatccagaacgatttgcacgtcttatcaaggaagtaatgaatacattctggcctggcagagaattgattgttcaatggtatccatttgatgaaaacagaaatcacccatctgtttcatggcttaagatggtttggaaaaatctttatatacatttttcagaggatttgactttatttgatgagatgccacttatccccagaactatactagaggaaggtcagacatgtgtggaactcattagactcaggattccatcgttagtcattttagacgatgaatctgaagcacagcttccagaatttttagcagacattgtacaaaaacttggagggtttgtccttaaaaaattagatgcatctatacaacatccgcttattaaaaaatatattcattcaccattaccaagtgctgttttgcagataatggagaagatgccattgcagaaattgtgtaatcaaataacttcgctacttccaacacacaaagatgccctgaggaagttcttggctagtttaaccgatagcagtgagaaagagaaaagaattattcaagaattggcaatattcaagcgcattaaccattcttctgatcagggaatttcctcttatacaaaattgaaaggttgtaaagtcttacaccatactgccaaactcccagcagatctgcgactttctatttcagtaatagacagtagtgatgaagctactattcgtctggcaaacatgttgaaaatagaacagttaaagaccactagctgcttaaagcttgttttaaaagatattgaaaatgcattttattcacatgaagaggtaacacagcttatgttatgggtccttgagaatctatcttctcttaaaaatgagaatccaaatgtgcttgagtggttaacaccattaaaattcatccagatatcacaggaacagatggtatcagctggtgaactctttgaccctgatatagaagtactaaaggatctcttttgtaatgaagaaggaacctatttcccaccctcagtttttacctcaccagatattcttcactccttaagacagattggtttaaaaaacgaagccagtctcaaagaaaaggatgttgtgcaagtggcaaaaaaaattgaagccttacaggtcggtgcttgtcctgatcaagatgttcttctgaagaaagccaaaaccctcttactggttttaaataagaatcacacactgttgcaatcatctgaaggaaagatgacattgaagaaaataaaatgggttccagcctgcaaggaaaggcctccaaattatccaggctctttggtctggaaaggagatctctgtaatctctgtgcaccaccagatatgtgtgatgtaggccatgcaattctcattggctcctcacttcctcttgttgaaagtatccatgtaaacctggaaaaagcattagggatcttcacaaaacctagccttagtgctgtcttaaaacactttaaaattgttgttgattggtattcttcaaaaacctttagtgatgaagactactatcaattccagcatattttgcttgagatttacggattcatgcatgatcatctaaatgaagggaaagattcttttagagccttaaaatttccatgggtttggactggcaaaaagttttgtccacttgcccaggctgtgattaaaccaatccatgatcttgaccttcagccttatttgcataatgtacctaaaaccatggcaaaattccaccaactatttaaggtctgtggttcaatagaggagttgacatcagatcatatttccatggttattcagaagatatatctcaaaagtgaccaagatctcagtgaacaagaaagcaaacaaaatcttcatcttatgttgaatattatcagatggctgtatagcaatcagattccagcaagccccaacacaccagttcctatacatcatagcaaaaatccttctaaacttatcatgaagccaattcacgaatgctgttattgtgacattaaagttgatgaccttaatgacttacttgaagattctgtggaaccaatcattttggtgcatgaggacatacccatgaaaactgcagaatggctaaaagttccatgccttagtacaagactgataaatcctgaaaacatgggatttgagcagtcaggacaaagagagccacttactgtaagaattaaaaatattctggaagaatacccttcagtgtcagatatttttaaagaactacttcaaaacgctgatgatgcaaatgcaacagaatgcagtttcttgattgatatgagaagaaatatggacataagagagaatctcctagacccagggatggcagcttgtcatggacctgctttgtggtcattcaacaattctcaattctcagattcagattttgtgaacataactaggttaggagaatctttaaaaaggggagaagttgacaaagttggaaaatttggtcttggatttaattctgtgtaccatatcactgacattcccatcattatgagtcgggaattcatgataatgttcgatccaaacataaatcatatcagtaaacacattaaagacaaatccaatcctgggatcaaaattaattggagtaaacaacagaaaagacttagaaaatttcctaatcagttcaaaccatttatagatgtatttggctgtcagttacctttgactgtagaagcaccttacagctataatggaacccttttccgactgtcctttagaactcaacaggaagcaaaagtgagtgaagttagtagtacgtgctacaatacagcagatatttattctcttgtggatgaatttagtctctgtggacacaggcttatcattttcactcagagtgtaaagtcaatgtatttgaagtacttgaaaattgaggaaaccaaccccagtttagcacaagatacagtaataattaaaaaaaaatcctgctcttccaaagcattgaacacacctgtcttaagtgttttaaaagaggctgctaagctcatgaagacttgcagcagcagtaataaaaagcttcccagtgatgaaccaaagtcatcttgcattcttcagatcacagtggaagaatttcaccatgtgttcagaaggattgctgatttacagtcgccactttttagaggtccagatgatgacccagctgctctctttgaaatggctaagtctggccaatcaaaaaagccatcagatgagttgtcacagaaaacagtagagtgtaccacgtggcttctgtgtacttgcatggacacaggagaggctctgaagttttccctgagtgagagtggaagaagactaggactggttccatgtggggcagtaggagttcagctgtcagaaatccaggaccagaagtggacagtgaaaccacacattggagaggtgttttgctatttacctttacgaataaaaacaggcttgccagttcatatcaatgggtgctttgctgttacatcaaataggaaagaaatctggaaaacagatacaaaaggacgatggaataccacgttcatgagacatgttattgtgaaagcttacttacaggtactgagtgtcttacgggacctggccactagtggggagctaatggattatacttactatgcagtatggcccgatcctgatttagttcatgatgatttttctgtaatttgccaaggattttatgaagatatagctcatggaaaagggaaagaactgaccaaagtcttctctgatggatctacttgggtttccatgaagaacgtaagatttctagatgactctatacttaaaagaagagatgttggttcagcagccttcaagatatttttgaaatacctcaagaagactgggtccaaaaacctttgtgctgttgaacttccttcttcggtaaaattaggatttgaagaagctggctgcaaacagatactacttgaaaacacattttcagagaaacagtttttttctgaagtgttttttccaaatattcaagaaattgaagcagaacttagagatcctttaatgatctttgttctaaatgaaaaagttgatgagttctcgggagttcttcgtgttactccatgtattccttgttccttggaggggcatcctttggttttgccatcaagattgatccaccccgaaggacgagttgcaaagttatttgatattaaagatgggagattcccttatggttctactcaggattatctcaatcctattattttgattaaactagttcagttaggtatggcaaaagatgatattttatgggatgatatgctagaacgtgcagtgtcagtagctgaaattaataaaagtgatcatgttgctgcatgcctaagaagtagtatcttattgagtcttatcgatgagaaactaaaaataagggatcctagagcaaaggattttgctgcaaaatatcaaacaatccgcttccttccatttctgacaaaaccagcaggtttttctttggactggaaaggcaacagttttaagcctgaaaccatgtttgcagcaactgacctttatacagctgaacatcaagatatagtttgtcttttgcaaccaattctaaatgaaaattcccattcttttagaggttgtggttcagtgtcattggctgttaaagagtttttgggattactcaagaagccaacagttgatctggttataaaccaattgaaagaagtagcaaaatcagttgatgatggaattacactgtaccaggagaatatcaccaatgcttgctacaaataccttcatgaagccttgatgcaaaatgaaatcactaagatgtcaattattgataagttaaaaccctttagcttcattctagttgagaatgcatatgttgactcagaaaaggtttcttttcatttaaattttgaggcggcaccatacctttatcagttgcctaataagtataaaaataatttccgcgaactttttgaaaccgtgggtgtgaggcagtcatgcactgttgaagattttgctcttgttttggaatctattgatcaagaaagaggaacaaagcaaataacagaagagaattttcagctttgccgacgaataatcagtgaaggaatatggagtctcattagagaaaagaaacaagaattttgtgagaaaaattatggcaagatattattgccagatactaatcttatgcttctccctgctaaatcgttatgctacaatgattgcccttggataaaagtaaaggataccactgtaaaatattgtcatgctgacatacccagggaagtagcagtaaaactaggagcagtcccaaagcgacacaaagccttagaaagatatgcatccaatgtctgttttacaacacttggcacagaatttgggcagaaagaaaaattgaccagcagaattaagagcatccttaatgcatatccttctgaaaaggaaatgttgaaagagcttcttcaaaatgctgatgatgcaaaggcgacagaaatctgttttgtgtttgatcctagacagcatccagttgatagaatatttgatgataagtgggccccattgcaagggccagcactttgtgtgtacaacaaccagccatttacagaagatgatgttagaggaattcagaatcttggaaaaggcacgaaagagggaaatccttataaaactggacagtatggaataggattcaattctgtgtatcatatcacagactgcccatcttttatttctggcaatgacatcctgtgtatttttgatcctcatgccagatatgcaccaggggccacatccattagtcccggacgcatgtttagagatttggatgcagattttaggacacagttctcagatgttctggatctttatctgggaacccattttaaactggataattgcacaatgttcagatttcctcttcgtaatgcagaaatggcaaaagtttcggaaatttcgtctgttccagcatcagacagaatggtccagaatcttttggacaaactgcgctcagatggggcagaacttctaatgtttcttaatcacatggaaaaaatttctatttgtgaaatagataagagtactggagctctaaatgtgctgtattcagtaaagggcaaaatcacagatggagacagattgaaaaggaaacaatttcatgcatctgtaattgatagtgttactaaaaagaggcagctcaaagacataccagttcaacaaataacctatactatggatactgaggactctgaaggaaatcttactacgtggctaatttgtaatagatcaggcttttcaagtatggagaaagtatctaaaagtgtcatatcagctcacaagaaccaagatattactcttttcccacgtggtggagtagctgcctgcattactcacaactataaaaaaccccatagggccttctgttttttgcctctttctttggagactgggctgccatttcatgtgaatggccactttgcactggattcagccagaaggaacctgtggcgtgatgataatggagttggtgttcgaagtgactggaataacagtttaatgacagcattaatagctcctgcatatgttgaattgctaatacagttaaaaaaacggtatttccctggttctgatccaacattatcagtgttacagaacacccctattcatgttgtaaaggacactttaaagaagtttttatcgtttttcccagttaaccgtcttgatctacagccagatttatattgtctagtgaaagcactttacaattgcattcacgaagacatgaaacgtcttttacctgttgtgcgggctccaaatattgatggctctgacttgcactctgcagttataattacttggatcaatatgtctacttctaataaaactagaccattttttgacaatttactacaggatgaattacaacaccttaaaaatgcagattataatatcaccacacgcaaaacagtagcagagaatgtctataggctgaaacatctccttttagaaattggtttcaacttggtttataactgtgatgaaactgctaatctttaccactgtcttatagatgcagatattcctgttagttatgtgacccctgctgatatcagatcttttttaatgacattttcctctcctgacactaattgccatattgggaagctgccttgtcgtctgcagcagactaatctaaaactttttcatagtttaaaacttttagttgattattgttttaaagatgcagaagaaaatgagattgaagttgagggattgccccttctcatcacactggacagtgttttgcaaacttttgatgcaaaacgacccaagtttctaacaacatatcatgaattgattccatcccgcaaagacttgtttatgaatacattatatttgaaatatagtaatattttattgaactgtaaagttgcaaaagtgtttgacatttccagctttgctgatttgttatcctctgtgttgcctcgagaatataagaccaaaagttgcacaaagtggaaagacaattttgcaagtgagtcttggcttaagaatgcatggcattttattagtgaatctgtaagtgtgaaagaagatcaggaagaaacaaaaccaacatttgacattgttgttgatactctaaaagactgggcattgcttccaggaacaaagtttactgtttcagccaaccagcttgtggttcctgaaggagatgttctgcttcctctcagccttatgcacattgcagtttttccaaatgcccagagtgataaagtttttcatgctctaatgaaagctggctgtattcagcttgctttgaacaaaatctgttccaaagacagtgcatttgttcctttgttgtcatgtcacacagcaaatatagagagccccacaagcatcttgaaggctctacattatatggtccaaacttcaacatttagagcagaaaaattagtagaaaatgattttgaggcacttttgatgtatttcaactgcaatttgaatcatttgatgtcccaagatgatataaaaattctaaagtcacttccgtgctataaatccatcagtggccgctatgtaagcattggaaaatttggaacatgctacgtacttacaaaaagtatcccttcagctgaagtggagaaatggacacagtcatcatcatctgcatttcttgaagaaaaaatacacttaaaagaactatatgaggtgattggttgtgtacctgtagatgatcttgaggtatatttgaaacacctcttaccaaaaattgaaaatctctcttatgatgcaaaattagagcacttgatctaccttaagaatagattatcaagtgctgaggaattatcagagattaaggaacaactttttgaaaaactggaaagtttattgataatccatgatgctaacagtagactaaagcaagcaaagcatttctatgatagaactgtgagagtttttgaagttatgcttcctgaaaaattgtttattcctaatgatttctttaagaaattggaacaacttataaaacccaaaaatcatgttacatttatgacatcctgggtggaattcttaagaaatattggactaaaatacatactttctcagcagcagttgttacagtttgctaaggaaatcagtgtgagggctaatacagaaaactggtccaaagaaacattgcaaaatacagttgatatccttctgcatcatatattccaagaacgaatggatttgttatctggaaattttctgaaagaactatctttaataccattcttatgtcctgagcgggcccccgcggaattcattagatttcatcctcaatatcaagaggtaaatggaacacttcctcttataaagttcaatggagcacaggtaaatccaaaattcaagcaatgtgatgtactccagctgttatggacatcctgccctattcttccagagaaagctacacccttaagcattaaagaacaagaaggtagtgaccttggtccacaagaacagcttgaacaagttttaaatatgcttaatgttaacctggatcctcctcttgataaggtaatcaataactgcagaaacatatgcaacataacgacgttggatgaagaaatggtaaaaactagagcaaaagtcttaaggagcatatatgaattcctcagtgcagaaaaaagggaatttcgttttcagttgcgaggggttgcttttgtgatggtagaagatggttggaaacttctgaagcctgaggaggtagtcataaacctagaatatgaatctgattttaaaccttatttgtacaagctacctttagaacttggcacatttcaccagttgttcaaacacttaggtactgaagatattatttcaactaagcaatatgttgaagtgttgagccgcatatttaaaaattctgagggcaaacaattagatcctaatgaaatgcgtacagttaagagagtagtttctggtctgttcaggagtctacagaatgattcagtcaaggtgaggagtgatctcgagaatgtacgagaccttgcgctttacctcccaagccaggatggtagattggtaaagtcaagcatcttagtgtttgacgatgcgccacattataaaagtagaatccaggggaatattggtgtgcaaatgttagttgatctcagccagtgctacttagggaaagaccatggatttcacactaagttgataatgctctttcctcaaaaacttagacctcgattattgagcagtatacttgaagaacaattagatgaagagactcccaaagtttgtcagtttggagcgttgtgttctcttcaaggaagattgcagttactcttgtcttctgaacagttcattacaggactgattagaattatgaagcatgaaaatgataatgcttttctggccaatgaagaaaaagccataagactttgcaaagccctaagagaaggattgaaagtatcctgctttgaaaagcttcaaacaacattaagagttaaaggttttaatcctattccccacagcagaagtgaaacttttgcttttttgaagcgatttggtaatgcagtcatcttgctctacattcaacattcagacagtaaagacattaatttcctgttagcattggcaatgactcttaaatcagcaactgacaatttgatttctgacacttcatatttaattgctatgctaggatgcaatgatatttacaggattggtgagaaacttgacagtttaggagtgaaatatgactcttcggagccatcaaaactggaacttccaatgcctggcacaccaattcctgctgaaattcattacactctgcttatggacccaatgaatgttttttacccgggagaatatgttgggtaccttgttgatgctgaaggtggtgatatctatggatcataccagccaacatacacatatgcaattattgtacaagaagttgaaagagaagatgctgacaattctagttttctaggaaagatatatcagatagatattggttatagtgaatataaaatagttagctctcttgatctgtataagttttcaagacctgaggaaagctctcaaagcagggacagtgctccttctacaccaaccagccccactgagttcctcacccctggcctgagaagcattcctcctcttttctctggtagagagagccacaagacttcttccaaacatcagtcccccaaaaagcttaaggttaattctttaccagaaatcttaaaagaagtgacatctgtggtggagcaagcatggaagcttccagaatcggaacgaaaaaagattattaggcggttgtatttgaaatggcatcctgacaaaaatccagagaaccatgacattgccaatgaagtttttaaacatttgcagaatgaaatcaacagattagaaaaacaggcttttctagatcaaaatgcagacagggcctccagacgaacattttcaacctcagcatcccgatttcagtcagacaaatactcatttcagagattctatacttcatggaatcaagaagcaacgagccataaatctgaaagacagcaacagaacaaagaaaaatgccccccttcagccggacagacttactctcaaaggttctttgttcctcccactttcaagtcggttggcaatccagtggaagcacgcagatggctaagacaagccagagcaaacttctcagctgccaggaatgaccttcataaaaatgccaatgagtgggtgtgctttaaatgttacctttctaccaagttagctttgattgcagctgactatgctgtgaggggaaagtctgataaagatgtaaaaccaactgcacttgctcagaaaatagaggaatatagtcagcaacttgaaggactgacaaatgatgttcacacattggaagcttatggtgtagacagtttaaaaacaagataccctgatttgcttccctttcctcagatcccaaatgacaggttcacttctgaggttgctatgagggtgatggaatgtactgcctgtatcataataaaacttgaaaattttatgcaacaaaaagtgtgaagatatttaacgaaaaaaaaggtagatcttgaatgtgttgtagcacgaataaattgctgtacttcattaagcttcattgccaattagctaggaattgttaagcacattgcagattgttcttggagaattctggagttgttatgaacatgaataccaacggaaaaccttaactgaatctaaaagaaaactattttgaagatggtggtgagctgcaaaatagctggatggatttgaatgattgggatgatacatcattgaactgcactttatataaccaaagcttagcagtttgttagataagagtctatgtatgtctctggttaggatgaagttaattttatgtttttaacatggtatttttgaaggagctaatgaaacactggacatataattggtttaaacataaggggaattaagtctttgtagtctgtcatttttttaagtggatcctcttggatgcgttattttctcatcagctggctctgatcatgaatttgttgtaattttatgttgtactcagtgcatttaagaaatggtagagtattttaatcctattacttgactaagagtgtgaaggtagtactttttagagtgcactgagtgcactttacatctttatttaaatttttttttaacatcttatgtttacaggcttcctgtttgatgaagatagcaacggaaaactcaaaatggtggcagttcttattaccagttgttagtattgtttctggaaactgcttgccaagacaacatttattaactgttagaacacttgctttatgtttgtgtgtacatattttccacaaatgttataatttatatagtgtggttgaacaggatgcaatcttttgttgtctaaaggtgctgcagttaaaaaaaaaacaaccttttctttcaatatggcatgtagtggagtttttttaactttaaaaacatcaaaaattgttaaaatcattgtgttatctagtagtttataattatcggcttatatttccccatgaatgatcagaactgacatttaattcatgtttgtctcgccatgcttctttactttaacatatttcttttgcagaatgtaaaaggtaatgataattagtttatataagtgtactggctgtaaatgatgctaaatatactttatgcaattaagggcttacagaacatgttgaaactttttttacttttattgggaataaggaatgtttgcacctccacattttattgcttctggatgtgaaatcatgtaattatttctgctgttatataaagtgccatacttttaataaaggaaaatgtacatatgaaatcatcgt

SEQ ID NO: 8235 - protein, 4432 aa, Homo sapiens; identical to SEQ ID NO: 938

SEQ ID NO: 8236 - DNA, 7396 bp, Homo sapiens
ctgctcctcggccgccgcggcttcctctagcgtttcctcctcggcgcgggctgctgcgtacgggactgcgccatgcggatcccgccctcccggcccgcgcggggcctgtggacgcggtagggccggccgtgatcgggcgccggcgtcaggggcgggcgctaggggcgcctgccgcgccgcgatgtgggagaggtgggtcccggtgaccgtgctccccggctgcgtgggctgcaggaccgtcgcggcgctggcgtcctggaccgtgcgcgatgtgaaggaacgtatcttcgcggagactggcttcccggtgtcggagcagcggctgtggcgcggcggccgcgaggtcgatttggtcagacaacgccaccacttgttgattttctcaaggacattttgagaagatatccagaaggaggacagattcttaaggaattaattcagaatgcagaagatgctggggcgacagaagttaaatttttatatgatgaaactcaatacggaacagagactctttggtcaaaagatatggcgccatatcaggggccagctctctatgtgtacaacaacgcggttttcaccccagaggactggcacggcattcaagaaatagcaagaagcaggaaaaaggatgatcctctgaaggtcggaagatttggaattgggtttaattctgtctatcatataacagatgttccttgtatctttagtggtgaccaaatcgggatgctagatcctcatcaaacactttttggcccacatgaatcaggccaatgttggaatctcaaagatgacagcaaagaaattagtgaactttcagaccagtttgcaccatttgttggcatttttggaagcaccaaggaaacatttataaacggcaattttccaggaacatttttccgtttccctcttcgcctacaaccttcacaacttagtagtaacctctacaataagcagaaggttcttgagttgtttgagtcttttagggcagatgcagacacagtgctgctctttctgaaaagtgtgcaggatgtttccttatatgtccgagaggctgacggaacagagaaactggtgtttagagtgacttcgagtgagagtaaggcactgaaacatgagcggccgaattctataaagattctgggaactgctataagtaactattgtaaaaagactccaagcaataacatcacctgtgtaacatatcacgtaaatattgttttagaagaggagagtactaaggatgcacagaaaacatcttggttggtgtgtaacagtgtgggtgggcgagggatcagtagtaagcttgactctttagctgatgaactgaaatttgtcccaatcattggaatagccatgcctttatcaagcagagatgatgaagcaaaaggagcaacgtctgatttctcaggaaaagcattttgtttccttcctttaccacctggtgaggaaagcagcacaggcctcccagttcacatcagtgggttctttggccttactgataaccgcaggagcataaaatggagagagctggaccagtggagagacccggcagccttatggaatgagtttcttgtcatgaatgttgtccccaaagcttatgctactctgatcttagattcaataaaacgtctggagatggaaaagagctctgatttccccttgtcagttgatgttatctataagctttggccggaggcgagcaaagtcaaggtgcactggcaaccggtgttagagcctctattcagcgagctgttgcagaatgcagtgatttattcaattagctgtgactgggtcaggttggagcaggtgtacttctcagaacttgatgaaaatttagaatacacaaaaactgtgctcaactacctccagagctcagggaagcagattgccaaggtaccagggaatgtggatgctgctgttcagctcacagctgcctctggcacaacacctgtgaggaaggtgacgcccgcgtgggtgcggcaggtgctgcggaagtgtgcacacctgggctgtgctgaagaaaagcttcaccttctagaatttgtgctttctgaccaagcctacagtgagctgcttgggctggagctgctccctttacaaaatggcaattttgtccccttctcctcatctgtatcagaccaagatgtcatttatattacctcagcagaatatccaaggtcccttttcccaagtcttgaaggaagatttattttggataacttgaaacctcaccttgtggctgctttaaaggaagctgcccaaacccgaggaagaccatgtactcagctgcagcttctaaatccagaacgatttgcacgtcttatcaaggaagtaatgaatacattctggcctggcagagaattgattgttcaatggtatccatttgatgaaaacagaaatcacccatctgtttcatggcttaagatggtttggaaaaatctttatatacatttttcagaggatttgactttatttgatgagatgccacttatccccagaactatactagaggaaggtcagacatgtgtggaactcattagactcaggattccatcgttagtcattttagacgatgaatctgaagcacagcttccagaatttttagcagacattgtacaaaaacttggagggtttgtccttaaaaaattagatgcatctatacaacatccgcttattaaaaaatatattcattcaccattaccaagtgctgttttgcagataatggagaagatgccattgcagaaattgtgtaatcaaataacttcgctacttccaacacacaaagatgccctgaggaagttcttggctagtttaaccgatagcagtgagaaagagaaaagaattattcaagaattggcaatattcaagcgcattaaccattcttctgatcagggaatttcctcttatacaaaattgaaaggttgtaaagtcttacaccatactgccaaactcccagcagatctgcgactttctatttcagtaatagacagtagtgatgaagctactattcgtctggcaaacatgttgaaaatagaacagttaaagaccactagctgcttaaagcttgttttaaaagatattgaaaatgcattttattcacatgaagaggtaacacagcttatgttatgggtccttgagaatctatcttctcttaaaaatgagaatccaaatgtgcttgagtggttaacaccattaaaattcatccagatatcacaggaacagatggtatcagctggtgaactctttgaccctgatatagaagtactaaaggatctcttttgtaatgaagaaggaacctatttcccaccctcagtttttacctcaccagatattcttcactccttaagacagattggtttaaaaaacgaagccagtctcaaagaaaaggatgttgtgcaagtggcaaaaaaaattgaagccttacaggtcggtgcttgtcctgatcaagatgttcttctgaagaaagccaaaaccctcttactggttttaaataagaatcacacactgttgcaatcatctgaaggaaagatgacattgaagaaaataaaatgggttccagcctgcaaggaaaggcctccaaattatccaggctctttggtctggaaaggagatctctgtaatctctgtgcaccaccagatatgtgtgatgtaggccatgcaattctcattggctcctcacttcctcttgttgaaagtatccatgtaaacctggaaaaagcattagggatcttcacaaaacctagccttagtgctgtcttaaaacactttaaaattgttgttgattggtattcttcaaaaacctttagtgatgaagactactatcaattccagcatattttgcttgagatttacggattcatgcatgatcatctaaatgaagggaaagattcttttagagccttaaaatttccatgggtttggactggcaaaaagttttgtccacttgcccaggctgtgattaaaccaatccatgatcttgaccttcagccttatttgcataatgtacctaaaaccatggcaaaattccaccaactatttaaggtctgtggttcaatagaggagttgacatcagatcatatttccatggttattcagaagatatatctcaaaagtgaccaagatctcagtgaacaagaaagcaaacaaaatcttcatcttatgttgaatattatcagatggctgtatagcaatcagattccagcaagccccaacacaccagttcctatacatcatagcaaaaatccttctaaacttatcatgaagccaattcacgaatgctgttattgtgacattaaagttgatgaccttaatgacttacttgaagattctgtggaaccaatcattttggtgcatgaggacatacccatgaaaactgcagaatggctaaaagttccatgccttagtacaagactgataaatcctgaaaacatgggatttgagcagtcaggacaaagagagccacttactgtaagaattaaaaatattctggaagaatacccttcagtgtcagatatttttaaagaactacttcaaaacgctgatgatgcaaatgcaacagaatgcagtttcttgattgatatgagaagaaatatggacataagagagaatctcctagacccagggatggcagcttgtcatggacctgctttgtggtcattcaacaattctcaattctcagattcagattttgtgaacataactaggttaggagaatctttaaaaaggggagaagttgacaaagttggaaaatttggtcttggatttaattctgtgtaccatatcactgacattcccatcattatgagtcgggaattcatgataatgttcgatccaaacataaatcatatcagtaaacacattaaagacaaatccaatcctgggatcaaaattaattggagtaaacaacagaaaagacttagaaaatttcctaatcagttcaaaccatttatagatgtatttggctgtcagttacctttgactgtagaagcaccttacagctataatggaacccttttccgactgtcctttagaactcaacaggaagcaaaagtgagtgaagttagtagtacgtgctacaatacagcagatatttattctcttgtggatgaatttagtctctgtggacacaggcttatcattttcactcagagtgtaaagtcaatgtatttgaagtacttgaaaattgaggaaaccaaccccagtttagcacaagatacagtaataattaaaaaaaaatcctgctcttccaaagcattgaacacacctgtcttaagtgttttaaaagaggctgctaagctcatgaagacttgcagcagcagtaataaaaagcttcccagtgatgaaccaaagtcatcttgcattcttcagatcacagtggaagaatttcaccatgtgttcagaaggattgctgatttacagtcgccactttttagaggtccagatgatgacccagctgctctctttgaaatggctaagtctggccaatcaaaaaagccatcagatgagttgtcacagaaaacagtagagtgtaccacgtggcttctgtgtacttgcatggacacaggagaggctctgaagttttccctgagtgagagtggaagaagactaggactggttccatgtggggcagtaggagttcagctgtcagaaatccaggaccagaagtggacagtgaaaccacacattggagaggtgttttgctatttacctttacgaataaaaacaggcttgccagttcatatcaatgggtgctttgctgttacatcaaataggaaagaaatctggaaaacagatacaaaaggacgatggaataccacgttcatgagacatgttattgtgaaagcttacttacaggtactgagtgtcttacgggacctggccactagtggggagctaatggattatacttactatgcagtatggcccgatcctgatttagttcatgatgatttttctgtaatttgccaaggattttatgaagatatagctcatggaaaagggaaagaactgaccaaagtcttctctgatggatctacttgggtttccatgaagaacgtaagatttctagatgactctatacttaaaagaagagatgttggttcagcagccttcaagatatttttgaaatacctcaagaagactgggtccaaaaacctttgtgctgttgaacttccttcttcggtaaaattaggatttgaagaagctggctgcaaacagatactacttgaaaacacattttcagagaaacagtttttttctgaagtgttttttccaaatattcaagaaattgaagcagaacttagagatcctttaatgatctttgttctaaatgaaaaagttgatgagttctcgggagttcttcgtgttactccatgtattccttgttccttggaggggcatcctttggttttgccatcaagattgatccaccccgaaggacgagttgcaaagttatttgatattaaagatgggagattcccttatggttctactcaggattatctcaatcctattattttgattaaactagttcagttaggtatggcaaaagatgatattttatgggatgatatgctagaacgtgcagtgtcagtagctgaaattaataaaagtgatcatgttgctgcatgcctaagaagtagtatcttattgagtcttatcgatgagaaactaaaaataagggatcctagagcaaaggattttgctgcaaaatatcaaacaatccgcttccttccatttctgacaaaaccagcaggtttttctttggactggaaaggcaacagttttaagcctgaaaccatgtttgcagcaactgacctttatacagctgaacatcaagatatagtttgtcttttgcaaccaattctaaatgaaaattcccattcttttagaggttgtggttcagtgtcattggctgttaaagagtttttgggattactcaagaagccaacagttgatctggttataaaccaattgaaagaagtagcaaaatcagttgatgatggaattacactgtaccaggagaatatcaccaatgcttgctacaaataccttcatgaagccttgatgcaaaatgaaatcactaagatgtcaattattgataagttaaaaccctttagcttcattctagttgagaatgcatatgttgactcagaaaaggtttcttttcatttaaattttgaggcggcaccatacctttatcagttgcctaataagtataaaaataatttccgcgaactttttgaaaccgtgggtgtgaggcagtcatgcactgttgaagattttgctcttgttttggaatctattgatcaagaaagaggaacaaagcaaataacagaagagaattttcagctttgccgacgaataatcagtgaaggaatatggagtctcattagag

SEQ ID NO: 8237 - protein, 2289 aa, Homo sapiens
MAPYQGPALYVYNNAVFTPEDWHGIQEIARSRKKDDPLKVGRFGIGFNSVYHITDVPCIFSGDQIGMLDPHQTLFGPHESGQCWNLKDDSKEISELSDQFAPFVGIFGSTKETFINGNFPGTFFRFPLRLQPSQLSSNLYNKQKVLELFESFRADADTVLLFLKSVQDVSLYVREADGTEKLVFRVTSSESKALKHERPNSIKILGTAISNYCKKTPSNNITCVTYHVNIVLEEESTKDAQKTSWLVCNSVGGRGISSKLDSLADELKFVPIIGIAMPLSSRDDEAKGATSDFSGKAFCFLPLPPGEESSTGLPVHISGFFGLTDNRRSIKWRELDQWRDPAALWNEFLVMNVVPKAYATLILDSIKRLEMEKSSDFPLSVDVIYKLWPEASKVKVHWQPVLEPLFSELLQNAVIYSISCDWVRLEQVYFSELDENLEYTKTVLNYLQSSGKQIAKVPGNVDAAVQLTAASGTTPVRKVTPAWVRQVLRKCAHLGCAEEKLHLLEFVLSDQAYSELLGLELLPLQNGNFVPFSSSVSDQDVIYITSAEYPRSLFPSLEGRFILDNLKPHLVAALKEAAQTRGRPCTQLQLLNPERFARLIKEVMNTFWPGRELIVQWYPFDENRNHPSVSWLKMVWKNLYIHFSEDLTLFDEMPLIPRTILEEGQTCVELIRLRIPSLVILDDESEAQLPEFLADIVQKLGGFVLKKLDASIQHPLIKKYIHSPLPSAVLQIMEKMPLQKLCNQITSLLPTHKDALRKFLASLTDSSEKEKRIIQELAIFKRINHSSDQGISSYTKLKGCKVLHHTAKLPADLRLSISVIDSSDEATIRLANMLKIEQLKTTSCLKLVLKDIENAFYSHEEVTQLMLWVLENLSSLKNENPNVLEWLTPLKFIQISQEQMVSAGELFDPDIEVLKDLFCNEEGTYFPPSVFTSPDILHSLRQIGLKNEASLKEKDVVQVAKKIEALQVGACPDQDVLLKKAKTLLLVLNKNHTLLQSSEGKMTLKKIKWVPACKERPPNYPGSLVWKGDLCNLCAPPDMCDVGHAILIGSSLPLVESIHVNLEKALGIFTKPSLSAVLKHFKIVVDWYSSKTFSDEDYYQFQHILLEIYGFMHDHLNEGKDSFRALKFPWVWTGKKFCPLAQAVIKPIHDLDLQPYLHNVPKTMAKFHQLFKVCGSIEELTSDHISMVIQKIYLKSDQDLSEQESKQNLHLMLNIIRWLYSNQIPASPNTPVPIHHSKNPSKLIMKPIHECCYCDIKVDDLNDLLEDSVEPIILVHEDIPMKTAEWLKVPCLSTRLINPENMGFEQSGQREPLTVRIKNILEEYPSVSDIFKELLQNADDANATECSFLIDMRRNMDIRENLLDPGMAACHGPALWSFNNSQFSDSDFVNITRLGESLKRGEVDKVGKFGLGFNSVYHITDIPIIMSREFMIMFDPNINHISKHIKDKSNPGIKINWSKQQKRLRKFPNQFKPFIDVFGCQLPLTVEAPYSYNGTLFRLSFRTQQEAKVSEVSSTCYNTADIYSLVDEFSLCGHRLIIFTQSVKSMYLKYLKIEETNPSLAQDTVIIKKKSCSSKALNTPVLSVLKEAAKLMKTCSSSNKKLPSDEPKSSCILQITVEEFHHVFRRIADLQSPLFRGPDDDPAALFEMAKSGQSKKPSDELSQKTVECTTWLLCTCMDTGEALKFSLSESGRRLGLVPCGAVGVQLSEIQDQKWTVKPHIGEVFCYLPLRIKTGLPVHINGCFAVTSNRKEIWKTDTKGRWNTTFMRHVIVKAYLQVLSVLRDLATSGELMDYTYYAVWPDPDLVHDDFSVICQGFYEDIAHGKGKELTKVFSDGSTWVSMKNVRFLDDSILKRRDVGSAAFKIFLKYLKKTGSKNLCAVELPSSVKLGFEEAGCKQILLENTFSEKQFFSEVFFPNIQEIEAELRDPLMIFVLNEKVDEFSGVLRVTPCIPCSLEGHPLVLPSRLIHPEGRVAKLFDIKDGRFPYGSTQDYLNPIILIKLVQLGMAKDDILWDDMLERAVSVAEINKSDHVAACLRSSILLSLIDEKLKIRDPRAKDFAAKYQTIRFLPFLTKPAGFSLDWKGNSFKPETMFAATDLYTAEHQDIVCLLQPILNENSHSFRGCGSVSLAVKEFLGLLKKPTVDLVINQLKEVAKSVDDGITLYQENITNACYKYLHEALMQNEITKMSIIDKLKPFSFILVENAYVDSEKVSFHLNFEAAPYLYQLPNKYKNNFRELFETVGVRQSCTVEDFALVLESIDQERGTKQITEENFQLCRRIISEGIWSLI

SEQ ID NO: 8238 - DNA, 1188 bp, Homo sapiens
tttaaaggaagctgcccaaacccgagcacaacaacaactctggggatattcaggaagaccatgtactcagctgcagcttctaaatccagaacgatttgcacgtcttatcaaggaagtaatgaatacattctggcctggcagagaattgattgttcaatggtatccatttgatgaaaacagaaatcacccatctgtttcatggcttaagatggtttggaaaaatctttatatacatttttcagaggatttgactttatttgatgagatgccacttatccccagaactatactagaggaaggtcagacatgtgtggaactcattagactcaggattccatcgttagtcattttagacgatgaatctgaagcacagcttccagaatttttagcagacattgtacaaaaacttggagggtttgtccttaaaaaattagatgcatctatacaacatccgcttattaaaaaatatattcattcaccattaccaagtgctgttttgcagataatggagaagatgccattgcagaaattgtgtaatcaaataacttcgctacttccaacacacaaagatgccctgaggaagttcttggctagtttaaccgatagcagtgagaaagagaaaagaattattcaagaattggcaatattcaagcgcattaaccattcttctgatcagggaatttcctcttatacaaaattgaaaggttgtaaagtcttacaccatactgccaaactcccagcagatctgcgactttctatttcagtaatagacagtagtgatgaagctactattcgtctggcaaacatgttgaaaatagaacagttaaagaccactagctgcttaaagcttgttttaaaagatattgaaaatgcattttattcacatgaagaggtaacacagcttatgttatgggtccttgagaatctatcttctcttaaaaatgagaatccaaatgtgcttgagtggttaacaccattaaaattcatccagatatcacaggaacagatggtatcagctggtgaactctttgaccctgatatagaagtactaaaggatctcttttgtaatgaagaaggaacctatttcccaccctcagtttttacctcaccagatattcttcactccttaagacagattggtttaaaaaacgaagccagtctcaaagaaaaggatgttgtgcaagtggc

SEQ ID NO: 8239 - protein, 355 aa, Homo sapiens
MNTFWPGRELIVQWYPFDENRNHPSVSWLKMVWKNLYIHFSEDLTLFDEMPLIPRTILEEGQTCVELIRLRIPSLVILDDESEAQLPEFLADIVQKLGGFVLKKLDASIQHPLIKKYIHSPLPSAVLQIMEKMPLQKLCNQITSLLPTHKDALRKFLASLTDSSEKEKRIIQELAIFKRINHSSDQGISSYTKLKGCKVLHHTAKLPADLRLSISVIDSSDEATIRLANMLKIEQLKTTSCLKLVLKDIENAFYSHEEVTQLMLWVLENLSSLKNENPNVLEWLTPLKFIQISQEQMVSAGELFDPDIEVLKDLFCNEEGTYFPPSVFTSPDILHSLRQIGLKNEASLKEKDVVQ

SEQ ID NO: 8240 - DNA, 789 bp, Homo sapiens
ggagagagctggaccagtggagagacccggcagccttatggaatgagtttcttgtcatgaatgttgtccccaaagcttatgctactctgatcttagattcaataaaacgtctggagatggaaaagagctctgatttccccttgtcagttgatgttatctataagctttggccggaggcgagcaaagtcaaggtgcactggcaaccggtgttagagcctctattcagcgagctgttgcagaatgcagtgatttattcaattagctgtgactgggtcaggttggagcaggtgtacttctcagaacttgatgaaaatttagaatacacaaaaactgtgctcaactacctccagagctcagggaagcagattgccaaggtaccagggaatgtggatgctgctgttcagctcacagctgcctctggcacaacacctgtgaggaaggtgacgcccgcgtgggtgcggcaggtgctgcggaagtgtgcacacctgggctgtgctgaagaaaagcttcaccttctagaatttgtgctttctgaccaagcctacagtgagctgcttgggctggagctgctccctttacaaaatggcaattttgtccccttctcctcatctgtatcagaccaagatgtcatttatattacctcagcagaatatccaaggtcccttttcccaagtcttgaaggaagatttattttggataacttgaaacctcaccttgtggctgctttaaaggaagctgcccaaacccgaggtattatagtttagtattcttttaaataaacttctatat

SEQ ID NO: 8241 - protein, 235 aa, Homo sapiens
MNVVPKAYATLILDSIKRLEMEKSSDFPLSVDVIYKLWPEASKVKVHWQPVLEPLFSELLQNAVIYSISCDWVRLEQVYFSELDENLEYTKTVLNYLQSSGKQIAKVPGNVDAAVQLTAASGTTPVRKVTPAWVRQVLRKCAHLGCAEEKLHLLEFVLSDQAYSELLGLELLPLQNGNFVPFSSSVSDQDVIYITSAEYPRSLFPSLEGRFILDNLKPHLVAALKEAAQTRGIIV

SEQ ID NO: 8242 - DNA, 289 bp, Homo sapiens
gtaaaccttcaatcaaaaggcttaaaagggggaggtcgatttggtcagacaacgccaccacttgttgattttctcaaggacattttgagaagatatccagaaggaggacagattcttaaggaattaattcagaatgcagaagatgctggggcgacagaagttaaatttttatatgatgaaactcaatacggaacagagactctttggtcaaaagatatggcgccatatcaggatgttccttgtatctttagtggtgaccaaatcgggatgctagatcctcatcaaacac

SEQ ID NO: 8243 - protein, 46 aa, Homo sapiens
MQKMLGRQKLNFYMMKLNTEQRLFGQKIWRHIRMFLVSLVVTKSGC

SEQ ID NO: 8244 - DNA, 1762 bp, Homo sapiens
aagtgcgggatctggatggctgctttgggtgcttccaggagcaggctgcgtgcaggcctggcagcagtgcccaggttggggtgcctgcaacccctgaagctccagagggcatgttacagtgttcttttagctctgccgtctgtggacagtggctgaaatgcagtggcatgatcttagctcactacaacctctgcctcctgggttcaagagattctcacgtctcagccacctaagtacatgggattacagtatgaaaacgtcacactatctttgctcagatctgtgccagaatcaacttttaatgctatatttaatagagaaaatgatgaggaagtttctgcaaagaaggaatgacagaattagaatataacaattttgcaatgcctaatgaattactggatctaggcaacattcatcaatggctgctaatattatagaaagaaagaaaaccagacattatatatctcatgctagaagtgcacaagaccacttaaatagtcttcccctccaccaaaatccaacctgagtctgatcataccttgaaatcaatctaccatgttgagaaaatactcaagggaaggccaggagtggagattcacacctgtaatcccagcactttgggaggccaaggtgggtggatggattacttgaggtcaggagctcaagaacagcctggccaacatcacgaaaccccagtctctaataaaaatacaaaaattaggtgggcctggtggtgtgcgcctgtagtcccagctacttgggaggctgaggcacaagaatcacttgaacctaggaggcaaaggttgcagtgagtcaagctcgcactactgcactccagcctgggcgacagagtgagagactctgtctcaaaaaaaagaaaaaaaaaaaaaaggccgggtgtggtggctcacacctgtaatcccagcactttgggaggccatggcaggcggatcacctgaggtcaggagtttgagaccagcctggcaacatggtgaaaccccgtctctcctaaaaatacaaaaattagctgggcatggtggcgcatgcctgtagtcccagcttctcaggaggctgaggaaggagaagtgcttgaacccaggaggtggaggttgcagtgagctgagattgtgccctccagcctggcaacagagtgagactccatctcaaaaaaacaaaaaacaaaaaacaagggaagaagtaacatcatacatgagaccttggagatgcaatcagaaaactctagaatgtagaaaactgtatagcagggccgggtgcggtggctcacgcctgtaagcccagcactttggcaggccgaggcaggcggatcatgaggtcaagagatcgagagcatcctggccaacatggtgaaaccccgtctctactaaaaatacaaaaattagctgggcgtggtggcaagtgcctgtagtcccagctactcaggaggctgaggcaggagaatcgcttgaatctgggaggtggaggttgcagtgagccaagatcatgccactgcactgcagcctggcaacagagcgagactccgtctcaaaaaaaaaaaaaacacacacaacaacaactgtataggacaagtaaattagtttttcatcaacaacaatgatggagagtggtgtatgaatcagagagagaggaggagagagaaggggaacagagggaaggcaaggagaaaggagaggagaggactaagagacatcaaaaccaaccacaatgtatggaccttatttggcttccaatctaaacacactgt

SEQ ID NO: 8245 - protein, 70 aa, Homo sapiens
MQWHDLSSLQPLPPGFKRFSRLSHLSTWDYSMKTSHYLCSDLCQNQLLMLYLIEKMMRKFLQRRNDRIRI

SEQ ID NO: 8246 - DNA, 321 bp, Homo sapiens
gccactgtgacagccttttttgggtacccacattcagtggatcccaagctcttgtgtggcatctaagatgaatgagatagcccagacacttgaaggatggtgaaggtggagaattgtgttaggcaatgggaaatgcctctcagcaaagaggggagccggagaggggacaggacagcaatacctaatgagcaattaaagtgacttactgagagtgaaggcttcttgcaggtcacagcagccatatgtcacatcagacataaggcactgaacagaagcaattcaacggaatcatgtcatccatcaggcaaaatacatgcagag

SEQ ID NO: 8247 - protein, 34 aa, Homo sapiens
MVKVENCVRQWEMPLSKEGSRRGDRTAIPNEQLK

SEQ ID NO: 8248 - DNA, 1329 bp, Homo sapiens
gcagtgcgcaggcgcagtcccggctcctggcggcgtgttcctcttttcctcggttcccagtgttctggcaggtaaggaacgccggctcttcgcctctcagcgcggcttgtcctttgttccggacgcccgctcctcagccctgcggctcctggggtcgctgctgcatcccgcacgcctccaccggctgcagacccatggccgagcgcggggaactcgacttgaccggcgccaaacagaacacaggagtgtggctagtcaaggttcctaaatatttgtcacagcaatgggctaaagcctctggaagaggtgaagttgggaaactgcggattgccaagactcaaggaaggactgaggtgtcatttactttgaatgaggatcttgcaaatattcatgatattggtggaaaaccagcttcagtcagtgctcctagagaacatccatttgtcttgcaaagtgttggaggacagacattaacagtatttactgagagctcatcagataagctgtcattggaaggaatagtggtacaaagagctgaatgccgaccagctgccagtgaaaactacatgcgattaaaaagattgcaaatagaagagtcttccaaaccagtgaggctatcacaacagctggacaaagttgtaacaaccaattacaaacctgttgctaatcatcaatacaatatcgaatatgaaaggaaaaagaaagaagacggaaagcgagctcgagctgataaacaacatgttttagacatgctattttcagcctttgagaaacatcaatactataatcttaaggacttggtggacatcacaaagcaacctgtggtgtacctgaaggaaatcttaaaagaaattggtgttcagaatgtaaaagggatccacaaaaacacatgggagctgaagccagagtacagacactatcaaggagaagaaaagagtgactaagaagactcctagccagcatgctagtgaaacgactagcagcgatgctatgcaaaaggcgctgatactggaaggcttgaacaccgtatgttaataggggttaagtgacagtactttgatttctctcggtaaattttttaaacctgtaattcttgtaaagtttcttaactgtttttttgaggagaaagaacagatttatttatagacttaacttgtattaaaccagattattcacagtaggaataggggttggaggattaagagggtttttcttaaatattagcttttaatgtgtacaattaggaaatttttttaagtgaggactctctacccttgccgtatctaaggagctgaggtaatacagatccaaggagaattgtatagcaag

SEQ ID NO: 8249 - protein, 249 aa, Homo sapiens; identical to SEQ ID NO: 940

SEQ ID NO: 8250 - DNA, 1402 bp, Homo sapiens
gcagtgcgcaggcgcagtcccggctcctggcggcgtgttcctcttttcctcggttcccagtgttctggcaggtaaggaacgccggctcttcgcctctcagcgcggcttgtcctttgttccggacgcccgctcctcagccctgcggctcctggggtcgctgctgcatcccgcacgcctccaccggctgcagacccatggccgagcgcggggaactcgacttgaccggcgccaaacagaacacaggagtgtggctagtcaaggttcctaaatatttgtcacagcaatgggctaaagcctctggaagaggtgaagttgggaaactgcggattgccaagactcaaggaaggactgaggtgtcatttactttgaatgaggatcttgcaaatattcatgatattggtggaaaaccagcttcagtcagtgctcctagagaacatccatttgtcttgcaaagtgttggaggacagacattaacagtatttactgagagctcatcagataagctgtcattggaaggaatagtggtacaaagagctgaatgccgaccagctgccagtgaaaactacatgcgattaaaaagattgcaaatagaagagtcttccaaaccagtgaggctatcacaacagctggacaaagttgtaacaaccaattacaaacctgttgctaatcatcaatacaatatcgaatatgaaaggaaaaagaaagaagacggaaagcgagctcgagctgataaacaacatgttttagacatgctattttcagcctttgagaaacatcaatactataatcttaaggacttggtggacatcacaaagcaacctgtggtgtacctgaaggaaatcttaaaagaaattggtgttcagaatgtaaaagggatccacaaaaacacatgggagctgaagccagagtacagacactatcaaggagaagaaaagagtgactaagaagactcctagccagcatgctagtgaaacgactagcagcgatgctatgcaaaaggcgctgatactggaaggcttgaacaccgtatgttaataggggttaagtgacagtactttgatttctctcggtaaattttttaaacctgtaattcttgtaaagtttcttaactgtttttttgaggagaaagaacagatttatttatagacttaacttgtattaaaccagattattcacagtaggaataggggttggaggattaagagggtttttcttaaatattagcttttaatgtgtacaattaggaaatttttttaagtgaggactctctacccttgccgtatctaaggagctgaggtaatacagatccaaggagaattgtatagcaagaaaaaaacagtcaactacagaaactcttaaaaggaataaaaacccaaagttccttattttgaaattgtcaaag

SEQ ID NO: 8251 - protein, 249 aa, Homo sapiens; identical to SEQ ID NO: 940

SEQ ID NO: 8252 - DNA, 1485 bp, Homo sapiens
gcagtgcgcaggcgcagtcccggctcctggcggcgtgttcctcttttcctcggttcccagtgttctggcaggtaaggaacgccggctcttcgcctctcagcgcggcttgtcctttgttccggacgcccgctcctcagccctgcggctcctggggtcgctgctgcatcccgcacgcctccaccggctgcagacccatggccgagcgcggggaactcgacttgaccggcgccaaacagaacacaggagtgtggctagtcaaggttcctaaatatttgtcacagcaatgggctaaagcctctggaagaggtgaagttgggaaactgcggattgccaagactcaaggaaggactgaggtgtcatttactttgaatgaggatcttgcaaatattcatgatattggtggaaaaccagcttcagtcagtgctcctagagaacatccatttgtcttgcaaagtgttggaggacagacattaacagtatttactgagagctcatcagataagctgtcattggaaggaatagtggtacaaagagctgaatgccgaccagctgccagtgaaaactacatgcgattaaaaagattgcaaatagaagagtcttccaaaccagtgaggctatcacaacagctggacaaagttgtaacaaccaattacaaacctgttgctaatcatcaatacaatatcgaatatgaaaggaaaaagaaagaagacggaaagcgagctcgagctgataaacaacatgttttagacatgctattttcagcctttgagaaacatcaatactataatcttaaggacttggtggacatcacaaagcaacctgtggtgtacctgaaggaaatcttaaaagaaattggtgttcagaatgtaaaagggatccacaaaaacacatgggagctgaagccagagtacagacactatcaaggagaagaaaagagtgactaagaagactcctagccagcatgctagtgaaacgactagcagcgatgctatgcaaaaggcgctgatactggaaggcttgaacaccgtatgttaataggggttaagtgacagtactttgatttctctcggtaaattttttaaacctgtaattcttgtaaagtttcttaactgtttttttgaggagaaagaacagatttatttatagacttaacttgtattaaaccagattattcacagtaggaataggggttggaggattaagagggtttttcttaaatattagcttttaatgtgtacaattaggaaatttttttaagtgaggactctctacccttgccgtatctaaggagctgaggtaatacagatccaaggagaattgtatagcaagaaaaaaacagtcaactacagaaactcttaaaaggaataaaaacccaaagttccttattttgaaattgtcaaagaacaaagcggtgtttttcttttaaacaggtgatcacgtttcgtgttcatactcaacgttaataaaaggagagagtttgtagtg

SEQ ID NO: 8253 - protein, 249 aa, Homo sapiens; identical to SEQ ID NO: 940

SEQ ID NO: 8254 - DNA, 2291 bp, Homo sapiens
gcagtgcgcaggcgcagtcccggctcctggcggcgtgttcctcttttcctcggttcccagtgttctggcaggtaaggaacgccggctcttcgcctctcagcgcggcttgtcctttgttccggacgcccgctcctcagccctgcggctcctggggtcgctgctgcatcccgcacgcctccaccggctgcagacccatggccgagcgcggggaactcgacttgaccggcgccaaacagaacacaggagtgtggctagtcaaggttcctaaatatttgtcacagcaatgggctaaagcctctggaagaggtgaagttgggaaactgcggattgccaagactcaaggaaggactgaggtgtcatttactttgaatgaggatcttgcaaatattcatgatattggtggaaaaccagcttcagtcagtgctcctagagaacatccatttgtcttgcaaagtgttggaggacagacattaacagtatttactgagagctcatcagataagctgtcattggaaggaatagtggtacaaagagctgaatgccgaccagctgccagtgaaaactacatgcgattaaaaagattgcaaatagaagagtcttccaaaccagtgaggctatcacaacagctggacaaagttgtaacaaccaattacaaacctgttgctaatcatcaatacaatatcgaatatgaaaggaaaaagaaagaagacggaaagcgagctcgagctgataaacaacatgttttagacatgctattttcagcctttgagaaacatcaatactataatcttaaggacttggtggacatcacaaagcaacctgtggtgtacctgaaggaaatcttaaaagaaattggtgttcagaatgtaaaagggatccacaaaaacacatgggagctgaagccagagtacagacactatcaaggagaagaaaagagtgactaagaagactcctagccagcatgctagtgaaacgactagcagcgatgctatgcaaaaggcgctgatactggaaggcttgaacaccgtatgttaataggggttaagtgacagtactttgatttctctcggtaaattttttaaacctgtaattcttgtaaagtttcttaactgtttttttgaggagaaagaacagatttatttatagacttaacttgtattaaaccagattattcacagtaggaataggggttggaggattaagagggtttttcttaaatattagcttttaatgtgtacaattaggaaatttttttaagtgaggactctctacccttgccgtatctaaggagctgaggtaatacagatccaaggagaattgtatagcaagaaaaaaacagtcaactacagaaactcttaaaaggaataaaaacccaaagttccttattttgaaattgtcaaagaacaaagcggtgtttttcttttaaacaggtgatcacgtttcgtgttcatactcaacgttaataaaaggagagagtttgtagtgaaatggcagtgttcatcattggcttattttaccgtagtgatgctgagatgagaaatgtgcaggatcatggtcagttgatgtttcttttatttgcttttaagataattagaaattaaatatctttccaaaatttgaagatatgtctcccccagtcagattataagcttctcaaaactggcttgcccccagaattttactgcttacccagcagacatgtattgaccatcacatggcaaatgatatcagcaaatcaaaagatgggcgtaggggtccagccgagacagaaaacgttagtttcaattcctggggcattaaaatgttgcttttctctttctctttaattaatttttaaatgaaaacaatacatgtatatgttagttttttctagcacaacacaatattatatattaagcgatccaaaatcatactgtcaagaccatcaaacaaaacaaagaagcttaagtgaactaagcacagggaaaagttgttttttcactcgttcattttgtcatctgcttctagatgctgcaatcaagaagtagcaaatgcccaagttgccatagtgtttgcaggaaaaaaagagaaaaaataataaaaataaggaaggagcaatgccaaaaattgaagaaaatattatataattaaagcaagaagatatctatccattgagaaaaacaatttttatattatttgcttttagcagcaaagcattagaattctgagattgttatagcactaagaagatttttattctgtgtacacactgaaaaataaaattctgagtaaagaaagtgttcccattcccc

SEQ ID NO: 8255 - protein, 249 aa, Homo sapiens; identical to SEQ ID NO: 940

SEQ ID NO: 8256 - DNA, 622 bp, Homo sapiens
agtgcgcaggcgcagtcccggctcctggcggcgtgttcctcttttcctcggttcccagtgttctggcaggtaaggaacgccggctcttcgcctctcagcgcggcttgtcctttgttccggacgcccgctcctcagccctgcggctcctggggtcgctgctgcatcccgcacgcctccaccggctgcagacccatggccgagcgcggggaactcgacttgaccggcgccaaacagaacacaggagtgtggctagtcaaggttcctaaatatttgtcacagcaatgggctaaagcctctggaagaggtgaagttgggaaactgcggattgccaagactcaaggaaggactgaggtgtcatttactttgaatgaggatcttgcaaatattcatgatattggtggaaaaccagcttcagtcagtgctcctagagaacatccatttgtcttgcaaagtgttggaggacagacattaacagtatttactgagagctcatcagataagctgtcattggaaggaatagtggtacaaagagctgaatgccgaccagctgccagtgaaaactacatgcgattaaaaaggctcctacttaccgtctgaactttttgcctccgaccttatcttg

SEQ ID NO: 8257 - protein, 134 aa, Homo sapiens [sequence omitted]

SEQ ID NO: 8258 - DNA, 1374 bp, Homo sapiens
gcagtcccggctcctggcggcgtgttcctcttttcctcggttcccagtgttctggcaggttcctaaatatttgtcacagcaatgggctaaagcctctggaagaggtgaagttgggaaactgcggattgccaagactcaaggaaggactgaggtgtcatttactttgaatgaggatcttgcaaatattcatgatattggtggaaaaccagcttcagtcagtgctcctagagaacatccatttgtcttgcaaagtgttggaggacagacattaacagtatttactgagagctcatcagataagctgtcattggaaggaatagtggtacaaagagctgaatgccgaccagctgccagtgaaaactacatgcgattaaaaagattgcaaatagaagagtcttccaaaccagtgaggctatcacaacagctggacaaagttgtaacaaccaattacaaacctgttgctaatcatcaatacaatatcgaatatgaaaggaaaaagaaagaagacggaaagcgagctcgagctgataaacaacatgttttagacatgctattttcagcctttgagaaacatcaatactataatcttaaggacttggtggacatcacaaagcaacctgtgaatacctgaagctgggcaatttttaaagcaaaataatttgtttcttaaaattttggaggctgagaagtccaggatcaaagggccacgtctggtgtacctgaaggaaatcttaaaagaaattggtgttcagaatgtaaaagggatccacaaaaacacatgggagctgaagccagagtacagacactatcaaggagaagaaaagagtgactaagaagactcctagccagcatgctagtgaaacgactagcagcgatgctatgcaaaaggcgctgatactggaaggcttgaacaccgtatgttaataggggttaagtgacagtactttgatttctctcggtaaattttttaaacctgtaattcttgtaaagtttcttaactgtttttttgaggagaaagaacagatttatttatagacttaacttgtattaaaccagattattcacagtaggaataggggttggaggattaagagggtttttcttaaatattagcttttaatgtgtacaattaggaaatttttttaagtgaggactctctacccttgccgtatctaaggagctgaggtaatacagatccaaggagaattgtatagcaagaaaaaaacagtcaactacagaaactcttaaaaggaataaaaacccaaagttccttattttgaaattgtcaaagaacaaagcggtgtttttcttttaaacaggtgatcacgtttcgtgttcatactcaacgttaataaaaggagagagtttgtagtg

SEQ ID NO: 8259 - protein, 88 aa, Homo sapiens
MRLKRLQIEESSKPVRLSQQLDKVVTTNYKPVANHQYNIEYERKKKEDGKRARADKQHVLDMLFSAFEKHQYYNLKDLVDITKQPVNT

SEQ ID NO: 8260 - DNA, 2180 bp, Homo sapiens
gcagtcccggctcctggcggcgtgttcctcttttcctcggttcccagtgttctggcaggttcctaaatatttgtcacagcaatgggctaaagcctctggaagaggtgaagttgggaaactgcggattgccaagactcaaggaaggactgaggtgtcatttactttgaatgaggatcttgcaaatattcatgatattggtggaaaaccagcttcagtcagtgctcctagagaacatccatttgtcttgcaaagtgttggaggacagacattaacagtatttactgagagctcatcagataagctgtcattggaaggaatagtggtacaaagagctgaatgccgaccagctgccagtgaaaactacatgcgattaaaaagattgcaaatagaagagtcttccaaaccagtgaggctatcacaacagctggacaaagttgtaacaaccaattacaaacctgttgctaatcatcaatacaatatcgaatatgaaaggaaaaagaaagaagacggaaagcgagctcgagctgataaacaacatgttttagacatgctattttcagcctttgagaaacatcaatactataatcttaaggacttggtggacatcacaaagcaacctgtgaatacctgaagctgggcaatttttaaagcaaaataatttgtttcttaaaattttggaggctgagaagtccaggatcaaagggccacgtctggtgtacctgaaggaaatcttaaaagaaattggtgttcagaatgtaaaagggatccacaaaaacacatgggagctgaagccagagtacagacactatcaaggagaagaaaagagtgactaagaagactcctagccagcatgctagtgaaacgactagcagcgatgctatgcaaaaggcgctgatactggaaggcttgaacaccgtatgttaataggggttaagtgacagtactttgatttctctcggtaaattttttaaacctgtaattcttgtaaagtttcttaactgtttttttgaggagaaagaacagatttatttatagacttaacttgtattaaaccagattattcacagtaggaataggggttggaggattaagagggtttttcttaaatattagcttttaatgtgtacaattaggaaatttttttaagtgaggactctctacccttgccgtatctaaggagctgaggtaatacagatccaaggagaattgtatagcaagaaaaaaacagtcaactacagaaactcttaaaaggaataaaaacccaaagttccttattttgaaattgtcaaagaacaaagcggtgtttttcttttaaacaggtgatcacgtttcgtgttcatactcaacgttaataaaaggagagagtttgtagtgaaatggcagtgttcatcattggcttattttaccgtagtgatgctgagatgagaaatgtgcaggatcatggtcagttgatgtttcttttatttgcttttaagataattagaaattaaatatctttccaaaatttgaagatatgtctcccccagtcagattataagcttctcaaaactggcttgcccccagaattttactgcttacccagcagacatgtattgaccatcacatggcaaatgatatcagcaaatcaaaagatgggcgtaggggtccagccgagacagaaaacgttagtttcaattcctggggcattaaaatgttgcttttctctttctctttaattaatttttaaatgaaaacaatacatgtatatgttagttttttctagcacaacacaatattatatattaagcgatccaaaatcatactgtcaagaccatcaaacaaaacaaagaagcttaagtgaactaagcacagggaaaagttgttttttcactcgttcattttgtcatctgcttctagatgctgcaatcaagaagtagcaaatgcccaagttgccatagtgtttgcaggaaaaaaagagaaaaaataataaaaataaggaaggagcaatgccaaaaattgaagaaaatattatataattaaagcaagaagatatctatccattgagaaaaacaatttttatattatttgcttttagcagcaaagcattagaattctgagattgttatagcactaagaagatttttattctgtgtacacactgaaaaataaaattctgagtaaagaaagtgttcccattcccc

SEQ ID NO: 8261 - protein, 88 aa, Homo sapiens; identical to SEQ ID NO: 8259

SEQ ID NO: 8262 - DNA, 1086 bp, Homo sapiens
gtgttcctcttttcctcggttcccagtgttctggcaggtaaggaacgccggctcttcgcctctcagcgcggcttgtcctttgttccggacgcccgctcctcagccctgcggctcctggggtcgctgctgcatcccgcacgcctccaccggctgcagacccatggccgagcgcggggaactcgacttgaccggcgccaaacagaacacaggagtgtggctagtcaaggttcctaaatatttgtcacagcaatgggctaaagcctctggaagaggtgaagttgggaaactgcggattgccaagactcaaggaaggactgaggtgtcatttactttgaatgaggatcttgcaaatattcatgatattggtggaaaaccagcttcagtcagtgctcctagagaacatccatttgtcttgcaaagtgttggaggacagacattaacagtatttactgagagctcatcagagtctttcttggtcacccaggctagggtacagtggcacgatcttggctcacagcaacctcttcctcccgggctcaagcagttgtcctgcctcagcctcctgagtaactgggattacaagtgtgcactaccaaccctggctaattattgtattttttttagaagagacaggatttcaccatgttggccaggctggtcttgaactcccgacaagtgatctgcccgcctcaacctcccaaagtgagcgactgcacctggcctcttattcttttggctcattcacatactttcccagaagagtgatttcttataatactgtaatacctgaaacttgtttctgtatggaaacaaccatagatgatttcttcgcaggaaagaggtagatagggtgtggctgttcccttgttggggaactgttagtttctgtagaagaggttttagccttttacttcattagtaatttttaacatgggtggcgttgattggtgaagtcttttttaactttattcccccccgccctttttttttgagacagggtcttgctctgtcacccaggctggagtgcagtggcatgatcctacctcactgcagcctcgaactcttgggctcaagcaatcttcccac

SEQ ID NO: 8263 - protein, 167 aa, Homo sapiens
MAERGELDLTGAKQNTGVWLVKVPKYLSQQWAKASGRGEVGKLRIAKTQGRTEVSFTLNEDLANIHDIGGKPASVSAPREHPFVLQSVGGQTLTVFTESSSESFLVTQARVQWHDLGSQQPLPPGLKQLSCLSLLSNWDYKCALPTLANYCIFFRRDRISPCWPGWS

SEQ ID NO: 8264 - DNA, 588 bp, Homo sapiens
gtgttcctcttttcctcggttcccagtgttctggcaggtaaggaacgccggctcttcgcctctcagcgcggcttgtcctttgttccggacgcccgctcctcagccctgcggctcctggggtcgctgctgcatcccgcacgcctccaccggctgcagacccatggccgagcgcggggaactcgacttgaccggcgccaaacagaacacaggagtgtggctagtcaaggttcctaaatatttgtcacagcaatgggctaaagcctctggaagaggtgaagttgggaaactgcggattgccaagactcaaggaaggactgaggtgtcatttactttgaatgaggatcttgcaaatattcatgatattggtggaaaaccagcttcagtcagtgctcctagagaacatccatttgtcttgcaaagtgttggaggacagacattaacagtatttactgagagctcatcagggggatccagaatgactgctggagttactactgtcatatctacctctcaggcatcaaaagggaagcaagacggggaagggtctcgctctgttgcccaggcaggaagtgcagtggcatagtcatg

SEQ ID NO: 8265 - protein, 140 aa, Homo sapiens
MAERGELDLTGAKQNTGVWLVKVPKYLSQQWAKASGRGEVGKLRIAKTQGRTEVSFTLNEDLANIHDIGGKPASVSAPREHPFVLQSVGGQTLTVFTESSSGGSRMTAGVTTVISTSQASKGKQDGEGSRSVAQAGSAVA

SEQ ID NO: 8266 - DNA, 1863 bp, Homo sapiens
gcaaaaccgagctgacagcgcaggcgatgctgccagcgtttccattccatcaccaggctggggctgaataaaggcgtgcttgtgtggtagtgtctctttttaaaaaatctcaaagccaagaagaacaagctgaaatagcatcttcaaaaaatggagcgtaaaataaacagaagagaaaaagaaaaggagtatgaagggaaacacaacagcctggaagatactgatcaaggaaagaactgcaaatccacactgatgaccctcaacgttggtggatatttatacattactcaaaaacaaacactgaccaagtacccagacactttccttgaaggtatagtaaatggaaaaatcctctgcccgtttgatgctgatggtcattatttcatagacagggatggtctcctcttcaggcatgtcctaaacttcctacgaaatggagaacttctattgcccgaagggtttcgagaaaatcaacttcttgcacaagaagcagaattctttcagctcaagggactggcagaggaagtgaaatccaggtgggagaaagaacagctaacacccagagagactactttcttggaaataacagataaccacgatcgttcacaaggattaagaatcttctgtaatgctcctgatttcatatcaaaaataaagtctcgcattgttctggtgtccaaaagcaggctggatggatttccagaggagttttcaatatcgtcaaatatcatccaatttaaatacttcataaagtctgaaaatggcactcgacttgtactaaaggaagacaacacctttgtctgtaccttggaaactcttaagtttgaggctatcatgatggctttaaagtgtggctttagactgctgaccagcctggattgttccaaagggtcaattgttcacagcgatgcacttcattttatcaagtaattacctgtgtcacgaacaaaggcaacaagcatgcagccagcaagcttcggaaaaccacagcatcaaagacatcccaaataacatgcccagctagctctgtactacagagccctgctactaatcaattactgtgagctaacggtatgtaaattctatcgctaaagatgtccttcctctggggtgttcctactgatcagactcttccacctaaaatgaaaacagtaaccttctatatactgtaaataaagactgaaagcttttgctatttatttgtccttaagctgtctttcaattcagattgtcttgggtatttgcacaaaaaagaaagcatgtacattatctatcgttcatttaagtaaatggtaataaaatattttaaggggctattaatatttaaaatccttttctactatggcaaaaatctacagagaaactgaactggcaaaattaactacctggagcaaaacagatgtgcagatctaactaaaacagagctatagtgaaacaaaatgagattgtaagaagacattaaagctattgatttgatttttccatagcaagcaccaaaagcttatattcacagttcctgtgtttcatattagacttatagctgaattggtattttgctgaaaattcctagaaaactgcttgatgacaataaaaagtaaataaaagcactgctaccttctttgattgtattaatgattataataaaaagttacaggtcactttaaaagcaaacagtaccacttgatgattttgcataaaattatgcattgatgtcaaccggcaggctacaggaaccctggctggtcctggaagtgacaaaaaccagcaaattcaattctttgcaggctgagttcccacaaagcatgggtaacttagtctcaatagagtatctgttattagaataataaaggagttcattttcag

SEQ ID NO: 8267 - protein, 259 aa, Homo sapiens; identical to SEQ ID NO: 942

SEQ ID NO: 8268 - DNA, 1872 bp, Homo sapiens
tttccacaagaccttctggatccagctgaatgtggaggcctttaagagaacttccagctcctgtaaaaacccagaccagaggactactgaccaacatttcaggctgatcctccagacctcgaagttactctccttactctcctgactcttaattacatcacacctgtgtcgacactctctgggaaaagactgaagaaataatcttttcaagaagcagaaagctcctgcatacataggctgatacgccacctactgcaaaaccgagctgacagcgcaggcgatgctgccagcgtttccattccatcaccaggctggggctgaataaaggcgtgcttgtgtggtagtgtctctttttaaaaaatctcaaagccaagaagaacaagctgaaatagcatcttcaaaaaatggagcgtaaaataaacagaagagaaaaagaaaaggagtatgaagggaaacacaacagcctggaagatactgatcaaggaaagaactgcaaatccacactgatgaccctcaacgttggtggatatttatacattactcaaaaacaaacactgaccaagtacccagacactttccttgaaggtatagtaaatggaaaaatcctctgcccgtttgatgctgatggtcattatttcatagacagggatggtctcctcttcaggcatgtcctaaacttcctacgaaatggagaacttctattgcccgaagggtttcgagaaaatcaacttcttgcacaagaagcagaattctttcagctcaagggactggcagaggaagtgaaatccaggtgggagaaagaacagctaacacccagagagactactttcttggaaataacagataaccacgatcgttcacaaggattaagaatcttctgtaatgctcctgatttcatatcaaaaataaagtctcgcattgttctggtgtccaaaagcaggctggatggatttccagaggagttttcaatatcgtcaaatatcatccaatttaaatacttcataaagtctgaaaatggcactcgacttgtactaaaggaagacaacacctttgtctgtaccttggaaactcttaagtttgaggctatcatgatggctttaaagtgtggctttagactgctgaccagcctggattgttccaaagggtcaattgttcacagcgatgcacttcattttatcaagtaattacctgtgtcacgaacaaaggcaacaagcatgcagccagcaagcttcggaaaaccacagcatcaaagacatcccaaataacatgcccagctagctctgtactacagagccctgctactaatcaattactgtgagctaacggtatgtaaattctatcgctaaagatgtccttcctctggggtgttcctactgatcagactcttccacctaaaatgaaaacagtaaccttctatatactgtaaataaagactgaaagcttttgctatttatttgtccttaagctgtctttcaattcagattgtcttgggtatttgcacaaaaaagaaagcatgtacattatctatcgttcatttaagtaaatggtaataaaatattttaaggggctattaatatttaaaatccttttctactatggcaaaaatctacagagaaactgaactggcaaaattaactacctggagcaaaacagatgtgcagatctaactaaaacagagctatagtgaaacaaaatgagattgtaagaagacattaaagctattgatttgatttttccatagcaagcaccaaaagcttatattcacagttcctgtgtttcatattagacttatagctgaattggtattttgctgaaaattcctagaaaactgcttgatgacaataaaaagtaaataaaagcactgctaccttc

SEQ ID NO: 8269 - protein, 259 aa, Homo sapiens; identical to SEQ ID NO: 942

SEQ ID NO: 8270 - DNA, 1117 bp, Homo sapiens
tataagaattactaaggataggggaaattgcctttctgtttggacaaatattcatagcagttaaagattctgttttgacatgcccagatttagaattctgcaggaaaacagaagtcagagcagctggcaggctgaactggtacacaatataacccagacagtagacctgcccagtgtcacagtattttctgggctggctgttttagtcacaagataagctgtcattggaaggaatagtggtacaaagagctgaatgccgaccagctgccagtgaaaactacatgcgattaaaaagattgcaaatagaagagtcttccaaaccagtgaggctatcacaacagctggacaaagttgtaacaaccaattacaaacctgttgctaatcatcaatacaatatcgaatatgaaaggaaaaagaaagaagacggaaagcgagctcgagctgataaacaacatgttttagacatgctattttcagcctttgagaaacatcaatactataatcttaaggacttggtggacatcacaaagcaacctgtggtgtacctgaaggaaatcttaaaagaaattggtgttcagaatgtaaaagggatccacaaaaacacatgggagctgaagccagagtacagacactatcaaggagaagaaaagagtgactaagaagactcctagccagcatgctagtgaaacgactagcagcgatgctatgcaaaaggcgctgatactggaaggcttgaacaccgtatgttaataggggttaagtgacagtactttgatttctctcggtaaattttttaaacctgtaattcttgtaaagtttcttaactgtttttttgaggagaaagaacagatttatttatagacttaacttgtattaaaccagattattcacagtaggaataggggttggaggattaagagggtttttcttaaatattagcttttaatgtgtacaattaggaaatttttttaagtgaggactctctacccttgccgtatctaaggagctgaggtaatacagatccaaggagaattgtatagcaagaaaaaaacagtcaactacagaaactcttaaaaggaataaaaacccaaagttccttattttgaaattgtcaaag

SEQ ID NO: 8271 - protein, 125 aa, Homo sapiens
MRLKRLQIEESSKPVRLSQQLDKVVTTNYKPVANHQYNIEYERKKKEDGKRARADKQHVLDMLFSAFEKHQYYNLKDLVDITKQPVVYLKEILKEIGVQNVKGIHKNTWELKPEYRHYQGEEKSD

SEQ ID NO: 8272 - DNA, 1200 bp, Homo sapiens
tataagaattactaaggataggggaaattgcctttctgtttggacaaatattcatagcagttaaagattctgttttgacatgcccagatttagaattctgcaggaaaacagaagtcagagcagctggcaggctgaactggtacacaatataacccagacagtagacctgcccagtgtcacagtattttctgggctggctgttttagtcacaagataagctgtcattggaaggaatagtggtacaaagagctgaatgccgaccagctgccagtgaaaactacatgcgattaaaaagattgcaaatagaagagtcttccaaaccagtgaggctatcacaacagctggacaaagttgtaacaaccaattacaaacctgttgctaatcatcaatacaatatcgaatatgaaaggaaaaagaaagaagacggaaagcgagctcgagctgataaacaacatgttttagacatgctattttcagcctttgagaaacatcaatactataatcttaaggacttggtggacatcacaaagcaacctgtggtgtacctgaaggaaatcttaaaagaaattggtgttcagaatgtaaaagggatccacaaaaacacatgggagctgaagccagagtacagacactatcaaggagaagaaaagagtgactaagaagactcctagccagcatgctagtgaaacgactagcagcgatgctatgcaaaaggcgctgatactggaaggcttgaacaccgtatgttaataggggttaagtgacagtactttgatttctctcggtaaattttttaaacctgtaattcttgtaaagtttcttaactgtttttttgaggagaaagaacagatttatttatagacttaacttgtattaaaccagattattcacagtaggaataggggttggaggattaagagggtttttcttaaatattagcttttaatgtgtacaattaggaaatttttttaagtgaggactctctacccttgccgtatctaaggagctgaggtaatacagatccaaggagaattgtatagcaagaaaaaaacagtcaactacagaaactcttaaaaggaataaaaacccaaagttccttattttgaaattgtcaaagaacaaagcggtgtttttcttttaaacaggtgatcacgtttcgtgttcatactcaacgttaataaaaggagagagtttgtagtg

SEQ ID NO: 8273 - protein, 125 aa, Homo sapiens; identical to SEQ ID NO: 8271

SEQ ID NO: 8274 - DNA, 2006 bp, Homo sapiens
tataagaattactaaggataggggaaattgcctttctgtttggacaaatattcatagcagttaaagattctgttttgacatgcccagatttagaattctgcaggaaaacagaagtcagagcagctggcaggctgaactggtacacaatataacccagacagtagacctgcccagtgtcacagtattttctgggctggctgttttagtcacaagataagctgtcattggaaggaatagtggtacaaagagctgaatgccgaccagctgccagtgaaaactacatgcgattaaaaagattgcaaatagaagagtcttccaaaccagtgaggctatcacaacagctggacaaagttgtaacaaccaattacaaacctgttgctaatcatcaatacaatatcgaatatgaaaggaaaaagaaagaagacggaaagcgagctcgagctgataaacaacatgttttagacatgctattttcagcctttgagaaacatcaatactataatcttaaggacttggtggacatcacaaagcaacctgtggtgtacctgaaggaaatcttaaaagaaattggtgttcagaatgtaaaagggatccacaaaaacacatgggagctgaagccagagtacagacactatcaaggagaagaaaagagtgactaagaagactcctagccagcatgctagtgaaacgactagcagcgatgctatgcaaaaggcgctgatactggaaggcttgaacaccgtatgttaataggggttaagtgacagtactttgatttctctcggtaaattttttaaacctgtaattcttgtaaagtttcttaactgtttttttgaggagaaagaacagatttatttatagacttaacttgtattaaaccagattattcacagtaggaataggggttggaggattaagagggtttttcttaaatattagcttttaatgtgtacaattaggaaatttttttaagtgaggactctctacccttgccgtatctaaggagctgaggtaatacagatccaaggagaattgtatagcaagaaaaaaacagtcaactacagaaactcttaaaaggaataaaaacccaaagttccttattttgaaattgtcaaagaacaaagcggtgtttttcttttaaacaggtgatcacgtttcgtgttcatactcaacgttaataaaaggagagagtttgtagtgaaatggcagtgttcatcattggcttattttaccgtagtgatgctgagatgagaaatgtgcaggatcatggtcagttgatgtttcttttatttgcttttaagataattagaaattaaatatctttccaaaatttgaagatatgtctcccccagtcagattataagcttctcaaaactggcttgcccccagaattttactgcttacccagcagacatgtattgaccatcacatggcaaatgatatcagcaaatcaaaagatgggcgtaggggtccagccgagacagaaaacgttagtttcaattcctggggcattaaaatgttgcttttctctttctctttaattaatttttaaatgaaaacaatacatgtatatgttagttttttctagcacaacacaatattatatattaagcgatccaaaatcatactgtcaagaccatcaaacaaaacaaagaagcttaagtgaactaagcacagggaaaagttgttttttcactcgttcattttgtcatctgcttctagatgctgcaatcaagaagtagcaaatgcccaagttgccatagtgtttgcaggaaaaaaagagaaaaaataataaaaataaggaaggagcaatgccaaaaattgaagaaaatattatataattaaagcaagaagatatctatccattgagaaaaacaatttttatattatttgcttttagcagcaaagcattagaattctgagattgttatagcactaagaagatttttattctgtgtacacactgaaaaataaaattctgagtaaagaaagtgttcccattcccc

SEQ ID NO: 8275 - protein, 125 aa, Homo sapiens; identical to SEQ ID NO: 8271

SEQ ID NO: 8276 - DNA, 1133 bp, Homo sapiens
attcgtaggaaaagagaaaggagcagctggtactgtctctctcctccctcttattgaatgaccttcaaagtcccacaacttaaaccaacattgttagtaccatggttccgttacattataaaataaatacaagattcatataagatgtaaaatggtctcattcttttagtttggaatttttatctaatttctgattttttaatttaaaagcgaactttgatagcatgattgaattgaatttcaaagctccatatttctgcaggagaggctcctacttaccgtctgaactttttgcctccgaccttatcttgattgcaaatagaagagtcttccaaaccagtgaggctatcacaacagctggacaaagttgtaacaaccaattacaaacctgttgctaatcatcaatacaatatcgaatatgaaaggaaaaagaaagaagacggaaagcgagctcgagctgataaacaacatgttttagacatgctattttcagcctttgagaaacatcaatactataatcttaaggacttggtggacatcacaaagcaacctgtggtgtacctgaaggaaatcttaaaagaaattggtgttcagaatgtaaaagggatccacaaaaacacatgggagctgaagccagagtacagacactatcaaggagaagaaaagagtgactaagaagactcctagccagcatgctagtgaaacgactagcagcgatgctatgcaaaaggcgctgatactggaaggcttgaacaccgtatgttaataggggttaagtgacagtactttgatttctctcggtaaattttttaaacctgtaattcttgtaaagtttcttaactgtttttttgaggagaaagaacagatttatttatagacttaacttgtattaaaccagattattcacagtaggaataggggttggaggattaagagggtttttcttaaatattagcttttaatgtgtacaattaggaaatttttttaagtgaggactctctacccttgccgtatctaaggagctgaggtaatacagatccaaggagaattgtatagcaagaaaaaaacagtcaactacagaaactcttaaaaggaataaaaacccaaagttccttattttgaaattgtcaaag

SEQ ID NO: 8277 - protein, 64 aa, Homo sapiens
MLFSAFEKHQYYNLKDLVDITKQPVVYLKEILKEIGVQNVKGIHKNTWELKPEYRHYQGEEKSD

SEQ ID NO: 8278 - DNA, 1216 bp, Homo sapiens
attcgtaggaaaagagaaaggagcagctggtactgtctctctcctccctcttattgaatgaccttcaaagtcccacaacttaaaccaacattgttagtaccatggttccgttacattataaaataaatacaagattcatataagatgtaaaatggtctcattcttttagtttggaatttttatctaatttctgattttttaatttaaaagcgaactttgatagcatgattgaattgaatttcaaagctccatatttctgcaggagaggctcctacttaccgtctgaactttttgcctccgaccttatcttgattgcaaatagaagagtcttccaaaccagtgaggctatcacaacagctggacaaagttgtaacaaccaattacaaacctgttgctaatcatcaatacaatatcgaatatgaaaggaaaaagaaagaagacggaaagcgagctcgagctgataaacaacatgttttagacatgctattttcagcctttgagaaacatcaatactataatcttaaggacttggtggacatcacaaagcaacctgtggtgtacctgaaggaaatcttaaaagaaattggtgttcagaatgtaaaagggatccacaaaaacacatgggagctgaagccagagtacagacactatcaaggagaagaaaagagtgactaagaagactcctagccagcatgctagtgaaacgactagcagcgatgctatgcaaaaggcgctgatactggaaggcttgaacaccgtatgttaataggggttaagtgacagtactttgatttctctcggtaaattttttaaacctgtaattcttgtaaagtttcttaactgtttttttgaggagaaagaacagatttatttatagacttaacttgtattaaaccagattattcacagtaggaataggggttggaggattaagagggtttttcttaaatattagcttttaatgtgtacaattaggaaatttttttaagtgaggactctctacccttgccgtatctaaggagctgaggtaatacagatccaaggagaattgtatagcaagaaaaaaacagtcaactacagaaactcttaaaaggaataaaaacccaaagttccttattttgaaattgtcaaagaacaaagcggtgtttttcttttaaacaggtgatcacgtttcgtgttcatactcaacgttaataaaaggagagagtttgtagtg

SEQ ID NO: 8279 - protein, 64 aa, Homo sapiens; identical to SEQ ID NO: 8277

SEQ ID NO: 8280 - DNA, 2022 bp, Homo sapiens
attcgtaggaaaagagaaaggagcagctggtactgtctctctcctccctcttattgaatgaccttcaaagtcccacaacttaaaccaacattgttagtaccatggttccgttacattataaaataaatacaagattcatataagatgtaaaatggtctcattcttttagtttggaatttttatctaatttctgattttttaatttaaaagcgaactttgatagcatgattgaattgaatttcaaagctccatatttctgcaggagaggctcctacttaccgtctgaactttttgcctccgaccttatcttgattgcaaatagaagagtcttccaaaccagtgaggctatcacaacagctggacaaagttgtaacaaccaattacaaacctgttgctaatcatcaatacaatatcgaatatgaaaggaaaaagaaagaagacggaaagcgagctcgagctgataaacaacatgttttagacatgctattttcagcctttgagaaacatcaatactataatcttaaggacttggtggacatcacaaagcaacctgtggtgtacctgaaggaaatcttaaaagaaattggtgttcagaatgtaaaagggatccacaaaaacacatgggagctgaagccagagtacagacactatcaaggagaagaaaagagtgactaagaagactcctagccagcatgctagtgaaacgactagcagcgatgctatgcaaaaggcgctgatactggaaggcttgaacaccgtatgttaataggggttaagtgacagtactttgatttctctcggtaaattttttaaacctgtaattcttgtaaagtttcttaactgtttttttgaggagaaagaacagatttatttatagacttaacttgtattaaaccagattattcacagtaggaataggggttggaggattaagagggtttttcttaaatattagcttttaatgtgtacaattaggaaatttttttaagtgaggactctctacccttgccgtatctaaggagctgaggtaatacagatccaaggagaattgtatagcaagaaaaaaacagtcaactacagaaactcttaaaaggaataaaaacccaaagttccttattttgaaattgtcaaagaacaaagcggtgtttttcttttaaacaggtgatcacgtttcgtgttcatactcaacgttaataaaaggagagagtttgtagtgaaatggcagtgttcatcattggcttattttaccgtagtgatgctgagatgagaaatgtgcaggatcatggtcagttgatgtttcttttatttgcttttaagataattagaaattaaatatctttccaaaatttgaagatatgtctcccccagtcagattataagcttctcaaaactggcttgcccccagaattttactgcttacccagcagacatgtattgaccatcacatggcaaatgatatcagcaaatcaaaagatgggcgtaggggtccagccgagacagaaaacgttagtttcaattcctggggcattaaaatgttgcttttctctttctctttaattaatttttaaatgaaaacaatacatgtatatgttagttttttctagcacaacacaatattatatattaagcgatccaaaatcatactgtcaagaccatcaaacaaaacaaagaagcttaagtgaactaagcacagggaaaagttgttttttcactcgttcattttgtcatctgcttctagatgctgcaatcaagaagtagcaaatgcccaagttgccatagtgtttgcaggaaaaaaagagaaaaaataataaaaataaggaaggagcaatgccaaaaattgaagaaaatattatataattaaagcaagaagatatctatccattgagaaaaacaatttttatattatttgcttttagcagcaaagcattagaattctgagattgttatagcactaagaagatttttattctgtgtacacactgaaaaataaaattctgagtaaagaaagtgttcccattcccc

SEQ ID NO: 8281 - protein, 64 aa, Homo sapiens; identical to SEQ ID NO: 8277

SEQ ID NO: 8282 - DNA, 581 bp, Homo sapiens
gaggagccctgaagtggcggtcaagcttgaggcgtcatctggctgcgcctagtgggccgttgccttacagttgctgagaggaggcgagaggcgggggcgctagggccgagatcatgtctgactgggagaggtttccttggcagcagaggacgctaggtttgggatgaaagaagctgggcagatgcaaaatctggagagcgcgagggccgggcggtcagtcagcacccagactggcagcatgaccggtcagataccaaggctttctaaagtcaaccttttcactctgctcagcctctggatggagctctttccagcagaagcccagcggcaaaaatctcagaaaaatgaagagggaaagcatggacccttaggagataatgaagagaggaccagagtatctactgacaaaagacaggtaaatttttatgatttcacatatatatgctcataataacaaagcaaaaggaatagtataaagtagaataaaagtgcctccatttctactatcaagggagtttttaaaatactcttctaaaaatggtctgtatatttacaagactatatgtcactcctttttttta

SEQ ID NO: 8283 - protein, 95 aa, Homo sapiens
MKEAGQMQNLESARAGRSVSTQTGSMTGQIPRLSKVNLFTLLSLWMELFPAEAQRQKSQKNEEGKHGPLGDNEERTRVSTDKRQVNFYDFTYICS

SEQ ID NO: 8284 - DNA, 852 bp, Homo sapiens
atctggctgcgcctagtgggccgttgccttacagttgctgagaggaggcgagaggcgggggcgctagggccgagatcatgtctgactgggagaggtttccttggcagcagaggacgctaggtttgggatgaaagaagctgggcagatgcaaaatctggagagcgcgagggccgggcggtcagtcagcacccagactggcagcatgaccggtcagataccaaggctttctaaagtcaaccttttcactctgctcagcctctggatggagctctttccagcagaagcccagcggcaaaaatctcagaaaaatgaagagggaaagcatggacccttaggagataatgaagagaggaccagagtatctactgacaaaagacaggtaaagagaactggtcttgtggtggtgaaaaacatgaaaattgttggtctccactgttctagtgaagatttacatgccgggcagattgctcttattaaacatgggtcaaggctgaaaaactgtgatctttatttttccagaaaaccatgttctgcttgtttgaaaatgattgtaaatgctggagttaaccgaatttcatactggcctgctgatccagaaataagtttgcttacggaggcttctagttctgaagatgcaaagttagatgccaaagcagtggaaagattgaagtcaaacagtcgggcccatgtgtgtgtcttacttcaacctttggtgtgttatatggtgcagtttgtagaggagacctcttacaaatgtgactttattcaaaaaattacaaaaacattgccggatgctaacactgacttttattatgaatgtaaacaagaaagaataaaagaatatgaaatgtt

SEQ ID NO: 8285 - protein, 240 aa, Homo sapiens
MKEAGQMQNLESARAGRSVSTQTGSMTGQIPRLSKVNLFTLLSLWMELFPAEAQRQKSQKNEEGKHGPLGDNEERTRVSTDKRQVKRTGLVVVKNMKIVGLHCSSEDLHAGQIALIKHGSRLKNCDLYFSRKPCSACLKMIVNAGVNRISYWPADPEISLLTEASSSEDAKLDAKAVERLKSNSRAHVCVLLQPLVCYMVQFVEETSYKCDFIQKITKTLPDANTDFYYECKQERIKEYE

SEQ ID NO: 8286 - DNA, 977 bp, Homo sapiens
atctggctgcgcctagtgggccgttgccttacagttgctgagaggaggcgagaggcgggggcgctagggccgagatcatgtctgactgggagaggtttccttggcagcagaggacgctaggtttgggatgaaagaagctgggcagatgcaaaatctggagagcgcgagggccgggcggtcagtcagcacccagactggcagcatgaccggtcagataccaaggctttctaaagtcaaccttttcactctgctcagcctctggatggagctctttccagcagaagcccagcggcaaaaatctcagaaaaatgaagagggaaagcatggacccttaggagataatgaagagaggaccagagtatctactgacaaaagacaggtaaagagaactggtcttgtggtggtgaaaaacatgaaaattgttggtctccactgttctagtgaagatttacatgccgggcagattgctcttattaaacatgggtcaaggctgaaaaactgtgatctttatttttccagaaaaccatgttctgcttgtttgaaaatgattgtaaatggattactggaagcagctaagatgcctagatgaaaggtttaccatcactgctggttaggaaatggattatgagaactcgaacagagggaaggtgaaatgcaaccggaggaaacactctgatatgagctggagttaaccgaatttcatactggcctgctgatccagaaataagtttgcttacggaggcttctagttctgaagatgcaaagttagatgccaaagcagtggaaagattgaagtcaaacagtcgggcccatgtgtgtgtcttacttcaacctttggtgtgttatatggtgcagtttgtagaggagacctcttacaaatgtgactttattcaaaaaattacaaaaacattgccggatgctaacactgacttttattatgaatgtaaacaagaaagaataaaagaatatgaaatgtt

SEQ ID NO: 8287 - protein, 153 aa, Homo sapiens
MKEAGQMQNLESARAGRSVSTQTGSMTGQIPRLSKVNLFTLLSLWMELFPAEAQRQKSQKNEEGKHGPLGDNEERTRVSTDKRQVKRTGLVVVKNMKIVGLHCSSEDLHAGQIALIKHGSRLKNCDLYFSRKPCSACLKMIVNGLLEAAKMPR

SEQ ID NO: 8288 - DNA, 3401 bp, Homo sapiens
atctggctgcgcctagtgggccgttgccttacagttgctgagaggaggcgagaggcgggggcgctagggccgagatcatgtctgactgggagaggtttccttggcagcagaggacgctaggtttgggatgaaagaagctgggcagatgcaaaatctggagagcgcgagggccgggcggtcagtcagcacccagactggcagcatgaccggtcagataccaaggctttctaaagtcaaccttttcactctgctcagcctctggatggagctctttccagcagaagcccagcggcaaaaatctcagaaaaatgaagagggaaagcatggacccttaggagataatgaagagaggaccagagtatctactgacaaaagacaggtaaagagaactggtcttgtggtggtgaaaaacatgaaaattgttggtctccactgttctagtgaagatttacatgccgggcagattgctcttattaaacatgggtcaaggctgaaaaactgtgatctttatttttccagaaaaccatgttctgcttgtttgaaaatgattgtaaatgctggagttaaccgaatttcatactggcctgctgatccagaaataagtttgcttacggaggcttctagttctgaagatgcaaagttagatgccaaagcagtggaaagattgaagtcaaacagtcgggcccatgtgtgtgtcttacttcaacctttggtgtgttatatggtgcagtttgtagaggagacctcttacaaatgtgactttattcaaaaaattacaaaaacattgccggatgctaacactgacttttattatgaatgtaaacaagaaagaataaaagaatatgaaatgttatttttggtttcaaatgaagaaatgcataagcaaatactgatgactataggtttggagaacctgtgtgaaaatccatactttagcaatctaaggcaaaacatgaaagaccttatcctacttttggccacagtagcttccagtgtgccgaactttaaacacttcggattttaccgtagcaatccagaacagattaatgaaattcacaatcaaagtttgccacaggaaattgcaaggcactgcatggttcaggccaggttattggcatatcgaactgaggatcataaaacaggagttggggcagtcatttgggcagaagggaaatctagaagttgtgatggaacaggtgccatgtactttgtaggatgtggttacaatgcttttcctgttggatctgagtatgctgacttcccacacatggatgacaagcagaaagacagagaaataaggaaattcagatacatcatacatgcggaacagaatgccttgacatttaggtgtcaagaaataaaaccagaagaaagaagcatgatttttgtgacaaagtgcccatgtgatgagtgtgtacctttaattaaaggtgcaggcataaaacaaatctatgcaggagatgtagatgttggaaaaaagaaggcagacatctcttacatgaggttcggggagcttgaaggtgttagcaaatttacgtggcagctgaatccatcaggagcttatggtcttgaacaaaatgagcctgaaaggagagaaaatggtgtgttgagacctgtcccacagaaggaagagcagcaccaggacaagaagctgcgcctcggaatccactaagaaggcctgtctacactgcaggggaacctcaagaacttttcattgcacttctaaaattcagccttgttcattcagaaaataaggatggattttgtgaataattgaaaagattttttaaggaagctaatttatttctaggatacaaatggtgttaataagaatatttgtcttttagatttatgtgtgggttttccataatgtagtagtgtgttattttattacacgaaatgagggagcaataacttcaaccaatgtaatcaccaacagggactgatttctatttatcttgactttatattagccaatttgaaagggtctgcttcacaagaggtcatgcctctgcagggaatcacacaccttttgagaaatattaattcttttgaattacaagagtgacagttagtaaactgctccagggaaataagtgtcatcttttaagagtcagtgtatagcaaaccaaaagatcacatttatacccaaagctttctagtaatcagaatttacttaattagaattgactcataaaaataaagttagtggactttgtctccatttttaaagtatattttgtaaatgttaattctgtggtcctgtttatcacagactttgggtagcaataggaagagagtgttattctgagacagtgtcgctgcttgatatcactgactcttgaaatcactaacagtgaacctcaaatttggttatgatgttaacagagaagaaatatttgagtctggaatattgaaactagctttcctagaattccattaataaatgctgctcccccatatagtcttcccttctgtataattaacataggttgtctcatggctttgatcttcaaaaggaagagccttttaaaaacatttgccaacctcaagaataaatactgaaagtcttgaaagtatggtcatttcagctattccagattgctgtctgtgatttctcacatttttatttgctgagaaacattcagaaaattattccaaaaatgaaggtacattttctgttctctcctaggttagagaggggtggcctggggtgcttcatgagaaatgtcttcctggatctgcggtggtcaggtttgcctctgcttttgttccctgcctttccgccacatcacacggcctcactgggcttcctaccagtttctcagaattacacgcacgaccatccaaacattggctccatgccagggctgtgactgcagcctgtgtaggaccatggggagttcagagtcatcatacaaggcagccaagaactgccataaacactacacagatggagggcatgggataggacaggagaggaggtgatgtacacttagaggtaactaaggctagtttgaaaaccgtgaattaagatattcttatcagtataaaaacactgagattgcttacctcccaaattgctttattgtattaactctcatgcttcagctcttggatttgttgtttctaactaacatgtcatgtacaccaaacattttataaatcaatcagtaaatattttgtaagacccaaaatcctggcatattgccaggtctgtggatttgcctgttgggtgttgggatgggatatcagaggaagaagcatacaagtgggaaaaactgtgattagaaagggaaaaataggcatttccacagtactattaagagaggcatgataatgccattttttttcttctgtacaactggtcagatttcaataaataatcattgatggtttac

SEQ ID NO: 8289 - protein, 514 aa, Homo sapiens; identical to SEQ ID NO: 944

SEQ ID NO: 8290 - DNA, 412 bp, Homo sapiens
gtgggccgttgccttacagttgctgagaggaggcgagaggcgggggcgctagggccgagatcatgtctgactgggagaggtttccttggcagcagaggacgctaggtttgggatgaaagaagctgggcagatgcaaaatctggagagcgcgagggccgggcggtcagtcagcacccagactggcagcatgaccggtcagataccaaggctttctaaagtcaaccttttcactctgctcagcctctggatggagctctttccagcagaagcccagcggcaaaaatctcagaaaaatgaagagggaaagcatggacccttaggagataatgaagagaggaccagagtatctactgacaaaagacaggattactggaagcagctaagatgcctagatgaaaggtttaccatcact

SEQ ID NO: 8291 - protein, 99 aa, Homo sapiens
MKEAGQMQNLESARAGRSVSTQTGSMTGQIPRLSKVNLFTLLSLWMELFPAEAQRQKSQKNEEGKHGPLGDNEERTRVSTDKRQDYWKQLRCLDERFTI

SEQ ID NO: 8292 - DNA, 822 bp, Homo sapiens
gtgggccgttgccttacagttgctgagaggaggcgagaggcgggggcgctagggccgagatcatgtctgactgggagaggtttccttggcagcagaggacgctaggtttgggatgaaagaagctgggcagatgcaaaatctggagagcgcgagggccgggcggtcagtcagcacccagactggcagcatgaccggtcagataccaaggctttctaaagtcaaccttttcactctgctcagcctctggatggagctctttccagcagaagcccagcggcaaaaatctcagaaaaatgaagagggaaagcatggacccttaggagataatgaagagaggaccagagtatctactgacaaaagacagaaaaccatgttctgcttgtttgaaaatgattgtaaatggattactggaagcagctaagatgcctagatgaaaggtttaccatcactgctggttaggaaatggattatgagaactcgaacagagggaaggtgaaatgcaaccggaggaaacactctgatatgagctggagttaaccgaatttcatactggcctgctgatccagaaataagtttgcttacggaggcttctagttctgaagatgcaaagttagatgccaaagcagtggaaagattgaagtcaaacagtcgggcccatgtgtgtgtcttacttcaacctttggtgtgttatatggtgcagtttgtagaggagacctcttacaaatgtgactttattcaaaaaattacaaaaacattgccggatgctaacactgacttttattatgaatgtaaacaagaaagaataaaagaatatgaaatgtt

SEQ ID NO: 8293 - protein, 102 aa, Homo sapiens
MKEAGQMQNLESARAGRSVSTQTGSMTGQIPRLSKVNLFTLLSLWMELFPAEAQRQKSQKNEEGKHGPLGDNEERTRVSTDKRQKTMFCLFENDCKWITGSS

SEQ ID NO: 8294 - DNA, 697 bp, Homo sapiens
gtgggccgttgccttacagttgctgagaggaggcgagaggcgggggcgctagggccgagatcatgtctgactgggagaggtttccttggcagcagaggacgctaggtttgggatgaaagaagctgggcagatgcaaaatctggagagcgcgagggccgggcggtcagtcagcacccagactggcagcatgaccggtcagataccaaggctttctaaagtcaaccttttcactctgctcagcctctggatggagctctttccagcagaagcccagcggcaaaaatctcagaaaaatgaagagggaaagcatggacccttaggagataatgaagagaggaccagagtatctactgacaaaagacagaaaaccatgttctgcttgtttgaaaatgattgtaaatgctggagttaaccgaatttcatactggcctgctgatccagaaataagtttgcttacggaggcttctagttctgaagatgcaaagttagatgccaaagcagtggaaagattgaagtcaaacagtcgggcccatgtgtgtgtcttacttcaacctttggtgtgttatatggtgcagtttgtagaggagacctcttacaaatgtgactttattcaaaaaattacaaaaacattgccggatgctaacactgacttttattatgaatgtaaacaagaaagaataaaagaatatgaaatgtt

SEQ ID NO: 8295 - protein, 122 aa, Homo sapiens
MKRGPEYLLTKDRKPCSACLKMIVNAGVNRISYWPADPEISLLTEASSSEDAKLDAKAVERLKSNSRAHVCVLLQPLVCYMVQFVEETSYKCDFIQKITKTLPDANTDFYYECKQERIKEYE

SEQ ID NO: 8296 - DNA, 661 bp, Homo sapiens
gtgggccgttgccttacagttgctgagaggaggcgagaggcgggggcgctagggccgagatcatgtctgactgggagaggtttccttggcagcagaggacgctaggtttgggatgaaagaagctgggcagatgcaaaatctggagagcgcgagggccgggcggtcagtcagcacccagactggcagcatgaccggtcagataccaaggctttctaaagtcaaccttttcactctgctcagcctctggatggagctctttccagcagaagcccagcggcaaaaatctcagaaaaatgaagagggaaagcatggacccttaggagataatgaagagaggaccagagtatctactgacaaaagacagctggagttaaccgaatttcatactggcctgctgatccagaaataagtttgcttacggaggcttctagttctgaagatgcaaagttagatgccaaagcagtggaaagattgaagtcaaacagtcgggcccatgtgtgtgtcttacttcaacctttggtgtgttatatggtgcagtttgtagaggagacctcttacaaatgtgactttattcaaaaaattacaaaaacattgccggatgctaacactgacttttattatgaatgtaaacaagaaagaataaaagaatatgaaatgttat

SEQ ID NO: 8297 - protein, 98 aa, Homo sapiens
MKEAGQMQNLESARAGRSVSTQTGSMTGQIPRLSKVNLFTLLSLWMELFPAEAQRQKSQKNEEGKHGPLGDNEERTRVSTDKRQLELTEFHTGLLIQK

SEQ ID NO: 8298 - DNA, 3418 bp, Homo sapiens
gtgggccgttgccttacagttgctgagaggaggcgagaggcgggggcgctagggccgagatcatgtctgactgggagaggtttccttggcagcagaggacgctaggtttgggatgaaagaagctgggcagatgcaaaatctggagagcgcgagggccgggcggtcagtcagcacccagactggcagcatgaccggtcagataccaaggctttctaaagtcaaccttttcactctgctcagcctctggatggagctctttccagcagaagcccagcggcaaaaatctcagaaaaatgaagagggaaagcatggacccttaggagataatgaagagaggaccagagtatctactgacaaaagacagaaaaccatgttctgcttgtttgaaaatgattgtaaatggattactggaagcagctaagatgcctagatgaaaggtttaccatcactgctggttaggaaatggattatgagaactcgaacagagggaaggtgaaatgcaaccggaggaaacactctgatatgagctggagttaaccgaatttcatactggcctgctgatccagaaataagtttgcttacggaggcttctagttctgaagatgcaaagttagatgccaaagcagtggaaagattgaagtcaaacagtcgggcccatgtgtgtgtcttacttcaacctttggtgtgttatatggtgcagtttgtagaggagacctcttacaaatgtgactttattcaaaaaattacaaaaacattgccggatgctaacactgacttttattatgaatgtaaacaagaaagaataaaagaatatgaaatgttatttttggtttcaaatgaagaaatgcataagcaaatactgatgactataggtttggagaacctgtgtgaaaatccatactttagcaatctaaggcaaaacatgaaagaccttatcctacttttggccacagtagcttccagtgtgccgaactttaaacacttcggattttaccgtagcaatccagaacagattaatgaaattcacaatcaaagtttgccacaggaaattgcaaggcactgcatggttcaggccaggttattggcatatcgaactgaattcagcagaaccctgcctgtgttccagagtaagagggcgatgtgaatctgctattttactggatcttagtacctcttgcttctcatagaacaccttatcataccagctgtgattccagtgtttaaagacgcagatgtggttacaatgcttttcctgttggatctgagtatgctgacttcccacacatggatgacaagcagaaagacagagaaataaggaaattcagatacatcatacatgcggaacagaatgccttgacatttaggtgtcaagaaataaaaccagaagaaagaagcatgatttttgtgacaaagtgcccatgtgatgagtgtgtacctttaattaaaggtgcaggcataaaacaaatctatgcaggagatgtagatgttggaaaaaagaaggcagacatctcttacatgaggttcggggagcttgaaggtgttagcaaatttacgtggcagctgaatccatcaggagcttatggtcttgaacaaaatgagcctgaaaggagagaaaatggtgtgttgagacctgtcccacagaaggaagagcagcaccaggacaagaagctgcgcctcggaatccactaagaaggcctgtctacactgcaggggaacctcaagaacttttcattgcacttctaaaattcagccttgttcattcagaaaataaggatggattttgtgaataattgaaaagattttttaaggaagctaatttatttctaggatacaaatggtgttaataagaatatttgtcttttagatttatgtgtgggttttccataatgtagtagtgtgttattttattacacgaaatgagggagcaataacttcaaccaatgtaatcaccaacagggactgatttctatttatcttgactttatattagccaatttgaaagggtctgcttcacaagaggtcatgcctctgcagggaatcacacaccttttgagaaatattaattcttttgaattacaagagtgacagttagtaaactgctccagggaaataagtgtcatcttttaagagtcagtgtatagcaaaccaaaagatcacatttatacccaaagctttctagtaatcagaatttacttaattagaattgactcataaaaataaagttagtggactttgtctccatttttaaagtatattttgtaaatgttaattctgtggtcctgtttatcacagactttgggtagcaataggaagagagtgttattctgagacagtgtcgctgcttgatatcactgactcttgaaatcactaacagtgaacctcaaatttggttatgatgttaacagagaagaaatatttgagtctggaatattgaaactagctttcctagaattccattaataaatgctgctcccccatatagtcttcccttctgtataattaacataggttgtctcatggctttgatcttcaaaaggaagagccttttaaaaacatttgccaacctcaagaataaatactgaaagtcttgaaagtatggtcatttcagctattccagattgctgtctgtgatttctcacatttttatttgctgagaaacattcagaaaattattccaaaaatgaaggtacattttctgttctctcctaggttagagaggggtggcctggggtgcttcatgagaaatgtcttcctggatctgcggtggtcaggtttgcctctgcttttgttccctgcctttccgccacatcacacggcctcactgggcttcctaccagtttctcagaattacacgcacgaccatccaaacattggctccatgccagggctgtgactgcagcctgtgtaggaccatggggagttcagagtcatcatacaaggcagccaagaactgccataaacactacacagatggagggcatgggataggacaggagaggaggtgatgtacacttagaggtaactaaggctagtttgaaaaccgtgaattaagatattcttatcagtataaaaacactgagattgcttacctcccaaattgctttattgtattaactctcatgcttcagctcttggatttgttgtttctaactaacatgtcatgtacaccaaacattttataaatcaatcagtaaatattttgtaagacccaaaatcctggcatattgccaggtctgtggatttgcctgttgggtgttgggatgggatatcagaggaagaagcatacaagtgggaaaaactgtgattagaaagggaaaaataggcatttccacagtactattaagagaggcatgataatgccattttttttcttctgtacaactggtcagatttcaataaataatcattgatggtttac

SEQ ID NO: 8299 - protein, 150 aa, Homo sapiens
MVQFVEETSYKCDFIQKITKTLPDANTDFYYECKQERIKEYEMLFLVSNEEMHKQILMTIGLENLCENPYFSNLRQNMKDLILLLATVASSVPNFKHFGFYRSNPEQINEIHNQSLPQEIARHCMVQARLLAYRTEFSRTLPVFQSKRAM

SEQ ID NO: 8300 - DNA, 1177 bp, Homo sapiens
gccttacagttgctgagaggaggcgagaggcgggggcgctagggccgagatcatgtctgactgggagaggtttccttggcagcagaggacgctaggtttgggatgaaagaagctgggcagatgcaaaatctggagagcgcgagggccgggcggtcagtcagcacccagactggcagcatgaccggtgagtgtccgggaccctgctcccgccaccctacctttcgctctgccctgtgcgtctcccgtcattgaactccagattccttgtctgagcctctttgcctcccctgctgcttttggatgtctcctgcccgccctctgcgtgtcccctccgcggtcgccaggaccaatcggctcggtcgcactggcttttgaagtctcgctttttacccctgttagctacttctcacaggacctagagctggggcctctgaggtcaaagagcctgaacatttccaaacggcgcttttgccttgatttccaaattaaccgcacgtgacgctttcctgtatttcgactgctttaccgtcgaaggtcagataccaaggctttctaaagtcaaccttttcactctgctcagcctctggatggagctctttccagcagaagcccagcggcaaaaatctcagaaaaatgaagagggaaagcatggacccttaggagataatgaagagaggaccagagtatctactgacaaaagacaggtaaagagaactggtcttgtggtggtgaaaaacatgaaaattgttggtctccactgttctagtgaagatttacatgccgggcagattgctcttattaaacatgggtcaaggctgaaaaactgtgatctttatttttccagaaaaccatgttctgcttgtttgaaaatgattgtaaatgctggagttaaccgaatttcatactggcctgctgatccagaaataagtttgcttacggaggcttctagttctgaagatgcaaagttagatgccaaagcagtggaaagattgaagtcaaacagtcgggcccatgtgtgtgtcttacttcaacctttggtgtgttatatggtgcagtttgtagaggagacctcttacaaatgtgactttattcaaaaaattacaaaaacattgccggatgctaacactgacttttattatgaatgtaaacaagaaagaataaaagaatatgaaatgtt

SEQ ID NO: 8301 - protein, 195 aa, Homo sapiens
MELFPAEAQRQKSQKNEEGKHGPLGDNEERTRVSTDKRQVKRTGLVVVKNMKIVGLHCSSEDLHAGQIALIKHGSRLKNCDLYFSRKPCSACLKMIVNAGVNRISYWPADPEISLLTEASSSEDAKLDAKAVERLKSNSRAHVCVLLQPLVCYMVQFVEETSYKCDFIQKITKTLPDANTDFYYECKQERIKEYE

SEQ ID NO: 8302 - DNA, 684 bp, Homo sapiens
ataccatttctgtataaagttcaaaaagacataccatatattggttaaatgtggtaggccaggcatggtgctcacacctataatcccagcatattgggagactgaagcgggccaattgcttgagcccaggagttcaagaccagcctgggcatcacagcaaaacccatctctacaaatattacaaatcaaaaagtaaattaaaaaaattcatcaagctatacactttatgtttagtttattgcatactttaaacatgtatcatttattgtacaaataaagctattaaacacaaaagccaggaagaggttgaagccatactcttttcccagcctgcccagtcagataagtccgtcttccttccagtccccagattctccctaccccacacacagtccccttctcccttaggaggtacattttatttcttccagtctagtaataggacgtccccccaccaaaaacataaaacaaaaagttttatgaattacttgccgtacactgttgagtgaattcagtttttggttttttttttttttgagacagggtctcgctgtgtcacccaggctggaatgcagtggcacagtcatggctcactgcagacttggcctctctgggctcaaacagtcctcccacctcaggctcctgagtagctgggattacaggtgtgcgccacaacacctgttt

SEQ ID NO: 8303 - protein, 43 aa, Homo sapiens [sequence omitted]

SEQ ID NO: 8304 - DNA, 2911 bp, Homo sapiens
gagtatatctaagtgtttcagaatacactcaaattccagaatacgtctgcaatagtgccaggcacatagtagatcttcagtggatattgaatgaatcgtgacaaatgatatgaagccccacagattgccttacgttgtgggattatgctgagagaatgtattcgacatgaaccacttgccaaaatcatcctcttttctaatcaattcagagatttctttaagtacgtggagttgtcaacatttgatattgcttcagatgcctttgctactttcaaggatttactaaccagacataaagtgttggtagcagacttcttagaacaaaattacgacactatttttgaagactatgagaaattgcttcagtctgagaattatgttactaagagacagtctttaaagctgctaggggagctgatcctggaccgtcacaactttgccatcatgacaaagtatatcagcaagccggagaacctgaaactcatgatgaacctccttcgggataaaagtcccaacatccagtttgaagcctttcatgtttttaaggtgtttgtggccagtcctcacaaaacacagcctattgtggagatcctgttaaaaaatcagcccaaactcattgagtttctgagcagcttccaaaaagaaaggacggatgatgagcagttcgctgacgagaagaactacttgattaaacagatccgagacttgaagaaaacggccccttgaagagctccccggcccctgtcacagtcagtcgtctcatttgtccagtttgtacagtgtgtcatttcagaaagtcatcattcttgggaagactttggaggtgcctattttttctgctgtaattgttctgggtagatggagtataaacatttgaatggaaaaaaattaacctagaataatatattcattttagtcaagtctgtgattatttatgtgaaatgagaaccattgtatcagatgttgataaaagcaattttaacttgcagatgtgagcccctgggcacaatgagccgctaaatgggagctcaattgacaggcatcaccaagtcttcaaggaggactgagttctcaggggagaactgggaatggggccagggtgcaaaaatgctttgcccatctgtaggtagacacacagatcgctcagggcactgagagatcccagaaggtaacgttaatgttttcagtcattgtgtgtcctttgttgctgccaatgtctttggactgtaatcagtgcatccacacctcccaggatccagtgctccctctcagctcagtctcccctctctccctgtcctgcattccatcccagctcctcagcatggcctcagtgggcgcacccatgcctcccgcagtccaggtgagcaggggagcaactgagcaggaagaggatggatcaacaagggtcacggggaataggggacccacggggtgtgacctgcttgctagagaactgtgaacatgtggctctggatagagtgactgctgctccatattagcttccagagggtgagtgagggacagaatatttccttcataatggtcatgggtgaatgctttctgctgtaagtgtcttttagagtaggaatcagcatagtgggatgcccagcaggcacaaaccatgggtccagggagtctcagcggggaacttctatcagtatcaataaccattggaaggagaaatgattcatgtgtgaaaaaattctcagatccatcaataaatttttttcagagccattgtatcagatgttgataaaagcaatttttttctaataagctgtcattctataattgcccatcacagtctttagtgaacacatagaaagcctatacagttttggtcctgaatagtctcttgtgactaggatgattgaggtgttaattcctcttccttataaaaaggcttggaatcaaaaatattttaaaaggccgtggtttcgtttcagacatcaaccatctaaaacgggattttaaagcgatattttacaagaatgaaaggcacaattgttgatctgtattttttacacttcagtttctaaatcatgaatcgttgccttccacaggaaccctcccttatacattacttgagtgttgtgtagtttttcttcagccaggtatttctctgcctagagaggggaagagaaatgtgttctccaggactgatcccctttgtagattttgtacctgaagagttacctggcagggcaccacccttggctaggcccaggtgtgtgtttctttcttgcctggcatggaccccgaggcaggtgatgtggggcctggcgcacctccccgctttggcagctgtggcctccctggccagtgcccttgcaggaggccggccggcagcctgatgacccgtactctttagtcactgacgtcagattatttttataacgttccctgacagttcagagtcccttcgaattgcacttttctggtttcgcttatttaattaaaagagatgagtgtaagtataaaaaatgaaggtgaaataaccattggaattgtatttggttacttaatactgttccacaacatcttgggacgtctgttttcctttggagagtgaggccttgttattattcttttctgataaagaaaacattttatttcctttgggcttgcattagctctttcctagcaacccattatcccagctcagtacctttcaaacagaaaactagagtctggggttttgttgtgatctgaatttgtaagttattaatgtgaaagggggagcaggaagctccccctttgcacaaagggggatttgtttgcacaaagttcactgtaaatactgtgagaattgaattctgaaaaggtcatatttagtgatttcaaaagcacacatttaaatgaagactgactaaataaaaggtaccacacacttcttggttggtttcattcc

SEQ ID NO: 8305 - protein, 193 aa, Homo sapiens
MLRECIRHEPLAKIILFSNQFRDFFKYVELSTFDIASDAFATFKDLLTRHKVLVADFLEQNYDTIFEDYEKLLQSENYVTKRQSLKLLGELILDRHNFAIMTKYISKPENLKLMMNLLRDKSPNIQFEAFHVFKVFVASPHKTQPIVEILLKNQPKLIEFLSSFQKERTDDEQFADEKNYLIKQIRDLKKTAP

SEQ ID NO: 8306 - DNA, 3697 bp, Homo sapiens
gtgacgttacaggactgaggagggaggaagtaaaagggagctgtgactgtggtacgtatctgaaagcaagtgttagagagggagtggagaacgcataagcaagctggtttgaccagaaacagaactgcctgtgacagattaagagacaagcaaggcttggaatctgagagcaagcaaagagagtggaaatttacagctgccctatgtgagtgttcaagtgatcattttctggtaacgttttccagtggtaactgttactcttcaaaaagagggacagaaagtcaagacctaattgtggaaactcttttctctgccacgcttggtaataggaggcaacctctattaaatggacgataaaggctacttcatctaaagtgctttgagctcaagaaagagctgtcttcagcacctcaccatgtgtctacattttgttgcttagaaaagcctaggcatttctgtaacatttgcattccatattggaagaagagatttctacacatgaaaaaaatgcctttgtttagtaaatcacacaaaaatccagcagaaattgtgaaaatcctgaaagacaatttggccattttggaaaagcaagacaaaaagacagacaaggcttcagaagaagtgtctaaatcactgcaagcaatgaaagaaattctgtgtggtacaaacgagaaagaacccccaacagaagcagtggctcagctagcacaagaactctacagcagtggcctgctagtgacactgatagctgacctgcagctgatagactttgagggaaaaaaagatgtgacccagatatttaacaacatcttgagaagacagataggcactcggagtcctactgtggagtatattagtgctcatcctcatatcctgtttatgctcctcaaaggatatgaagccccacagattgccttacgttgtgggattatgctgagagaatgtattcgacatgaaccacttgccaaaatcatcctcttttctaatcaattcagagatttctttaagtacgtggagttgtcaacatttgatattgcttcagatgcctttgctactttcaaggatttactaaccagacataaagtgttggtagcagacttcttagaacaaaattacgacactatttttgaagactatgagaaattgcttcagtctgagaattatgttactaagagacagtctttaaagctgctaggggagctgatcctggaccgtcacaactttgccatcatgacaaagtatatcagcaagccggagaacctgaaactcatgatgaacctccttcgggataaaagtcccaacatccagtttgaagcctttcatgtttttaaggtgtttgtggccagtcctcacaaaacacagcctattgtggagatcctgttaaaaaatcagcccaaactcattgagtttctgagcagcttccaaaaagaaaggacggatgatgagcagttcgctgacgagaagaactacttgattaaacagatccgagacttgaagaaaacggccccttgaagagctccccggcccctgtcacagtcagtcgtctcatttgtccagtttgtacagtgtgtcatttcagaaagtcatcattcttgggaagactttggaggtgcctattttttctgctgtaattgttctgggtagatggagtataaacatttgaatggaaaaaaattaacctagaataatatattcattttagtcaagtctgtgattatttatgtgaaatgagaaccattgtatcagatgttgataaaagcaattttaacttgcagatgtgagcccctgggcacaatgagccgctaaatgggagctcaattgacaggcatcaccaagtcttcaaggaggactgagttctcaggggagaactgggaatggggccagggtgcaaaaatgctttgcccatctgtaggtagacacacagatcgctcagggcactgagagatcccagaaggtaacgttaatgttttcagtcattgtgtgtcctttgttgctgccaatgtctttggactgtaatcagtgcatccacacctcccaggatccagtgctccctctcagctcagtctcccctctctccctgtcctgcattccatcccagctcctcagcatggcctcagtgggcgcacccatgcctcccgcagtccaggtgagcaggggagcaactgagcaggaagaggatggatcaacaagggtcacggggaataggggacccacggggtgtgacctgcttgctagagaactgtgaacatgtggctctggatagagtgactgctgctccatattagcttccagagggtgagtgagggacagaatatttccttcataatggtcatgggtgaatgctttctgctgtaagtgtcttttagagtaggaatcagcatagtgggatgcccagcaggcacaaaccatgggtccagggagtctcagcggggaacttctatcagtatcaataaccattggaaggagaaatgattcatgtgtgaaaaaattctcagatccatcaataaatttttttcagagccattgtatcagatgttgataaaagcaatttttttctaataagctgtcattctataattgcccatcacagtctttagtgaacacatagaaagcctatacagttttggtcctgaatagtctcttgtgactaggatgattgaggtgttaattcctcttccttataaaaaggcttggaatcaaaaatattttaaaaggccgtggtttcgtttcagacatcaaccatctaaaacgggattttaaagcgatattttacaagaatgaaaggcacaattgttgatctgtattttttacacttcagtttctaaatcatgaatcgttgccttccacaggaaccctcccttatacattacttgagtgttgtgtagtttttcttcagccaggtatttctctgcctagagaggggaagagaaatgtgttctccaggactgatcccctttgtagattttgtacctgaagagttacctggcagggcaccacccttggctaggcccaggtgtgtgtttctttcttgcctggcatggaccccgaggcaggtgatgtggggcctggcgcacctccccgctttggcagctgtggcctccctggccagtgcccttgcaggaggccggccggcagcctgatgacccgtactctttagtcactgacgtcagattatttttataacgttccctgacagttcagagtcccttcgaattgcacttttctggtttcgcttatttaattaaaagagatgagtgtaagtataaaaaatgaaggtgaaataaccattggaattgtatttggttacttaatactgttccacaacatcttgggacgtctgttttcctttggagagtgaggccttgttattattcttttctgataaagaaaacattttatttcctttgggcttgcattagctctttcctagcaacccattatcccagctcagtacctttcaaacagaaaactagagtctggggttttgttgtgatctgaatttgtaagttattaatgtgaaagggggagcaggaagctccccctttgcacaaagggggatttgtttgcacaaagttcactgtaaatactgtgagaattgaattctgaaaaggtcatatttagtgatttcaaaagcacacatttaaatgaagactgactaaataaaaggtaccacacacttcttggttggtttcattcc

SEQ ID NO: 8307 - protein, 337 aa, Homo sapiens; identical to SEQ ID NO: 946

SEQ ID NO: 8308 - DNA, 3691 bp, Homo sapiens
gagaacctagtatcacactaggcttctgaaaacaccaatcaagagttgcttaatgcaggggtcccttacccctgggctgcagacctgtacctgtccatggcctgttaggaaccgggcagcacagtaggaggactgaggagggaggaagtaaaagggagctgtgactgtggtacgtatctgaaagcaagtgttagagagggagtggagaacgcataagcaagctggtttgaccagaaacagaactgcctgtgacagattaagagacaagcaaggcttggaatctgagagcaagcaaagagagtggaaatttacagctgccctatgaggcaacctctattaaatggacgataaaggctacttcatctaaagtgctttgagctcaagaaagagctgtcttcagcacctcaccatgtgtctacattttgttgcttagaaaagcctaggcatttctgtaacatttgcattccatattggaagaagagatttctacacatgaaaaaaatgcctttgtttagtaaatcacacaaaaatccagcagaaattgtgaaaatcctgaaagacaatttggccattttggaaaagcaagacaaaaagacagacaaggcttcagaagaagtgtctaaatcactgcaagcaatgaaagaaattctgtgtggtacaaacgagaaagaacccccaacagaagcagtggctcagctagcacaagaactctacagcagtggcctgctagtgacactgatagctgacctgcagctgatagactttgagggaaaaaaagatgtgacccagatatttaacaacatcttgagaagacagataggcactcggagtcctactgtggagtatattagtgctcatcctcatatcctgtttatgctcctcaaaggatatgaagccccacagattgccttacgttgtgggattatgctgagagaatgtattcgacatgaaccacttgccaaaatcatcctcttttctaatcaattcagagatttctttaagtacgtggagttgtcaacatttgatattgcttcagatgcctttgctactttcaaggatttactaaccagacataaagtgttggtagcagacttcttagaacaaaattacgacactatttttgaagactatgagaaattgcttcagtctgagaattatgttactaagagacagtctttaaagctgctaggggagctgatcctggaccgtcacaactttgccatcatgacaaagtatatcagcaagccggagaacctgaaactcatgatgaacctccttcgggataaaagtcccaacatccagtttgaagcctttcatgtttttaaggtgtttgtggccagtcctcacaaaacacagcctattgtggagatcctgttaaaaaatcagcccaaactcattgagtttctgagcagcttccaaaaagaaaggacggatgatgagcagttcgctgacgagaagaactacttgattaaacagatccgagacttgaagaaaacggccccttgaagagctccccggcccctgtcacagtcagtcgtctcatttgtccagtttgtacagtgtgtcatttcagaaagtcatcattcttgggaagactttggaggtgcctattttttctgctgtaattgttctgggtagatggagtataaacatttgaatggaaaaaaattaacctagaataatatattcattttagtcaagtctgtgattatttatgtgaaatgagaaccattgtatcagatgttgataaaagcaattttaacttgcagatgtgagcccctgggcacaatgagccgctaaatgggagctcaattgacaggcatcaccaagtcttcaaggaggactgagttctcaggggagaactgggaatggggccagggtgcaaaaatgctttgcccatctgtaggtagacacacagatcgctcagggcactgagagatcccagaaggtaacgttaatgttttcagtcattgtgtgtcctttgttgctgccaatgtctttggactgtaatcagtgcatccacacctcccaggatccagtgctccctctcagctcagtctcccctctctccctgtcctgcattccatcccagctcctcagcatggcctcagtgggcgcacccatgcctcccgcagtccaggtgagcaggggagcaactgagcaggaagaggatggatcaacaagggtcacggggaataggggacccacggggtgtgacctgcttgctagagaactgtgaacatgtggctctggatagagtgactgctgctccatattagcttccagagggtgagtgagggacagaatatttccttcataatggtcatgggtgaatgctttctgctgtaagtgtcttttagagtaggaatcagcatagtgggatgcccagcaggcacaaaccatgggtccagggagtctcagcggggaacttctatcagtatcaataaccattggaaggagaaatgattcatgtgtgaaaaaattctcagatccatcaataaatttttttcagagccattgtatcagatgttgataaaagcaatttttttctaataagctgtcattctataattgcccatcacagtctttagtgaacacatagaaagcctatacagttttggtcctgaatagtctcttgtgactaggatgattgaggtgttaattcctcttccttataaaaaggcttggaatcaaaaatattttaaaaggccgtggtttcgtttcagacatcaaccatctaaaacgggattttaaagcgatattttacaagaatgaaaggcacaattgttgatctgtattttttacacttcagtttctaaatcatgaatcgttgccttccacaggaaccctcccttatacattacttgagtgttgtgtagtttttcttcagccaggtatttctctgcctagagaggggaagagaaatgtgttctccaggactgatcccctttgtagattttgtacctgaagagttacctggcagggcaccacccttggctaggcccaggtgtgtgtttctttcttgcctggcatggaccccgaggcaggtgatgtggggcctggcgcacctccccgctttggcagctgtggcctccctggccagtgcccttgcaggaggccggccggcagcctgatgacccgtactctttagtcactgacgtcagattatttttataacgttccctgacagttcagagtcccttcgaattgcacttttctggtttcgcttatttaattaaaagagatgagtgtaagtataaaaaatgaaggtgaaataaccattggaattgtatttggttacttaatactgttccacaacatcttgggacgtctgttttcctttggagagtgaggccttgttattattcttttctgataaagaaaacattttatttcctttgggcttgcattagctctttcctagcaacccattatcccagctcagtacctttcaaacagaaaactagagtctggggttttgttgtgatctgaatttgtaagttattaatgtgaaagggggagcaggaagctccccctttgcacaaagggggatttgtttgcacaaagttcactgtaaatactgtgagaattgaattctgaaaaggtcatatttagtgatttcaaaagcacacatttaaatgaagactgactaaataaaaggtaccacacacttcttggttggtttcattcc

SEQ ID NO: 8309 - protein, 337 aa, Homo sapiens; identical to SEQ ID NO: 946

SEQ ID NO: 8310 - DNA, 3447 bp, Homo sapiens
agcgttttgttagggaagaagtggagaacagatattggaaggcaattagctgtctctaatacattgataaaatatataactataactgcaaaatgctaataacccagcagaggagtagatttgggaacataagatgaaaaagtcaacaagtgcattgatcacaacatatggtaatgatagcgtgattgtgatgacctttgttttatacctccttttacattccatattggaagaagagatttctacacatgaaaaaaatgcctttgtttagtaaatcacacaaaaatccagcagaaattgtgaaaatcctgaaagacaatttggccattttggaaaagcaagacaaaaagacagacaaggcttcagaagaagtgtctaaatcactgcaagcaatgaaagaaattctgtgtggtacaaacgagaaagaacccccaacagaagcagtggctcagctagcacaagaactctacagcagtggcctgctagtgacactgatagctgacctgcagctgatagactttgagggaaaaaaagatgtgacccagatatttaacaacatcttgagaagacagataggcactcggagtcctactgtggagtatattagtgctcatcctcatatcctgtttatgctcctcaaaggatatgaagccccacagattgccttacgttgtgggattatgctgagagaatgtattcgacatgaaccacttgccaaaatcatcctcttttctaatcaattcagagatttctttaagtacgtggagttgtcaacatttgatattgcttcagatgcctttgctactttcaaggatttactaaccagacataaagtgttggtagcagacttcttagaacaaaattacgacactatttttgaagactatgagaaattgcttcagtctgagaattatgttactaagagacagtctttaaagctgctaggggagctgatcctggaccgtcacaactttgccatcatgacaaagtatatcagcaagccggagaacctgaaactcatgatgaacctccttcgggataaaagtcccaacatccagtttgaagcctttcatgtttttaaggtgtttgtggccagtcctcacaaaacacagcctattgtggagatcctgttaaaaaatcagcccaaactcattgagtttctgagcagcttccaaaaagaaaggacggatgatgagcagttcgctgacgagaagaactacttgattaaacagatccgagacttgaagaaaacggccccttgaagagctccccggcccctgtcacagtcagtcgtctcatttgtccagtttgtacagtgtgtcatttcagaaagtcatcattcttgggaagactttggaggtgcctattttttctgctgtaattgttctgggtagatggagtataaacatttgaatggaaaaaaattaacctagaataatatattcattttagtcaagtctgtgattatttatgtgaaatgagaaccattgtatcagatgttgataaaagcaattttaacttgcagatgtgagcccctgggcacaatgagccgctaaatgggagctcaattgacaggcatcaccaagtcttcaaggaggactgagttctcaggggagaactgggaatggggccagggtgcaaaaatgctttgcccatctgtaggtagacacacagatcgctcagggcactgagagatcccagaaggtaacgttaatgttttcagtcattgtgtgtcctttgttgctgccaatgtctttggactgtaatcagtgcatccacacctcccaggatccagtgctccctctcagctcagtctcccctctctccctgtcctgcattccatcccagctcctcagcatggcctcagtgggcgcacccatgcctcccgcagtccaggtgagcaggggagcaactgagcaggaagaggatggatcaacaagggtcacggggaataggggacccacggggtgtgacctgcttgctagagaactgtgaacatgtggctctggatagagtgactgctgctccatattagcttccagagggtgagtgagggacagaatatttccttcataatggtcatgggtgaatgctttctgctgtaagtgtcttttagagtaggaatcagcatagtgggatgcccagcaggcacaaaccatgggtccagggagtctcagcggggaacttctatcagtatcaataaccattggaaggagaaatgattcatgtgtgaaaaaattctcagatccatcaataaatttttttcagagccattgtatcagatgttgataaaagcaatttttttctaataagctgtcattctataattgcccatcacagtctttagtgaacacatagaaagcctatacagttttggtcctgaatagtctcttgtgactaggatgattgaggtgttaattcctcttccttataaaaaggcttggaatcaaaaatattttaaaaggccgtggtttcgtttcagacatcaaccatctaaaacgggattttaaagcgatattttacaagaatgaaaggcacaattgttgatctgtattttttacacttcagtttctaaatcatgaatcgttgccttccacaggaaccctcccttatacattacttgagtgttgtgtagtttttcttcagccaggtatttctctgcctagagaggggaagagaaatgtgttctccaggactgatcccctttgtagattttgtacctgaagagttacctggcagggcaccacccttggctaggcccaggtgtgtgtttctttcttgcctggcatggaccccgaggcaggtgatgtggggcctggcgcacctccccgctttggcagctgtggcctccctggccagtgcccttgcaggaggccggccggcagcctgatgacccgtactctttagtcactgacgtcagattatttttataacgttccctgacagttcagagtcccttcgaattgcacttttctggtttcgcttatttaattaaaagagatgagtgtaagtataaaaaatgaaggtgaaataaccattggaattgtatttggttacttaatactgttccacaacatcttgggacgtctgttttcctttggagagtgaggccttgttattattcttttctgataaagaaaacattttatttcctttgggcttgcattagctctttcctagcaacccattatcccagctcagtacctttcaaacagaaaactagagtctggggttttgttgtgatctgaatttgtaagttattaatgtgaaagggggagcaggaagctccccctttgcacaaagggggatttgtttgcacaaagttcactgtaaatactgtgagaattgaattctgaaaaggtcatatttagtgatttcaaaagcacacatttaaatgaagactgactaaataaaaggtaccacacacttcttggttggtttcattcc

SEQ ID NO: 8311 - protein, 337 aa, Homo sapiens; identical to SEQ ID NO: 946

SEQ ID NO: 8312 - DNA, 3805 bp, Homo sapiens
atttactagccttcatctcaaccacaacagtcccgccctgcctctaccggggatgagggaaggcgtaacctccgccggggaccaggccgacctacctaaaccgatcactacatgggaggagtcggacgccggccgtcccaccacccagccaggagcccattgattggtcgcactccccactggttcacgcctcagagactcggcgcacttaccgctggcaccgcagtggcgcccgagcgcgccgcctcccgattgactgctagcgctctcggcttgtctcgcgcactgtagctgagccaatggagttactcgtagtcgagaggccggcatcactggagtggtggcgcagctgtttcctccggatatccatcaaatattgagaagaaagaatatcaggagcaaagtgttctaagttgctgttcagaacgtaaagatgcgaaccccaaatcagtggtttgttcattcttcatgcaagagcaatgcactaaaggagagaagcaagctgtggtgatcagtgactttggtgaaagctaagaaggttcaaacaaatttgcaaatgatatacaacttctaagcattccatattggaagaagagatttctacacatgaaaaaaatgcctttgtttagtaaatcacacaaaaatccagcagaaattgtgaaaatcctgaaagacaatttggccattttggaaaagcaagacaaaaagacagacaaggcttcagaagaagtgtctaaatcactgcaagcaatgaaagaaattctgtgtggtacaaacgagaaagaacccccaacagaagcagtggctcagctagcacaagaactctacagcagtggcctgctagtgacactgatagctgacctgcagctgatagactttgagggaaaaaaagatgtgacccagatatttaacaacatcttgagaagacagataggcactcggagtcctactgtggagtatattagtgctcatcctcatatcctgtttatgctcctcaaaggatatgaagccccacagattgccttacgttgtgggattatgctgagagaatgtattcgacatgaaccacttgccaaaatcatcctcttttctaatcaattcagagatttctttaagtacgtggagttgtcaacatttgatattgcttcagatgcctttgctactttcaaggatttactaaccagacataaagtgttggtagcagacttcttagaacaaaattacgacactatttttgaagactatgagaaattgcttcagtctgagaattatgttactaagagacagtctttaaagctgctaggggagctgatcctggaccgtcacaactttgccatcatgacaaagtatatcagcaagccggagaacctgaaactcatgatgaacctccttcgggataaaagtcccaacatccagtttgaagcctttcatgtttttaaggtgtttgtggccagtcctcacaaaacacagcctattgtggagatcctgttaaaaaatcagcccaaactcattgagtttctgagcagcttccaaaaagaaaggacggatgatgagcagttcgctgacgagaagaactacttgattaaacagatccgagacttgaagaaaacggccccttgaagagctccccggcccctgtcacagtcagtcgtctcatttgtccagtttgtacagtgtgtcatttcagaaagtcatcattcttgggaagactttggaggtgcctattttttctgctgtaattgttctgggtagatggagtataaacatttgaatggaaaaaaattaacctagaataatatattcattttagtcaagtctgtgattatttatgtgaaatgagaaccattgtatcagatgttgataaaagcaattttaacttgcagatgtgagcccctgggcacaatgagccgctaaatgggagctcaattgacaggcatcaccaagtcttcaaggaggactgagttctcaggggagaactgggaatggggccagggtgcaaaaatgctttgcccatctgtaggtagacacacagatcgctcagggcactgagagatcccagaaggtaacgttaatgttttcagtcattgtgtgtcctttgttgctgccaatgtctttggactgtaatcagtgcatccacacctcccaggatccagtgctccctctcagctcagtctcccctctctccctgtcctgcattccatcccagctcctcagcatggcctcagtgggcgcacccatgcctcccgcagtccaggtgagcaggggagcaactgagcaggaagaggatggatcaacaagggtcacggggaataggggacccacggggtgtgacctgcttgctagagaactgtgaacatgtggctctggatagagtgactgctgctccatattagcttccagagggtgagtgagggacagaatatttccttcataatggtcatgggtgaatgctttctgctgtaagtgtcttttagagtaggaatcagcatagtgggatgcccagcaggcacaaaccatgggtccagggagtctcagcggggaacttctatcagtatcaataaccattggaaggagaaatgattcatgtgtgaaaaaattctcagatccatcaataaatttttttcagagccattgtatcagatgttgataaaagcaatttttttctaataagctgtcattctataattgcccatcacagtctttagtgaacacatagaaagcctatacagttttggtcctgaatagtctcttgtgactaggatgattgaggtgttaattcctcttccttataaaaaggcttggaatcaaaaatattttaaaaggccgtggtttcgtttcagacatcaaccatctaaaacgggattttaaagcgatattttacaagaatgaaaggcacaattgttgatctgtattttttacacttcagtttctaaatcatgaatcgttgccttccacaggaaccctcccttatacattacttgagtgttgtgtagtttttcttcagccaggtatttctctgcctagagaggggaagagaaatgtgttctccaggactgatcccctttgtagattttgtacctgaagagttacctggcagggcaccacccttggctaggcccaggtgtgtgtttctttcttgcctggcatggaccccgaggcaggtgatgtggggcctggcgcacctccccgctttggcagctgtggcctccctggccagtgcccttgcaggaggccggccggcagcctgatgacccgtactctttagtcactgacgtcagattatttttataacgttccctgacagttcagagtcccttcgaattgcacttttctggtttcgcttatttaattaaaagagatgagtgtaagtataaaaaatgaaggtgaaataaccattggaattgtatttggttacttaatactgttccacaacatcttgggacgtctgttttcctttggagagtgaggccttgttattattcttttctgataaagaaaacattttatttcctttgggcttgcattagctctttcctagcaacccattatcccagctcagtacctttcaaacagaaaactagagtctggggttttgttgtgatctgaatttgtaagttattaatgtgaaagggggagcaggaagctccccctttgcacaaagggggatttgtttgcacaaagttcactgtaaatactgtgagaattgaattctgaaaaggtcatatttagtgatttcaaaagcacacatttaaatgaagactgactaaataaaaggtaccacacacttcttggttggtttcattcc

SEQ ID NO: 8313 - protein, 337 aa, Homo sapiens; identical to SEQ ID NO: 946

SEQ ID NO: 8314 - DNA, 4194 bp, Homo sapiens
atttactagccttcatctcaaccacaacagtcccgccctgcctctaccggggatgagggaaggcgtaacctccgccggggaccaggccgacctacctaaaccgatcactacatgggaggagtcggacgccggccgtcccaccacccagccaggagcccattgattggtcgcactccccactggttcacgcctcagagactcggcgcacttaccgctggcaccgcagtggcgcccgagcgcgccgcctcccgattgactgctagcgctctcggcttgtctcgcgcactgtagctgagccaatggagttactcgtagtcgagaggccggcatcactggagtggtggcgcagctgtttcctccggatatccatcaaatattgagaagaaagaatatcaggagcaaagtgttctaagttgctgttcagaacgtaaagatgcgaaccccaaatcagtggtttgttcattcttcatgcaagagcaatgcactaaaggagagaagcaagctgtggtgatcagtgactttggtgaaagctaagaaggttcaaacaaatttgcaaatgatatacaacttctaaggcaaatctttcatctgcagttttgactctatcccaatggagaaattgttaatcttttagtaagcattaagaattgtatagaaaatgcagaatttgtttggaagaaaagcatggataattcatttgtgatgaatgttgactccacaaagggtttgttcaagtatttggagacggttgttaaattgccttttaaggaggactgaggagggaggaagtaaaagggagctgtgactgtggtacgtatctgaaagcaagtgttagagagggagtggagaacgcataagcaagctggtttgaccagaaacagaactgcctgtgacagattaagagacaagcaaggcttggaatctgagagcaagcaaagagagtggaaatttacagctgccctatcattccatattggaagaagagatttctacacatgaaaaaaatgcctttgtttagtaaatcacacaaaaatccagcagaaattgtgaaaatcctgaaagacaatttggccattttggaaaagcaagacaaaaagacagacaaggcttcagaagaagtgtctaaatcactgcaagcaatgaaagaaattctgtgtggtacaaacgagaaagaacccccaacagaagcagtggctcagctagcacaagaactctacagcagtggcctgctagtgacactgatagctgacctgcagctgatagactttgagggaaaaaaagatgtgacccagatatttaacaacatcttgagaagacagataggcactcggagtcctactgtggagtatattagtgctcatcctcatatcctgtttatgctcctcaaaggatatgaagccccacagattgccttacgttgtgggattatgctgagagaatgtattcgacatgaaccacttgccaaaatcatcctcttttctaatcaattcagagatttctttaagtacgtggagttgtcaacatttgatattgcttcagatgcctttgctactttcaaggatttactaaccagacataaagtgttggtagcagacttcttagaacaaaattacgacactatttttgaagactatgagaaattgcttcagtctgagaattatgttactaagagacagtctttaaagctgctaggggagctgatcctggaccgtcacaactttgccatcatgacaaagtatatcagcaagccggagaacctgaaactcatgatgaacctccttcgggataaaagtcccaacatccagtttgaagcctttcatgtttttaaggtgtttgtggccagtcctcacaaaacacagcctattgtggagatcctgttaaaaaatcagcccaaactcattgagtttctgagcagcttccaaaaagaaaggacggatgatgagcagttcgctgacgagaagaactacttgattaaacagatccgagacttgaagaaaacggccccttgaagagctccccggcccctgtcacagtcagtcgtctcatttgtccagtttgtacagtgtgtcatttcagaaagtcatcattcttgggaagactttggaggtgcctattttttctgctgtaattgttctgggtagatggagtataaacatttgaatggaaaaaaattaacctagaataatatattcattttagtcaagtctgtgattatttatgtgaaatgagaaccattgtatcagatgttgataaaagcaattttaacttgcagatgtgagcccctgggcacaatgagccgctaaatgggagctcaattgacaggcatcaccaagtcttcaaggaggactgagttctcaggggagaactgggaatggggccagggtgcaaaaatgctttgcccatctgtaggtagacacacagatcgctcagggcactgagagatcccagaaggtaacgttaatgttttcagtcattgtgtgtcctttgttgctgccaatgtctttggactgtaatcagtgcatccacacctcccaggatccagtgctccctctcagctcagtctcccctctctccctgtcctgcattccatcccagctcctcagcatggcctcagtgggcgcacccatgcctcccgcagtccaggtgagcaggggagcaactgagcaggaagaggatggatcaacaagggtcacggggaataggggacccacggggtgtgacctgcttgctagagaactgtgaacatgtggctctggatagagtgactgctgctccatattagcttccagagggtgagtgagggacagaatatttccttcataatggtcatgggtgaatgctttctgctgtaagtgtcttttagagtaggaatcagcatagtgggatgcccagcaggcacaaaccatgggtccagggagtctcagcggggaacttctatcagtatcaataaccattggaaggagaaatgattcatgtgtgaaaaaattctcagatccatcaataaatttttttcagagccattgtatcagatgttgataaaagcaatttttttctaataagctgtcattctataattgcccatcacagtctttagtgaacacatagaaagcctatacagttttggtcctgaatagtctcttgtgactaggatgattgaggtgttaattcctcttccttataaaaaggcttggaatcaaaaatattttaaaaggccgtggtttcgtttcagacatcaaccatctaaaacgggattttaaagcgatattttacaagaatgaaaggcacaattgttgatctgtattttttacacttcagtttctaaatcatgaatcgttgccttccacaggaaccctcccttatacattacttgagtgttgtgtagtttttcttcagccaggtatttctctgcctagagaggggaagagaaatgtgttctccaggactgatcccctttgtagattttgtacctgaagagttacctggcagggcaccacccttggctaggcccaggtgtgtgtttctttcttgcctggcatggaccccgaggcaggtgatgtggggcctggcgcacctccccgctttggcagctgtggcctccctggccagtgcccttgcaggaggccggccggcagcctgatgacccgtactctttagtcactgacgtcagattatttttataacgttccctgacagttcagagtcccttcgaattgcacttttctggtttcgcttatttaattaaaagagatgagtgtaagtataaaaaatgaaggtgaaataaccattggaattgtatttggttacttaatactgttccacaacatcttgggacgtctgttttcctttggagagtgaggccttgttattattcttttctgataaagaaaacattttatttcctttgggcttgcattagctctttcctagcaacccattatcccagctcagtacctttcaaacagaaaactagagtctggggttttgttgtgatctgaatttgtaagttattaatgtgaaagggggagcaggaagctccccctttgcacaaagggggatttgtttgcacaaagttcactgtaaatactgtgagaattgaattctgaaaaggtcatatttagtgatttcaaaagcacacatttaaatgaagactgactaaataaaaggtaccacacacttcttggttggtttcattcc

SEQ ID NO: 8315 - protein, 337 aa, Homo sapiens; identical to SEQ ID NO: 946

SEQ ID NO: 8316 - DNA, 2893 bp, Homo sapiens
gagtatatctaagtgtttcagaatacactcaaattccagaatacgtctgcaatagtgccaggcacatagtagatcttcagtggatattgaatgaatcgtgacaaatgatatgaagccccacagattgccttacgttgtgggattatgctgagagaatgtattcgacatgaaccacttgccaaaatcatcctcttttctaatcaattcagagatttctttaagtacgtggagttgtcaacatttgatattgcttcagatgcctttgctactttcaaggatttactaaccagacataaagtgttggtagcagacttcttagaacaaaattacgacactatttttgaagactatgagaaattgcttcagtctgagaattatgttactaagagacagtctttaaagctgctaggggagctgatcctggaccgtcacaactttgccatcatgacaaagtatatcagcaagccggagaacctgaaactcatgatgaacctccttcgggataaaagtcccaacatccagtttgaagcctttcatgtttttaaggtgtttgtggccagtcctcacaaaacacagcctattgtggagatcctgttaaaaaatcagcccaaactcattgagtttctgagcagcttccaaaaagaaaggacggatgatgagcagttcgctgacgagaagaactacttgattaaacagatccgagacttgaagaaaacggccccttgaagagctccccggcccctgtcacagtcagtcgtctcatttgtccagtttgtacagtgtgtcatttcagaaagtcatcattcttgggaagactttggaggtgcctattttttctgctgtaattgttctgggtagatggagtataaacatttgaatggaaaaaaattaacctagaataatatattcattttagtcaagtctgtgattatttatgtgaaatgagaaccattgtatcagatgttgataaaagcaattttaacttgcagatgtgagcccctgggcacaatgagccgctaaatgggagctcaattgacaggcatcaccaagtcttcaaggaggactgagttctcaggggagaactgggaatggggccagggtgcaaaaatgctttgcccatctgtaggtagacacacagatcgctcagggcactgagagatcccagaaggtaacgttaatgttttcagtcattgtgtgtcctttgttgctgccaatgtctttggactgtaatcagtgcatccacacctcccaggatccagtgctccctctcagctcagtctcccctctctccctgtcctgcattccatcccagctcctcagcatggcctcagtgggcgcacccatgcctcccgcagtccaggtgagcaggggagcaactgagcaggaagaggatggatcaacaagggtcacggggaataggggacccacggggtgtgacctgcttgctagagaactgtgaacatgtggctctggatagagtgactgctgctccatattagcttccagagggtgagtgagggacagaatatttccttcataatggtcatgggtgaatgctttctgctgtaagtgtcttttagagtaggaatcagcatagtgggatgcccagcaggcacaaaccatgggtccagggagtctcagcggggaacttctatcagtatcaataaccattggaaggagaaatgattcatgtgtgaaaaaattctcagatccatcaataaatttttttcagagccattgtatcagatgttgataaaagcaatttttttctaataagctgtcattctataattgcccatcacagtctttagtgaacacatagaaagcctatacagttttggtcctgaatagtctcttgtgactaggatgattgaggtgttaattcctcttccttataaaaaggcttggaatcaaaaatattttaaaaggccgtggtttcgtttcagacatcaaccatctaaaacgggattttaaagcgatattttacaagaatgaaaggcacaattgttgatctgtattttttacacttcagtttctaaatcatgaatcgttgccttccacaggaaccctcccttatacattacttgagtgttgtgtagtttttcttcagccaggtatttctctgcctagagaggggaagagaaatgtgttctccaggactgatcccctttgtagattttgtacctgaagagttacctggcagggcaccacccttggctaggcccaggtgtgtgtttctttcttgcctggcatggaccccgaggcaggtgatgtggggcctggcgcacctccccgctttggcagctgtggcctccctggccagtgcccttgcaggaggccggccggcagcctgatgacccgtactctttagtcactgacgtcagattatttttataacgttccctgacagttcagagtcccttcgaattgcacttttctggtttcgcttatttaattaaaagagatgagtgtaagtataaaaaatgaaggtgaaataaccattggaattgtatttggttacttaatactgttccacaacatcttgggacgtctgttttcctttggagagtgaggccttgttattattcttttctgataaagaaaacattttatttcctttgggcttgcattagctctttcctagcaacccattatcccagctcagtacctttcaaacagaaaactagagtctggggttttgttgtgatctgaatttgtaagttattaatgtgaaagggggagcaggaagctccccctttgcacaaagggggatttgtttgcacaaagttcactgtaaatactgtgagaattgaattctgaaaaggtcatatttagtgatttcaaaagcacacatttaaatgaagactgactaaataaaaggtaccacacactt

SEQ ID NO: 8317 - protein, 193 aa, Homo sapiens; identical to SEQ ID NO: 8305

SEQ ID NO: 8318 - DNA, 3679 bp, Homo sapiens
gtgacgttacaggactgaggagggaggaagtaaaagggagctgtgactgtggtacgtatctgaaagcaagtgttagagagggagtggagaacgcataagcaagctggtttgaccagaaacagaactgcctgtgacagattaagagacaagcaaggcttggaatctgagagcaagcaaagagagtggaaatttacagctgccctatgtgagtgttcaagtgatcattttctggtaacgttttccagtggtaactgttactcttcaaaaagagggacagaaagtcaagacctaattgtggaaactcttttctctgccacgcttggtaataggaggcaacctctattaaatggacgataaaggctacttcatctaaagtgctttgagctcaagaaagagctgtcttcagcacctcaccatgtgtctacattttgttgcttagaaaagcctaggcatttctgtaacatttgcattccatattggaagaagagatttctacacatgaaaaaaatgcctttgtttagtaaatcacacaaaaatccagcagaaattgtgaaaatcctgaaagacaatttggccattttggaaaagcaagacaaaaagacagacaaggcttcagaagaagtgtctaaatcactgcaagcaatgaaagaaattctgtgtggtacaaacgagaaagaacccccaacagaagcagtggctcagctagcacaagaactctacagcagtggcctgctagtgacactgatagctgacctgcagctgatagactttgagggaaaaaaagatgtgacccagatatttaacaacatcttgagaagacagataggcactcggagtcctactgtggagtatattagtgctcatcctcatatcctgtttatgctcctcaaaggatatgaagccccacagattgccttacgttgtgggattatgctgagagaatgtattcgacatgaaccacttgccaaaatcatcctcttttctaatcaattcagagatttctttaagtacgtggagttgtcaacatttgatattgcttcagatgcctttgctactttcaaggatttactaaccagacataaagtgttggtagcagacttcttagaacaaaattacgacactatttttgaagactatgagaaattgcttcagtctgagaattatgttactaagagacagtctttaaagctgctaggggagctgatcctggaccgtcacaactttgccatcatgacaaagtatatcagcaagccggagaacctgaaactcatgatgaacctccttcgggataaaagtcccaacatccagtttgaagcctttcatgtttttaaggtgtttgtggccagtcctcacaaaacacagcctattgtggagatcctgttaaaaaatcagcccaaactcattgagtttctgagcagcttccaaaaagaaaggacggatgatgagcagttcgctgacgagaagaactacttgattaaacagatccgagacttgaagaaaacggccccttgaagagctccccggcccctgtcacagtcagtcgtctcatttgtccagtttgtacagtgtgtcatttcagaaagtcatcattcttgggaagactttggaggtgcctattttttctgctgtaattgttctgggtagatggagtataaacatttgaatggaaaaaaattaacctagaataatatattcattttagtcaagtctgtgattatttatgtgaaatgagaaccattgtatcagatgttgataaaagcaattttaacttgcagatgtgagcccctgggcacaatgagccgctaaatgggagctcaattgacaggcatcaccaagtcttcaaggaggactgagttctcaggggagaactgggaatggggccagggtgcaaaaatgctttgcccatctgtaggtagacacacagatcgctcagggcactgagagatcccagaaggtaacgttaatgttttcagtcattgtgtgtcctttgttgctgccaatgtctttggactgtaatcagtgcatccacacctcccaggatccagtgctccctctcagctcagtctcccctctctccctgtcctgcattccatcccagctcctcagcatggcctcagtgggcgcacccatgcctcccgcagtccaggtgagcaggggagcaactgagcaggaagaggatggatcaacaagggtcacggggaataggggacccacggggtgtgacctgcttgctagagaactgtgaacatgtggctctggatagagtgactgctgctccatattagcttccagagggtgagtgagggacagaatatttccttcataatggtcatgggtgaatgctttctgctgtaagtgtcttttagagtaggaatcagcatagtgggatgcccagcaggcacaaaccatgggtccagggagtctcagcggggaacttctatcagtatcaataaccattggaaggagaaatgattcatgtgtgaaaaaattctcagatccatcaataaatttttttcagagccattgtatcagatgttgataaaagcaatttttttctaataagctgtcattctataattgcccatcacagtctttagtgaacacatagaaagcctatacagttttggtcctgaatagtctcttgtgactaggatgattgaggtgttaattcctcttccttataaaaaggcttggaatcaaaaatattttaaaaggccgtggtttcgtttcagacatcaaccatctaaaacgggattttaaagcgatattttacaagaatgaaaggcacaattgttgatctgtattttttacacttcagtttctaaatcatgaatcgttgccttccacaggaaccctcccttatacattacttgagtgttgtgtagtttttcttcagccaggtatttctctgcctagagaggggaagagaaatgtgttctccaggactgatcccctttgtagattttgtacctgaagagttacctggcagggcaccacccttggctaggcccaggtgtgtgtttctttcttgcctggcatggaccccgaggcaggtgatgtggggcctggcgcacctccccgctttggcagctgtggcctccctggccagtgcccttgcaggaggccggccggcagcctgatgacccgtactctttagtcactgacgtcagattatttttataacgttccctgacagttcagagtcccttcgaattgcacttttctggtttcgcttatttaattaaaagagatgagtgtaagtataaaaaatgaaggtgaaataaccattggaattgtatttggttacttaatactgttccacaacatcttgggacgtctgttttcctttggagagtgaggccttgttattattcttttctgataaagaaaacattttatttcctttgggcttgcattagctctttcctagcaacccattatcccagctcagtacctttcaaacagaaaactagagtctggggttttgttgtgatctgaatttgtaagttattaatgtgaaagggggagcaggaagctccccctttgcacaaagggggatttgtttgcacaaagttcactgtaaatactgtgagaattgaattctgaaaaggtcatatttagtgatttcaaaagcacacatttaaatgaagactgactaaataaaaggtaccacacactt

SEQ ID NO: 8319 - protein, 337 aa, Homo sapiens; identical to SEQ ID NO: 946

SEQ ID NO: 8320 - DNA, 3673 bp, Homo sapiens
gagaacctagtatcacactaggcttctgaaaacaccaatcaagagttgcttaatgcaggggtcccttacccctgggctgcagacctgtacctgtccatggcctgttaggaaccgggcagcacagtaggaggactgaggagggaggaagtaaaagggagctgtgactgtggtacgtatctgaaagcaagtgttagagagggagtggagaacgcataagcaagctggtttgaccagaaacagaactgcctgtgacagattaagagacaagcaaggcttggaatctgagagcaagcaaagagagtggaaatttacagctgccctatgaggcaacctctattaaatggacgataaaggctacttcatctaaagtgctttgagctcaagaaagagctgtcttcagcacctcaccatgtgtctacattttgttgcttagaaaagcctaggcatttctgtaacatttgcattccatattggaagaagagatttctacacatgaaaaaaatgcctttgtttagtaaatcacacaaaaatccagcagaaattgtgaaaatcctgaaagacaatttggccattttggaaaagcaagacaaaaagacagacaaggcttcagaagaagtgtctaaatcactgcaagcaatgaaagaaattctgtgtggtacaaacgagaaagaacccccaacagaagcagtggctcagctagcacaagaactctacagcagtggcctgctagtgacactgatagctgacctgcagctgatagactttgagggaaaaaaagatgtgacccagatatttaacaacatcttgagaagacagataggcactcggagtcctactgtggagtatattagtgctcatcctcatatcctgtttatgctcctcaaaggatatgaagccccacagattgccttacgttgtgggattatgctgagagaatgtattcgacatgaaccacttgccaaaatcatcctcttttctaatcaattcagagatttctttaagtacgtggagttgtcaacatttgatattgcttcagatgcctttgctactttcaaggatttactaaccagacataaagtgttggtagcagacttcttagaacaaaattacgacactatttttgaagactatgagaaattgcttcagtctgagaattatgttactaagagacagtctttaaagctgctaggggagctgatcctggaccgtcacaactttgccatcatgacaaagtatatcagcaagccggagaacctgaaactcatgatgaacctccttcgggataaaagtcccaacatccagtttgaagcctttcatgtttttaaggtgtttgtggccagtcctcacaaaacacagcctattgtggagatcctgttaaaaaatcagcccaaactcattgagtttctgagcagcttccaaaaagaaaggacggatgatgagcagttcgctgacgagaagaactacttgattaaacagatccgagacttgaagaaaacggccccttgaagagctccccggcccctgtcacagtcagtcgtctcatttgtccagtttgtacagtgtgtcatttcagaaagtcatcattcttgggaagactttggaggtgcctattttttctgctgtaattgttctgggtagatggagtataaacatttgaatggaaaaaaattaacctagaataatatattcattttagtcaagtctgtgattatttatgtgaaatgagaaccattgtatcagatgttgataaaagcaattttaacttgcagatgtgagcccctgggcacaatgagccgctaaatgggagctcaattgacaggcatcaccaagtcttcaaggaggactgagttctcaggggagaactgggaatggggccagggtgcaaaaatgctttgcccatctgtaggtagacacacagatcgctcagggcactgagagatcccagaaggtaacgttaatgttttcagtcattgtgtgtcctttgttgctgccaatgtctttggactgtaatcagtgcatccacacctcccaggatccagtgctccctctcagctcagtctcccctctctccctgtcctgcattccatcccagctcctcagcatggcctcagtgggcgcacccatgcctcccgcagtccaggtgagcaggggagcaactgagcaggaagaggatggatcaacaagggtcacggggaataggggacccacggggtgtgacctgcttgctagagaactgtgaacatgtggctctggatagagtgactgctgctccatattagcttccagagggtgagtgagggacagaatatttccttcataatggtcatgggtgaatgctttctgctgtaagtgtcttttagagtaggaatcagcatagtgggatgcccagcaggcacaaaccatgggtccagggagtctcagcggggaacttctatcagtatcaataaccattggaaggagaaatgattcatgtgtgaaaaaattctcagatccatcaataaatttttttcagagccattgtatcagatgttgataaaagcaatttttttctaataagctgtcattctataattgcccatcacagtctttagtgaacacatagaaagcctatacagttttggtcctgaatagtctcttgtgactaggatgattgaggtgttaattcctcttccttataaaaaggcttggaatcaaaaatattttaaaaggccgtggtttcgtttcagacatcaaccatctaaaacgggattttaaagcgatattttacaagaatgaaaggcacaattgttgatctgtattttttacacttcagtttctaaatcatgaatcgttgccttccacaggaaccctcccttatacattacttgagtgttgtgtagtttttcttcagccaggtatttctctgcctagagaggggaagagaaatgtgttctccaggactgatcccctttgtagattttgtacctgaagagttacctggcagggcaccacccttggctaggcccaggtgtgtgtttctttcttgcctggcatggaccccgaggcaggtgatgtggggcctggcgcacctccccgctttggcagctgtggcctccctggccagtgcccttgcaggaggccggccggcagcctgatgacccgtactctttagtcactgacgtcagattatttttataacgttccctgacagttcagagtcccttcgaattgcacttttctggtttcgcttatttaattaaaagagatgagtgtaagtataaaaaatgaaggtgaaataaccattggaattgtatttggttacttaatactgttccacaacatcttgggacgtctgttttcctttggagagtgaggccttgttattattcttttctgataaagaaaacattttatttcctttgggcttgcattagctctttcctagcaacccattatcccagctcagtacctttcaaacagaaaactagagtctggggttttgttgtgatctgaatttgtaagttattaatgtgaaagggggagcaggaagctccccctttgcacaaagggggatttgtttgcacaaagttcactgtaaatactgtgagaattgaattctgaaaaggtcatatttagtgatttcaaaagcacacatttaaatgaagactgactaaataaaaggtaccacacactt

SEQ ID NO: 8321 - protein, 337 aa, Homo sapiens; identical to SEQ ID NO: 946

SEQ ID NO: 8322 - DNA, 3429 bp, Homo sapiens
agcgttttgttagggaagaagtggagaacagatattggaaggcaattagctgtctctaatacattgataaaatatataactataactgcaaaatgctaataacccagcagaggagtagatttgggaacataagatgaaaaagtcaacaagtgcattgatcacaacatatggtaatgatagcgtgattgtgatgacctttgttttatacctccttttacattccatattggaagaagagatttctacacatgaaaaaaatgcctttgtttagtaaatcacacaaaaatccagcagaaattgtgaaaatcctgaaagacaatttggccattttggaaaagcaagacaaaaagacagacaaggcttcagaagaagtgtctaaatcactgcaagcaatgaaagaaattctgtgtggtacaaacgagaaagaacccccaacagaagcagtggctcagctagcacaagaactctacagcagtggcctgctagtgacactgatagctgacctgcagctgatagactttgagggaaaaaaagatgtgacccagatatttaacaacatcttgagaagacagataggcactcggagtcctactgtggagtatattagtgctcatcctcatatcctgtttatgctcctcaaaggatatgaagccccacagattgccttacgttgtgggattatgctgagagaatgtattcgacatgaaccacttgccaaaatcatcctcttttctaatcaattcagagatttctttaagtacgtggagttgtcaacatttgatattgcttcagatgcctttgctactttcaaggatttactaaccagacataaagtgttggtagcagacttcttagaacaaaattacgacactatttttgaagactatgagaaattgcttcagtctgagaattatgttactaagagacagtctttaaagctgctaggggagctgatcctggaccgtcacaactttgccatcatgacaaagtatatcagcaagccggagaacctgaaactcatgatgaacctccttcgggataaaagtcccaacatccagtttgaagcctttcatgtttttaaggtgtttgtggccagtcctcacaaaacacagcctattgtggagatcctgttaaaaaatcagcccaaactcattgagtttctgagcagcttccaaaaagaaaggacggatgatgagcagttcgctgacgagaagaactacttgattaaacagatccgagacttgaagaaaacggccccttgaagagctccccggcccctgtcacagtcagtcgtctcatttgtccagtttgtacagtgtgtcatttcagaaagtcatcattcttgggaagactttggaggtgcctattttttctgctgtaattgttctgggtagatggagtataaacatttgaatggaaaaaaattaacctagaataatatattcattttagtcaagtctgtgattatttatgtgaaatgagaaccattgtatcagatgttgataaaagcaattttaacttgcagatgtgagcccctgggcacaatgagccgctaaatgggagctcaattgacaggcatcaccaagtcttcaaggaggactgagttctcaggggagaactgggaatggggccagggtgcaaaaatgctttgcccatctgtaggtagacacacagatcgctcagggcactgagagatcccagaaggtaacgttaatgttttcagtcattgtgtgtcctttgttgctgccaatgtctttggactgtaatcagtgcatccacacctcccaggatccagtgctccctctcagctcagtctcccctctctccctgtcctgcattccatcccagctcctcagcatggcctcagtgggcgcacccatgcctcccgcagtccaggtgagcaggggagcaactgagcaggaagaggatggatcaacaagggtcacggggaataggggacccacggggtgtgacctgcttgctagagaactgtgaacatgtggctctggatagagtgactgctgctccatattagcttccagagggtgagtgagggacagaatatttccttcataatggtcatgggtgaatgctttctgctgtaagtgtcttttagagtaggaatcagcatagtgggatgcccagcaggcacaaaccatgggtccagggagtctcagcggggaacttctatcagtatcaataaccattggaaggagaaatgattcatgtgtgaaaaaattctcagatccatcaataaatttttttcagagccattgtatcagatgttgataaaagcaatttttttctaataagctgtcattctataattgcccatcacagtctttagtgaacacatagaaagcctatacagttttggtcctgaatagtctcttgtgactaggatgattgaggtgttaattcctcttccttataaaaaggcttggaatcaaaaatattttaaaaggccgtggtttcgtttcagacatcaaccatctaaaacgggattttaaagcgatattttacaagaatgaaaggcacaattgttgatctgtattttttacacttcagtttctaaatcatgaatcgttgccttccacaggaaccctcccttatacattacttgagtgttgtgtagtttttcttcagccaggtatttctctgcctagagaggggaagagaaatgtgttctccaggactgatcccctttgtagattttgtacctgaagagttacctggcagggcaccacccttggctaggcccaggtgtgtgtttctttcttgcctggcatggaccccgaggcaggtgatgtggggcctggcgcacctccccgctttggcagctgtggcctccctggccagtgcccttgcaggaggccggccggcagcctgatgacccgtactctttagtcactgacgtcagattatttttataacgttccctgacagttcagagtcccttcgaattgcacttttctggtttcgcttatttaattaaaagagatgagtgtaagtataaaaaatgaaggtgaaataaccattggaattgtatttggttacttaatactgttccacaacatcttgggacgtctgttttcctttggagagtgaggccttgttattattcttttctgataaagaaaacattttatttcctttgggcttgcattagctctttcctagcaacccattatcccagctcagtacctttcaaacagaaaactagagtctggggttttgttgtgatctgaatttgtaagttattaatgtgaaagggggagcaggaagctccccctttgcacaaagggggatttgtttgcacaaagttcactgtaaatactgtgagaattgaattctgaaaaggtcatatttagtgatttcaaaagcacacatttaaatgaagactgactaaataaaaggtaccacacactt

SEQ ID NO: 8323 - protein, 337 aa, Homo sapiens; identical to SEQ ID NO: 946

SEQ ID NO: 8324 - DNA, 3787 bp, Homo sapiens
atttactagccttcatctcaaccacaacagtcccgccctgcctctaccggggatgagggaaggcgtaacctccgccggggaccaggccgacctacctaaaccgatcactacatgggaggagtcggacgccggccgtcccaccacccagccaggagcccattgattggtcgcactccccactggttcacgcctcagagactcggcgcacttaccgctggcaccgcagtggcgcccgagcgcgccgcctcccgattgactgctagcgctctcggcttgtctcgcgcactgtagctgagccaatggagttactcgtagtcgagaggccggcatcactggagtggtggcgcagctgtttcctccggatatccatcaaatattgagaagaaagaatatcaggagcaaagtgttctaagttgctgttcagaacgtaaagatgcgaaccccaaatcagtggtttgttcattcttcatgcaagagcaatgcactaaaggagagaagcaagctgtggtgatcagtgactttggtgaaagctaagaaggttcaaacaaatttgcaaatgatatacaacttctaagcattccatattggaagaagagatttctacacatgaaaaaaatgcctttgtttagtaaatcacacaaaaatccagcagaaattgtgaaaatcctgaaagacaatttggccattttggaaaagcaagacaaaaagacagacaaggcttcagaagaagtgtctaaatcactgcaagcaatgaaagaaattctgtgtggtacaaacgagaaagaacccccaacagaagcagtggctcagctagcacaagaactctacagcagtggcctgctagtgacactgatagctgacctgcagctgatagactttgagggaaaaaaagatgtgacccagatatttaacaacatcttgagaagacagataggcactcggagtcctactgtggagtatattagtgctcatcctcatatcctgtttatgctcctcaaaggatatgaagccccacagattgccttacgttgtgggattatgctgagagaatgtattcgacatgaaccacttgccaaaatcatcctcttttctaatcaattcagagatttctttaagtacgtggagttgtcaacatttgatattgcttcagatgcctttgctactttcaaggatttactaaccagacataaagtgttggtagcagacttcttagaacaaaattacgacactatttttgaagactatgagaaattgcttcagtctgagaattatgttactaagagacagtctttaaagctgctaggggagctgatcctggaccgtcacaactttgccatcatgacaaagtatatcagcaagccggagaacctgaaactcatgatgaacctccttcgggataaaagtcccaacatccagtttgaagcctttcatgtttttaaggtgtttgtggccagtcctcacaaaacacagcctattgtggagatcctgttaaaaaatcagcccaaactcattgagtttctgagcagcttccaaaaagaaaggacggatgatgagcagttcgctgacgagaagaactacttgattaaacagatccgagacttgaagaaaacggccccttgaagagctccccggcccctgtcacagtcagtcgtctcatttgtccagtttgtacagtgtgtcatttcagaaagtcatcattcttgggaagactttggaggtgcctattttttctgctgtaattgttctgggtagatggagtataaacatttgaatggaaaaaaattaacctagaataatatattcattttagtcaagtctgtgattatttatgtgaaatgagaaccattgtatcagatgttgataaaagcaattttaacttgcagatgtgagcccctgggcacaatgagccgctaaatgggagctcaattgacaggcatcaccaagtcttcaaggaggactgagttctcaggggagaactgggaatggggccagggtgcaaaaatgctttgcccatctgtaggtagacacacagatcgctcagggcactgagagatcccagaaggtaacgttaatgttttcagtcattgtgtgtcctttgttgctgccaatgtctttggactgtaatcagtgcatccacacctcccaggatccagtgctccctctcagctcagtctcccctctctccctgtcctgcattccatcccagctcctcagcatggcctcagtgggcgcacccatgcctcccgcagtccaggtgagcaggggagcaactgagcaggaagaggatggatcaacaagggtcacggggaataggggacccacggggtgtgacctgcttgctagagaactgtgaacatgtggctctggatagagtgactgctgctccatattagcttccagagggtgagtgagggacagaatatttccttcataatggtcatgggtgaatgctttctgctgtaagtgtcttttagagtaggaatcagcatagtgggatgcccagcaggcacaaaccatgggtccagggagtctcagcggggaacttctatcagtatcaataaccattggaaggagaaatgattcatgtgtgaaaaaattctcagatccatcaataaatttttttcagagccattgtatcagatgttgataaaagcaatttttttctaataagctgtcattctataattgcccatcacagtctttagtgaacacatagaaagcctatacagttttggtcctgaatagtctcttgtgactaggatgattgaggtgttaattcctcttccttataaaaaggcttggaatcaaaaatattttaaaaggccgtggtttcgtttcagacatcaaccatctaaaacgggattttaaagcgatattttacaagaatgaaaggcacaattgttgatctgtattttttacacttcagtttctaaatcatgaatcgttgccttccacaggaaccctcccttatacattacttgagtgttgtgtagtttttcttcagccaggtatttctctgcctagagaggggaagagaaatgtgttctccaggactgatcccctttgtagattttgtacctgaagagttacctggcagggcaccacccttggctaggcccaggtgtgtgtttctttcttgcctggcatggaccccgaggcaggtgatgtggggcctggcgcacctccccgctttggcagctgtggcctccctggccagtgcccttgcaggaggccggccggcagcctgatgacccgtactctttagtcactgacgtcagattatttttataacgttccctgacagttcagagtcccttcgaattgcacttttctggtttcgcttatttaattaaaagagatgagtgtaagtataaaaaatgaaggtgaaataaccattggaattgtatttggttacttaatactgttccacaacatcttgggacgtctgttttcctttggagagtgaggccttgttattattcttttctgataaagaaaacattttatttcctttgggcttgcattagctctttcctagcaacccattatcccagctcagtacctttcaaacagaaaactagagtctggggttttgttgtgatctgaatttgtaagttattaatgtgaaagggggagcaggaagctccccctttgcacaaagggggatttgtttgcacaaagttcactgtaaatactgtgagaattgaattctgaaaaggtcatatttagtgatttcaaaagcacacatttaaatgaagactgactaaataaaaggtaccacacactt

SEQ ID NO: 8325 - protein, 337 aa, Homo sapiens; identical to SEQ ID NO: 946

SEQ ID NO: 8326 - DNA, 4176 bp, Homo sapiens
atttactagccttcatctcaaccacaacagtcccgccctgcctctaccggggatgagggaaggcgtaacctccgccggggaccaggccgacctacctaaaccgatcactacatgggaggagtcggacgccggccgtcccaccacccagccaggagcccattgattggtcgcactccccactggttcacgcctcagagactcggcgcacttaccgctggcaccgcagtggcgcccgagcgcgccgcctcccgattgactgctagcgctctcggcttgtctcgcgcactgtagctgagccaatggagttactcgtagtcgagaggccggcatcactggagtggtggcgcagctgtttcctccggatatccatcaaatattgagaagaaagaatatcaggagcaaagtgttctaagttgctgttcagaacgtaaagatgcgaaccccaaatcagtggtttgttcattcttcatgcaagagcaatgcactaaaggagagaagcaagctgtggtgatcagtgactttggtgaaagctaagaaggttcaaacaaatttgcaaatgatatacaacttctaaggcaaatctttcatctgcagttttgactctatcccaatggagaaattgttaatcttttagtaagcattaagaattgtatagaaaatgcagaatttgtttggaagaaaagcatggataattcatttgtgatgaatgttgactccacaaagggtttgttcaagtatttggagacggttgttaaattgccttttaaggaggactgaggagggaggaagtaaaagggagctgtgactgtggtacgtatctgaaagcaagtgttagagagggagtggagaacgcataagcaagctggtttgaccagaaacagaactgcctgtgacagattaagagacaagcaaggcttggaatctgagagcaagcaaagagagtggaaatttacagctgccctatcattccatattggaagaagagatttctacacatgaaaaaaatgcctttgtttagtaaatcacacaaaaatccagcagaaattgtgaaaatcctgaaagacaatttggccattttggaaaagcaagacaaaaagacagacaaggcttcagaagaagtgtctaaatcactgcaagcaatgaaagaaattctgtgtggtacaaacgagaaagaacccccaacagaagcagtggctcagctagcacaagaactctacagcagtggcctgctagtgacactgatagctgacctgcagctgatagactttgagggaaaaaaagatgtgacccagatatttaacaacatcttgagaagacagataggcactcggagtcctactgtggagtatattagtgctcatcctcatatcctgtttatgctcctcaaaggatatgaagccccacagattgccttacgttgtgggattatgctgagagaatgtattcgacatgaaccacttgccaaaatcatcctcttttctaatcaattcagagatttctttaagtacgtggagttgtcaacatttgatattgcttcagatgcctttgctactttcaaggatttactaaccagacataaagtgttggtagcagacttcttagaacaaaattacgacactatttttgaagactatgagaaattgcttcagtctgagaattatgttactaagagacagtctttaaagctgctaggggagctgatcctggaccgtcacaactttgccatcatgacaaagtatatcagcaagccggagaacctgaaactcatgatgaacctccttcgggataaaagtcccaacatccagtttgaagcctttcatgtttttaaggtgtttgtggccagtcctcacaaaacacagcctattgtggagatcctgttaaaaaatcagcccaaactcattgagtttctgagcagcttccaaaaagaaaggacggatgatgagcagttcgctgacgagaagaactacttgattaaacagatccgagacttgaagaaaacggccccttgaagagctccccggcccctgtcacagtcagtcgtctcatttgtccagtttgtacagtgtgtcatttcagaaagtcatcattcttgggaagactttggaggtgcctattttttctgctgtaattgttctgggtagatggagtataaacatttgaatggaaaaaaattaacctagaataatatattcattttagtcaagtctgtgattatttatgtgaaatgagaaccattgtatcagatgttgataaaagcaattttaacttgcagatgtgagcccctgggcacaatgagccgctaaatgggagctcaattgacaggcatcaccaagtcttcaaggaggactgagttctcaggggagaactgggaatggggccagggtgcaaaaatgctttgcccatctgtaggtagacacacagatcgctcagggcactgagagatcccagaaggtaacgttaatgttttcagtcattgtgtgtcctttgttgctgccaatgtctttggactgtaatcagtgcatccacacctcccaggatccagtgctccctctcagctcagtctcccctctctccctgtcctgcattccatcccagctcctcagcatggcctcagtgggcgcacccatgcctcccgcagtccaggtgagcaggggagcaactgagcaggaagaggatggatcaacaagggtcacggggaataggggacccacggggtgtgacctgcttgctagagaactgtgaacatgtggctctggatagagtgactgctgctccatattagcttccagagggtgagtgagggacagaatatttccttcataatggtcatgggtgaatgctttctgctgtaagtgtcttttagagtaggaatcagcatagtgggatgcccagcaggcacaaaccatgggtccagggagtctcagcggggaacttctatcagtatcaataaccattggaaggagaaatgattcatgtgtgaaaaaattctcagatccatcaataaatttttttcagagccattgtatcagatgttgataaaagcaatttttttctaataagctgtcattctataattgcccatcacagtctttagtgaacacatagaaagcctatacagttttggtcctgaatagtctcttgtgactaggatgattgaggtgttaattcctcttccttataaaaaggcttggaatcaaaaatattttaaaaggccgtggtttcgtttcagacatcaaccatctaaaacgggattttaaagcgatattttacaagaatgaaaggcacaattgttgatctgtattttttacacttcagtttctaaatcatgaatcgttgccttccacaggaaccctcccttatacattacttgagtgttgtgtagtttttcttcagccaggtatttctctgcctagagaggggaagagaaatgtgttctccaggactgatcccctttgtagattttgtacctgaagagttacctggcagggcaccacccttggctaggcccaggtgtgtgtttctttcttgcctggcatggaccccgaggcaggtgatgtggggcctggcgcacctccccgctttggcagctgtggcctccctggccagtgcccttgcaggaggccggccggcagcctgatgacccgtactctttagtcactgacgtcagattatttttataacgttccctgacagttcagagtcccttcgaattgcacttttctggtttcgcttatttaattaaaagagatgagtgtaagtataaaaaatgaaggtgaaataaccattggaattgtatttggttacttaatactgttccacaacatcttgggacgtctgttttcctttggagagtgaggccttgttattattcttttctgataaagaaaacattttatttcctttgggcttgcattagctctttcctagcaacccattatcccagctcagtacctttcaaacagaaaactagagtctggggttttgttgtgatctgaatttgtaagttattaatgtgaaagggggagcaggaagctccccctttgcacaaagggggatttgtttgcacaaagttcactgtaaatactgtgagaattgaattctgaaaaggtcatatttagtgatttcaaaagcacacatttaaatgaagactgactaaataaaaggtaccacacactt

SEQ ID NO: 8327 - protein, 337 aa, Homo sapiens; identical to SEQ ID NO: 946

SEQ ID NO: 8328 - DNA, 1741 bp, Homo sapiens
gagtatatctaagtgtttcagaatacactcaaattccagaatacgtctgcaatagtgccaggcacatagtagatcttcagtggatattgaatgaatcgtgacaaatgatatgaagccccacagattgccttacgttgtgggattatgctgagagaatgtattcgacatgaaccacttgccaaaatcatcctcttttctaatcaattcagagatttctttaagtacgtggagttgtcaacatttgatattgcttcagatgcctttgctactttcaaggatttactaaccagacataaagtgttggtagcagacttcttagaacaaaattacgacactatttttgaagactatgagaaattgcttcagtctgagaattatgttactaagagacagtctttaaagctgctaggggagctgatcctggaccgtcacaactttgccatcatgacaaagtatatcagcaagccggagaacctgaaactcatgatgaacctccttcgggataaaagtcccaacatccagtttgaagcctttcatgtttttaaggtgtttgtggccagtcctcacaaaacacagcctattgtggagatcctgttaaaaaatcagcccaaactcattgagtttctgagcagcttccaaaaagaaaggacggatgatgagcagttcgctgacgagaagaactacttgattaaacagatccgagacttgaagaaaacggccccttgaagagctccccggcccctgtcacagtcagtcgtctcatttgtccagtttgtacagtgtgtcatttcagaaagtcatcattcttgggaagactttggaggtgcctattttttctgctgtaattgttctgggtagatggagtataaacatttgaatggaaaaaaattaacctagaataatatattcattttagtcaagtctgtgattatttatgtgaaatgagaaccattgtatcagatgttgataaaagcaattttaacttgcagatgtgagcccctgggcacaatgagccgctaaatgggagctcaattgacaggcatcaccaagtcttcaaggaggactgagttctcaggggagaactgggaatggggccagggtgcaaaaatgctttgcccatctgtaggtagacacacagatcgctcagggcactgagagatcccagaaggtaacgttaatgttttcagtcattgtgtgtcctttgttgctgccaatgtctttggactgtaatcagtgcatccacacctcccaggatccagtgctccctctcagctcagtctcccctctctccctgtcctgcattccatcccagctcctcagcatggcctcagtgggcgcacccatgcctcccgcagtccaggtgagcaggggagcaactgagcaggaagaggatggatcaacaagggtcacggggaataggggacccacggggtgtgacctgcttgctagagaactgtgaacatgtggctctggatagagtgactgctgctccatattagcttccagagggtgagtgagggacagaatatttccttcataatggtcatgggtgaatgctttctgctgtaagtgtcttttagagtaggaatcagcatagtgggatgcccagcaggcacaaaccatgggtccagggagtctcagcggggaacttctatcagtatcaataaccattggaaggagaaatgattcatgtgtgaaaaaattctcagatccatcaataaatttttttcagagccattgt

SEQ ID NO: 8329 - protein, 193 aa, Homo sapiens; identical to SEQ ID NO: 8305

SEQ ID NO: 8330 - DNA, 2527 bp, Homo sapiens
gtgacgttacaggactgaggagggaggaagtaaaagggagctgtgactgtggtacgtatctgaaagcaagtgttagagagggagtggagaacgcataagcaagctggtttgaccagaaacagaactgcctgtgacagattaagagacaagcaaggcttggaatctgagagcaagcaaagagagtggaaatttacagctgccctatgtgagtgttcaagtgatcattttctggtaacgttttccagtggtaactgttactcttcaaaaagagggacagaaagtcaagacctaattgtggaaactcttttctctgccacgcttggtaataggaggcaacctctattaaatggacgataaaggctacttcatctaaagtgctttgagctcaagaaagagctgtcttcagcacctcaccatgtgtctacattttgttgcttagaaaagcctaggcatttctgtaacatttgcattccatattggaagaagagatttctacacatgaaaaaaatgcctttgtttagtaaatcacacaaaaatccagcagaaattgtgaaaatcctgaaagacaatttggccattttggaaaagcaagacaaaaagacagacaaggcttcagaagaagtgtctaaatcactgcaagcaatgaaagaaattctgtgtggtacaaacgagaaagaacccccaacagaagcagtggctcagctagcacaagaactctacagcagtggcctgctagtgacactgatagctgacctgcagctgatagactttgagggaaaaaaagatgtgacccagatatttaacaacatcttgagaagacagataggcactcggagtcctactgtggagtatattagtgctcatcctcatatcctgtttatgctcctcaaaggatatgaagccccacagattgccttacgttgtgggattatgctgagagaatgtattcgacatgaaccacttgccaaaatcatcctcttttctaatcaattcagagatttctttaagtacgtggagttgtcaacatttgatattgcttcagatgcctttgctactttcaaggatttactaaccagacataaagtgttggtagcagacttcttagaacaaaattacgacactatttttgaagactatgagaaattgcttcagtctgagaattatgttactaagagacagtctttaaagctgctaggggagctgatcctggaccgtcacaactttgccatcatgacaaagtatatcagcaagccggagaacctgaaactcatgatgaacctccttcgggataaaagtcccaacatccagtttgaagcctttcatgtttttaaggtgtttgtggccagtcctcacaaaacacagcctattgtggagatcctgttaaaaaatcagcccaaactcattgagtttctgagcagcttccaaaaagaaaggacggatgatgagcagttcgctgacgagaagaactacttgattaaacagatccgagacttgaagaaaacggccccttgaagagctccccggcccctgtcacagtcagtcgtctcatttgtccagtttgtacagtgtgtcatttcagaaagtcatcattcttgggaagactttggaggtgcctattttttctgctgtaattgttctgggtagatggagtataaacatttgaatggaaaaaaattaacctagaataatatattcattttagtcaagtctgtgattatttatgtgaaatgagaaccattgtatcagatgttgataaaagcaattttaacttgcagatgtgagcccctgggcacaatgagccgctaaatgggagctcaattgacaggcatcaccaagtcttcaaggaggactgagttctcaggggagaactgggaatggggccagggtgcaaaaatgctttgcccatctgtaggtagacacacagatcgctcagggcactgagagatcccagaaggtaacgttaatgttttcagtcattgtgtgtcctttgttgctgccaatgtctttggactgtaatcagtgcatccacacctcccaggatccagtgctccctctcagctcagtctcccctctctccctgtcctgcattccatcccagctcctcagcatggcctcagtgggcgcacccatgcctcccgcagtccaggtgagcaggggagcaactgagcaggaagaggatggatcaacaagggtcacggggaataggggacccacggggtgtgacctgcttgctagagaactgtgaacatgtggctctggatagagtgactgctgctccatattagcttccagagggtgagtgagggacagaatatttccttcataatggtcatgggtgaatgctttctgctgtaagtgtcttttagagtaggaatcagcatagtgggatgcccagcaggcacaaaccatgggtccagggagtctcagcggggaacttctatcagtatcaataaccattggaaggagaaatgattcatgtgtgaaaaaattctcagatccatcaataaatttttttcagagccattgt

SEQ ID NO: 8331 - protein, 337 aa, Homo sapiens; identical to SEQ ID NO: 946

SEQ ID NO: 8332 - DNA, 2521 bp, Homo sapiens
gagaacctagtatcacactaggcttctgaaaacaccaatcaagagttgcttaatgcaggggtcccttacccctgggctgcagacctgtacctgtccatggcctgttaggaaccgggcagcacagtaggaggactgaggagggaggaagtaaaagggagctgtgactgtggtacgtatctgaaagcaagtgttagagagggagtggagaacgcataagcaagctggtttgaccagaaacagaactgcctgtgacagattaagagacaagcaaggcttggaatctgagagcaagcaaagagagtggaaatttacagctgccctatgaggcaacctctattaaatggacgataaaggctacttcatctaaagtgctttgagctcaagaaagagctgtcttcagcacctcaccatgtgtctacattttgttgcttagaaaagcctaggcatttctgtaacatttgcattccatattggaagaagagatttctacacatgaaaaaaatgcctttgtttagtaaatcacacaaaaatccagcagaaattgtgaaaatcctgaaagacaatttggccattttggaaaagcaagacaaaaagacagacaaggcttcagaagaagtgtctaaatcactgcaagcaatgaaagaaattctgtgtggtacaaacgagaaagaacccccaacagaagcagtggctcagctagcacaagaactctacagcagtggcctgctagtgacactgatagctgacctgcagctgatagactttgagggaaaaaaagatgtgacccagatatttaacaacatcttgagaagacagataggcactcggagtcctactgtggagtatattagtgctcatcctcatatcctgtttatgctcctcaaaggatatgaagccccacagattgccttacgttgtgggattatgctgagagaatgtattcgacatgaaccacttgccaaaatcatcctcttttctaatcaattcagagatttctttaagtacgtggagttgtcaacatttgatattgcttcagatgcctttgctactttcaaggatttactaaccagacataaagtgttggtagcagacttcttagaacaaaattacgacactatttttgaagactatgagaaattgcttcagtctgagaattatgttactaagagacagtctttaaagctgctaggggagctgatcctggaccgtcacaactttgccatcatgacaaagtatatcagcaagccggagaacctgaaactcatgatgaacctccttcgggataaaagtcccaacatccagtttgaagcctttcatgtttttaaggtgtttgtggccagtcctcacaaaacacagcctattgtggagatcctgttaaaaaatcagcccaaactcattgagtttctgagcagcttccaaaaagaaaggacggatgatgagcagttcgctgacgagaagaactacttgattaaacagatccgagacttgaagaaaacggccccttgaagagctccccggcccctgtcacagtcagtcgtctcatttgtccagtttgtacagtgtgtcatttcagaaagtcatcattcttgggaagactttggaggtgcctattttttctgctgtaattgttctgggtagatggagtataaacatttgaatggaaaaaaattaacctagaataatatattcattttagtcaagtctgtgattatttatgtgaaatgagaaccattgtatcagatgttgataaaagcaattttaacttgcagatgtgagcccctgggcacaatgagccgctaaatgggagctcaattgacaggcatcaccaagtcttcaaggaggactgagttctcaggggagaactgggaatggggccagggtgcaaaaatgctttgcccatctgtaggtagacacacagatcgctcagggcactgagagatcccagaaggtaacgttaatgttttcagtcattgtgtgtcctttgttgctgccaatgtctttggactgtaatcagtgcatccacacctcccaggatccagtgctccctctcagctcagtctcccctctctccctgtcctgcattccatcccagctcctcagcatggcctcagtgggcgcacccatgcctcccgcagtccaggtgagcaggggagcaactgagcaggaagaggatggatcaacaagggtcacggggaataggggacccacggggtgtgacctgcttgctagagaactgtgaacatgtggctctggatagagtgactgctgctccatattagcttccagagggtgagtgagggacagaatatttccttcataatggtcatgggtgaatgctttctgctgtaagtgtcttttagagtaggaatcagcatagtgggatgcccagcaggcacaaaccatgggtccagggagtctcagcggggaacttctatcagtatcaataaccattggaaggagaaatgattcatgtgtgaaaaaattctcagatccatcaataaatttttttcagagccattgt

SEQ ID NO: 8333 - protein, 337 aa, Homo sapiens; identical to SEQ ID NO: 946

SEQ ID NO: 8334 - DNA, 2277 bp, Homo sapiens
agcgttttgttagggaagaagtggagaacagatattggaaggcaattagctgtctctaatacattgataaaatatataactataactgcaaaatgctaataacccagcagaggagtagatttgggaacataagatgaaaaagtcaacaagtgcattgatcacaacatatggtaatgatagcgtgattgtgatgacctttgttttatacctccttttacattccatattggaagaagagatttctacacatgaaaaaaatgcctttgtttagtaaatcacacaaaaatccagcagaaattgtgaaaatcctgaaagacaatttggccattttggaaaagcaagacaaaaagacagacaaggcttcagaagaagtgtctaaatcactgcaagcaatgaaagaaattctgtgtggtacaaacgagaaagaacccccaacagaagcagtggctcagctagcacaagaactctacagcagtggcctgctagtgacactgatagctgacctgcagctgatagactttgagggaaaaaaagatgtgacccagatatttaacaacatcttgagaagacagataggcactcggagtcctactgtggagtatattagtgctcatcctcatatcctgtttatgctcctcaaaggatatgaagccccacagattgccttacgttgtgggattatgctgagagaatgtattcgacatgaaccacttgccaaaatcatcctcttttctaatcaattcagagatttctttaagtacgtggagttgtcaacatttgatattgcttcagatgcctttgctactttcaaggatttactaaccagacataaagtgttggtagcagacttcttagaacaaaattacgacactatttttgaagactatgagaaattgcttcagtctgagaattatgttactaagagacagtctttaaagctgctaggggagctgatcctggaccgtcacaactttgccatcatgacaaagtatatcagcaagccggagaacctgaaactcatgatgaacctccttcgggataaaagtcccaacatccagtttgaagcctttcatgtttttaaggtgtttgtggccagtcctcacaaaacacagcctattgtggagatcctgttaaaaaatcagcccaaactcattgagtttctgagcagcttccaaaaagaaaggacggatgatgagcagttcgctgacgagaagaactacttgattaaacagatccgagacttgaagaaaacggccccttgaagagctccccggcccctgtcacagtcagtcgtctcatttgtccagtttgtacagtgtgtcatttcagaaagtcatcattcttgggaagactttggaggtgcctattttttctgctgtaattgttctgggtagatggagtataaacatttgaatggaaaaaaattaacctagaataatatattcattttagtcaagtctgtgattatttatgtgaaatgagaaccattgtatcagatgttgataaaagcaattttaacttgcagatgtgagcccctgggcacaatgagccgctaaatgggagctcaattgacaggcatcaccaagtcttcaaggaggactgagttctcaggggagaactgggaatggggccagggtgcaaaaatgctttgcccatctgtaggtagacacacagatcgctcagggcactgagagatcccagaaggtaacgttaatgttttcagtcattgtgtgtcctttgttgctgccaatgtctttggactgtaatcagtgcatccacacctcccaggatccagtgctccctctcagctcagtctcccctctctccctgtcctgcattccatcccagctcctcagcatggcctcagtgggcgcacccatgcctcccgcagtccaggtgagcaggggagcaactgagcaggaagaggatggatcaacaagggtcacggggaataggggacccacggggtgtgacctgcttgctagagaactgtgaacatgtggctctggatagagtgactgctgctccatattagcttccagagggtgagtgagggacagaatatttccttcataatggtcatgggtgaatgctttctgctgtaagtgtcttttagagtaggaatcagcatagtgggatgcccagcaggcacaaaccatgggtccagggagtctcagcggggaacttctatcagtatcaataaccattggaaggagaaatgattcatgtgtgaaaaaattctcagatccatcaataaatttttttcagagccattgt

SEQ ID NO: 8335 - protein, 337 aa, Homo sapiens; identical to SEQ ID NO: 946

SEQ ID NO: 8336 - DNA, 2300 bp, Homo sapiens
agcgctctcggcttgtctcgcgcactgtagctgagccaatggagttactcgtagtcgagaggccggcatcactggagtggtggcgcagctgtttcctccggatatccatcaaatattgagaagaaagaatatcaggagcaaagtgttctaagttgctgttcagaacgtaaagatgcgaaccccaaatcagtggtttgttcattcttcatgcaagagcaatgcactaaaggagagaagcagcattccatattggaagaagagatttctacacatgaaaaaaatgcctttgtttagtaaatcacacaaaaatccagcagaaattgtgaaaatcctgaaagacaatttggccattttggaaaagcaagacaaaaagacagacaaggcttcagaagaagtgtctaaatcactgcaagcaatgaaagaaattctgtgtggtacaaacgagaaagaacccccaacagaagcagtggctcagctagcacaagaactctacagcagtggcctgctagtgacactgatagctgacctgcagctgatagactttgagggaaaaaaagatgtgacccagatatttaacaacatcttgagaagacagataggcactcggagtcctactgtggagtatattagtgctcatcctcatatcctgtttatgctcctcaaaggatatgaagccccacagattgccttacgttgtgggattatgctgagagaatgtattcgacatgaaccacttgccaaaatcatcctcttttctaatcaattcagagatttctttaagtacgtggagttgtcaacatttgatattgcttcagatgcctttgctactttcaaggatttactaaccagacataaagtgttggtagcagacttcttagaacaaaattacgacactatttttgaagactatgagaaattgcttcagtctgagaattatgttactaagagacagtctttaaagctgctaggggagctgatcctggaccgtcacaactttgccatcatgacaaagtatatcagcaagccggagaacctgaaactcatgatgaacctccttcgggataaaagtcccaacatccagtttgaagcctttcatgtttttaaggtgtttgtggccagtcctcacaaaacacagcctattgtggagatcctgttaaaaaatcagcccaaactcattgagtttctgagcagcttccaaaaagaaaggacggatgatgagcagttcgctgacgagaagaactacttgattaaacagatccgagacttgaagaaaacggccccttgaagagctccccggcccctgtcacagtcagtcgtctcatttgtccagtttgtacagtgtgtcatttcagaaagtcatcattcttgggaagactttggaggtgcctattttttctgctgtaattgttctgggtagatggagtataaacatttgaatggaaaaaaattaacctagaataatatattcattttagtcaagtctgtgattatttatgtgaaatgagaaccattgtatcagatgttgataaaagcaattttaacttgcagatgtgagcccctgggcacaatgagccgctaaatgggagctcaattgacaggcatcaccaagtcttcaaggaggactgagttctcaggggagaactgggaatggggccagggtgcaaaaatgctttgcccatctgtaggtagacacacagatcgctcagggcactgagagatcccagaaggtaacgttaatgttttcagtcattgtgtgtcctttgttgctgccaatgtctttggactgtaatcagtgcatccacacctcccaggatccagtgctccctctcagctcagtctcccctctctccctgtcctgcattccatcccagctcctcagcatggcctcagtgggcgcacccatgcctcccgcagtccaggtgagcaggggagcaactgagcaggaagaggatggatcaacaagggtcacggggaataggggacccacggggtgtgacctgcttgctagagaactgtgaacatgtggctctggatagagtgactgctgctccatattagcttccagagggtgagtgagggacagaatatttccttcataatggtcatgggtgaatgctttctgctgtaagtgtcttttagagtaggaatcagcatagtgggatgcccagcaggcacaaaccatgggtccagggagtctcagcggggaacttctatcagtatcaataaccattggaaggagaaatgattcatgtgtgaaaaaattctcagatccatcaataaatttttttcagagccattgt

SEQ ID NO: 8337 - protein, 370 aa, Homo sapiens
MRTPNQWFVHSSCKSNALKERSSIPYWKKRFLHMKKMPLFSKSHKNPAEIVKILKDNLAILEKQDKKTDKASEEVSKSLQAMKEILCGTNEKEPPTEAVAQLAQELYSSGLLVTLIADLQLIDFEGKKDVTQIFNNILRRQIGTRSPTVEYISAHPHILFMLLKGYEAPQIALRCGIMLRECIRHEPLAKIILFSNQFRDFFKYVELSTFDIASDAFATFKDLLTRHKVLVADFLEQNYDTIFEDYEKLLQSENYVTKRQSLKLLGELILDRHNFAIMTKYISKPENLKLMMNLLRDKSPNIQFEAFHVFKVFVASPHKTQPIVEILLKNQPKLIEFLSSFQKERTDDEQFADEKNYLIKQIRDLKKTAP

SEQ ID NO: 8338 - DNA, 3024 bp, Homo sapiens
atttactagccttcatctcaaccacaacagtcccgccctgcctctaccggggatgagggaaggcgtaacctccgccggggaccaggccgacctacctaaaccgatcactacatgggaggagtcggacgccggccgtcccaccacccagccaggagcccattgattggtcgcactccccactggttcacgcctcagagactcggcgcacttaccgctggcaccgcagtggcgcccgagcgcgccgcctcccgattgactgctagcgctctcggcttgtctcgcgcactgtagctgagccaatggagttactcgtagtcgagaggccggcatcactggagtggtggcgcagctgtttcctccggatatccatcaaatattgagaagaaagaatatcaggagcaaagtgttctaagttgctgttcagaacgtaaagatgcgaaccccaaatcagtggtttgttcattcttcatgcaagagcaatgcactaaaggagagaagcaagctgtggtgatcagtgactttggtgaaagctaagaaggttcaaacaaatttgcaaatgatatacaacttctaaggcaaatctttcatctgcagttttgactctatcccaatggagaaattgttaatcttttagtaagcattaagaattgtatagaaaatgcagaatttgtttggaagaaaagcatggataattcatttgtgatgaatgttgactccacaaagggtttgttcaagtatttggagacggttgttaaattgccttttaaggaggactgaggagggaggaagtaaaagggagctgtgactgtggtacgtatctgaaagcaagtgttagagagggagtggagaacgcataagcaagctggtttgaccagaaacagaactgcctgtgacagattaagagacaagcaaggcttggaatctgagagcaagcaaagagagtggaaatttacagctgccctatcattccatattggaagaagagatttctacacatgaaaaaaatgcctttgtttagtaaatcacacaaaaatccagcagaaattgtgaaaatcctgaaagacaatttggccattttggaaaagcaagacaaaaagacagacaaggcttcagaagaagtgtctaaatcactgcaagcaatgaaagaaattctgtgtggtacaaacgagaaagaacccccaacagaagcagtggctcagctagcacaagaactctacagcagtggcctgctagtgacactgatagctgacctgcagctgatagactttgagggaaaaaaagatgtgacccagatatttaacaacatcttgagaagacagataggcactcggagtcctactgtggagtatattagtgctcatcctcatatcctgtttatgctcctcaaaggatatgaagccccacagattgccttacgttgtgggattatgctgagagaatgtattcgacatgaaccacttgccaaaatcatcctcttttctaatcaattcagagatttctttaagtacgtggagttgtcaacatttgatattgcttcagatgcctttgctactttcaaggatttactaaccagacataaagtgttggtagcagacttcttagaacaaaattacgacactatttttgaagactatgagaaattgcttcagtctgagaattatgttactaagagacagtctttaaagctgctaggggagctgatcctggaccgtcacaactttgccatcatgacaaagtatatcagcaagccggagaacctgaaactcatgatgaacctccttcgggataaaagtcccaacatccagtttgaagcctttcatgtttttaaggtgtttgtggccagtcctcacaaaacacagcctattgtggagatcctgttaaaaaatcagcccaaactcattgagtttctgagcagcttccaaaaagaaaggacggatgatgagcagttcgctgacgagaagaactacttgattaaacagatccgagacttgaagaaaacggccccttgaagagctccccggcccctgtcacagtcagtcgtctcatttgtccagtttgtacagtgtgtcatttcagaaagtcatcattcttgggaagactttggaggtgcctattttttctgctgtaattgttctgggtagatggagtataaacatttgaatggaaaaaaattaacctagaataatatattcattttagtcaagtctgtgattatttatgtgaaatgagaaccattgtatcagatgttgataaaagcaattttaacttgcagatgtgagcccctgggcacaatgagccgctaaatgggagctcaattgacaggcatcaccaagtcttcaaggaggactgagttctcaggggagaactgggaatggggccagggtgcaaaaatgctttgcccatctgtaggtagacacacagatcgctcagggcactgagagatcccagaaggtaacgttaatgttttcagtcattgtgtgtcctttgttgctgccaatgtctttggactgtaatcagtgcatccacacctcccaggatccagtgctccctctcagctcagtctcccctctctccctgtcctgcattccatcccagctcctcagcatggcctcagtgggcgcacccatgcctcccgcagtccaggtgagcaggggagcaactgagcaggaagaggatggatcaacaagggtcacggggaataggggacccacggggtgtgacctgcttgctagagaactgtgaacatgtggctctggatagagtgactgctgctccatattagcttccagagggtgagtgagggacagaatatttccttcataatggtcatgggtgaatgctttctgctgtaagtgtcttttagagtaggaatcagcatagtgggatgcccagcaggcacaaaccatgggtccagggagtctcagcggggaacttctatcagtatcaataaccattggaaggagaaatgattcatgtgtgaaaaaattctcagatccatcaataaatttttttcagagccattgt

SEQ ID NO: 8339 - protein, 337 aa, Homo sapiens; identical to SEQ ID NO: 946

SEQ ID NO: 8340 - DNA, 2635 bp, Homo sapiens
atttactagccttcatctcaaccacaacagtcccgccctgcctctaccggggatgagggaaggcgtaacctccgccggggaccaggccgacctacctaaaccgatcactacatgggaggagtcggacgccggccgtcccaccacccagccaggagcccattgattggtcgcactccccactggttcacgcctcagagactcggcgcacttaccgctggcaccgcagtggcgcccgagcgcgccgcctcccgattgactgctagcgctctcggcttgtctcgcgcactgtagctgagccaatggagttactcgtagtcgagaggccggcatcactggagtggtggcgcagctgtttcctccggatatccatcaaatattgagaagaaagaatatcaggagcaaagtgttctaagttgctgttcagaacgtaaagatgcgaaccccaaatcagtggtttgttcattcttcatgcaagagcaatgcactaaaggagagaagcaagctgtggtgatcagtgactttggtgaaagctaagaaggttcaaacaaatttgcaaatgatatacaacttctaagcattccatattggaagaagagatttctacacatgaaaaaaatgcctttgtttagtaaatcacacaaaaatccagcagaaattgtgaaaatcctgaaagacaatttggccattttggaaaagcaagacaaaaagacagacaaggcttcagaagaagtgtctaaatcactgcaagcaatgaaagaaattctgtgtggtacaaacgagaaagaacccccaacagaagcagtggctcagctagcacaagaactctacagcagtggcctgctagtgacactgatagctgacctgcagctgatagactttgagggaaaaaaagatgtgacccagatatttaacaacatcttgagaagacagataggcactcggagtcctactgtggagtatattagtgctcatcctcatatcctgtttatgctcctcaaaggatatgaagccccacagattgccttacgttgtgggattatgctgagagaatgtattcgacatgaaccacttgccaaaatcatcctcttttctaatcaattcagagatttctttaagtacgtggagttgtcaacatttgatattgcttcagatgcctttgctactttcaaggatttactaaccagacataaagtgttggtagcagacttcttagaacaaaattacgacactatttttgaagactatgagaaattgcttcagtctgagaattatgttactaagagacagtctttaaagctgctaggggagctgatcctggaccgtcacaactttgccatcatgacaaagtatatcagcaagccggagaacctgaaactcatgatgaacctccttcgggataaaagtcccaacatccagtttgaagcctttcatgtttttaaggtgtttgtggccagtcctcacaaaacacagcctattgtggagatcctgttaaaaaatcagcccaaactcattgagtttctgagcagcttccaaaaagaaaggacggatgatgagcagttcgctgacgagaagaactacttgattaaacagatccgagacttgaagaaaacggccccttgaagagctccccggcccctgtcacagtcagtcgtctcatttgtccagtttgtacagtgtgtcatttcagaaagtcatcattcttgggaagactttggaggtgcctattttttctgctgtaattgttctgggtagatggagtataaacatttgaatggaaaaaaattaacctagaataatatattcattttagtcaagtctgtgattatttatgtgaaatgagaaccattgtatcagatgttgataaaagcaattttaacttgcagatgtgagcccctgggcacaatgagccgctaaatgggagctcaattgacaggcatcaccaagtcttcaaggaggactgagttctcaggggagaactgggaatggggccagggtgcaaaaatgctttgcccatctgtaggtagacacacagatcgctcagggcactgagagatcccagaaggtaacgttaatgttttcagtcattgtgtgtcctttgttgctgccaatgtctttggactgtaatcagtgcatccacacctcccaggatccagtgctccctctcagctcagtctcccctctctccctgtcctgcattccatcccagctcctcagcatggcctcagtgggcgcacccatgcctcccgcagtccaggtgagcaggggagcaactgagcaggaagaggatggatcaacaagggtcacggggaataggggacccacggggtgtgacctgcttgctagagaactgtgaacatgtggctctggatagagtgactgctgctccatattagcttccagagggtgagtgagggacagaatatttccttcataatggtcatgggtgaatgctttctgctgtaagtgtcttttagagtaggaatcagcatagtgggatgcccagcaggcacaaaccatgggtccagggagtctcagcggggaacttctatcagtatcaataaccattggaaggagaaatgattcatgtgtgaaaaaattctcagatccatcaataaatttttttcagagccattgt

SEQ ID NO: 8341 - protein, 337 aa, Homo sapiens; identical to SEQ ID NO: 946

SEQ ID NO: 8342 - DNA, 918 bp, Homo sapiens
gagtatatctaagtgtttcagaatacactcaaattccagaatacgtctgcaatagtgccaggcacatagtagatcttcagtggatattgaatgaatcgtgacaaatgatatgaagccccacagattgccttacgttgtgggattatgctgagagaatgtattcgacatgaaccacttgccaaaatcatcctcttttctaatcaattcagagatttctttaagtacgtggagttgtcaacatttgatattgcttcagatgcctttgctactttcaaggatttactaaccagacataaagtgttggtagcagacttcttagaacaaaattacgacactatttttgaagactatgagaaattgcttcagtctgagaattatgttactaagagacagtctttaaagctgctaggggagctgatcctggaccgtcacaactttgccatcatgacaaagtatatcagcaagccggagaacctgaaactcatgatgaacctccttcgggataaaagtcccaacatccagtttgaagcctttcatgtttttaaggtgtttgtggccagtcctcacaaaacacagcctattgtggagatcctgttaaaaaatcagcccaaactcattgagtttctgagcagcttccaaaaagaaaggacggatgatgagcagttcgctgacgagaagaactacttgattaaacagatccgagacttgaagaaaacggccccttgaagagctccccggcccctgtcacagtcagtcgtctcatttgtccagtttgtacagtgtgtcatttcagaaagtcatcattcttgggaagactttggaggtgcctattttttctgctgtaattgttctgggtagatggagtataaacatttgaatggaaaaaaattaacctagaataatatattcattttagtc

SEQ ID NO: 8343 - protein, 193 aa, Homo sapiens; identical to SEQ ID NO: 8305

SEQ ID NO: 8344 - DNA, 1704 bp, Homo sapiens
gtgacgttacaggactgaggagggaggaagtaaaagggagctgtgactgtggtacgtatctgaaagcaagtgttagagagggagtggagaacgcataagcaagctggtttgaccagaaacagaactgcctgtgacagattaagagacaagcaaggcttggaatctgagagcaagcaaagagagtggaaatttacagctgccctatgtgagtgttcaagtgatcattttctggtaacgttttccagtggtaactgttactcttcaaaaagagggacagaaagtcaagacctaattgtggaaactcttttctctgccacgcttggtaataggaggcaacctctattaaatggacgataaaggctacttcatctaaagtgctttgagctcaagaaagagctgtcttcagcacctcaccatgtgtctacattttgttgcttagaaaagcctaggcatttctgtaacatttgcattccatattggaagaagagatttctacacatgaaaaaaatgcctttgtttagtaaatcacacaaaaatccagcagaaattgtgaaaatcctgaaagacaatttggccattttggaaaagcaagacaaaaagacagacaaggcttcagaagaagtgtctaaatcactgcaagcaatgaaagaaattctgtgtggtacaaacgagaaagaacccccaacagaagcagtggctcagctagcacaagaactctacagcagtggcctgctagtgacactgatagctgacctgcagctgatagactttgagggaaaaaaagatgtgacccagatatttaacaacatcttgagaagacagataggcactcggagtcctactgtggagtatattagtgctcatcctcatatcctgtttatgctcctcaaaggatatgaagccccacagattgccttacgttgtgggattatgctgagagaatgtattcgacatgaaccacttgccaaaatcatcctcttttctaatcaattcagagatttctttaagtacgtggagttgtcaacatttgatattgcttcagatgcctttgctactttcaaggatttactaaccagacataaagtgttggtagcagacttcttagaacaaaattacgacactatttttgaagactatgagaaattgcttcagtctgagaattatgttactaagagacagtctttaaagctgctaggggagctgatcctggaccgtcacaactttgccatcatgacaaagtatatcagcaagccggagaacctgaaactcatgatgaacctccttcgggataaaagtcccaacatccagtttgaagcctttcatgtttttaaggtgtttgtggccagtcctcacaaaacacagcctattgtggagatcctgttaaaaaatcagcccaaactcattgagtttctgagcagcttccaaaaagaaaggacggatgatgagcagttcgctgacgagaagaactacttgattaaacagatccgagacttgaagaaaacggccccttgaagagctccccggcccctgtcacagtcagtcgtctcatttgtccagtttgtacagtgtgtcatttcagaaagtcatcattcttgggaagactttggaggtgcctattttttctgctgtaattgttctgggtagatggagtataaacatttgaatggaaaaaaattaacctagaataatatattcattttagtc

SEQ ID NO: 8345 - protein, 337 aa, Homo sapiens; identical to SEQ ID NO: 946

SEQ ID NO: 8346 - DNA, 601 bp, Homo sapiens
attctgattatcttggtggaatcttggaaaagctaagcagcttcactcttaataaacagaccttgatcagcaacaagtagtgcagagggagctccttacaactcgaccagtgaacccaatttgagaactgaaggagaaatcaatatctatgcagatcagttccacagggaagacatcctatggggactgtttcttcctgggatgagtagaatggaagccctatgcataattcagttcgtggagaagagcaaaggctggactcatggtcccaatttggaggtgaagcatggtgacaaacgtcaatgggaagcatacacattgcaaagtggcttctctcagcgtctgctgtaaacaccgggtcgtgagttgtctgtgagtgtatgaatgaaaacattccatagagattgtgtggccataatacacaaggagctggactccagcaaatggcccagatcaacattctgaaattgaacttagaaaactatcagatatctggaagtgaagtaaagcttatgaagaaaaaagcagtgtggaactgcagtgatttaaaagaaacaagatgggacccatacactcagcattaaaacatataaatctgtaa

SEQ ID NO: 8347 - protein, 49 aa, Homo sapiens
MSRMEALCIIQFVEKSKGWTHGPNLEVKHGDKRQWEAYTLQSGFSQRLL

SEQ ID NO: 8348 - DNA, 1952 bp, Homo sapiens
gagcagtctccggaagctgcctctggctgctctgttaacgtgtcccgcgagcgaggcgcgtcgcaaaaggtcgcggcggaacttccctgcgcttttcagaccatactctttacggtactaggcactgctgagctgggagatgtcggcggcgtgttgggaggaaccgtggggtcttcccggcggctttgcgaagcgggtcctggtgaccggcggtgctggtttcattgcatcacatatgattgtctctttagtggaagattatccaaactatatgatcataaatctagacaagctggattactgtgcaagcttgaagaatcttgaaaccatttctaacaaacagaactacaaatttatacagggtgacatatgtgattctcactttgtgaaactgctttttgaaacagagaaaatagatatagtactacattttgccgcacaaacacatgtagatctttcattcgtacgtgcctttgagtttacctatgttaatgtttatggcactcacgttttggtaagtgctgctcatgaagccagagtggagaagtttatttatgtcagcacagatgaagtatatggtggcagtcttgataaggaatttgatgaatcttcacccaaacaacctacaaatccttatgcatcatctaaagcagctgctgaatgttttgtacagtcttactgggaacaatataagtttccagttgtcatcacaagaagcagtaatgtttatggaccacatcaatatccagaaaaggttattccaaaatttatatctttgctacagcacaacaggaaatgttgcattcatgggtcagggcttcaaacaagaaacttcctttatgctactgatgttgtagaagcatttctcactgtcctcaaaaaagggaaaccaggtgaaatttataacatcggaaccaattttgaaatgtcagttgtccagcttgccaaagaactaatacaactgatcaaagagaccaattcagagtctgaaatggaaaattgggttgattatgttaatgatagacccaccaatgacatgagatacccaatgaagtcagaaaaaatacatggcttaggatggagacctaaagtgccttggaaagaaggaataaagaaaacaattgaatggtacagagagaattttcacaactggaagaatgtggaaaaggcattagaaccctttccggtataatcaccatttatatagtcgagacagttgtcaaagaagaaagttatcctacctcgccaagtggtatgaaattaagtgaccaaatgaagtgcactcttttcttttggaattagattcatgactttctgtataaaattcaaatgcagaatgcctcaatctttgggagagtttcagtactggcatagaatttaaatgtcaaaattctttctgaaaccctttctcctagaaactaggaaataataggtgtagaagactctccctaagggtagccaggaagaagtctcctgattcggacaaccatgaggggtagtggtgctagggagaaggcaaccttcactggttttgaactcagtgcctaagaaagtctctgaaatgttcgtttttaggcaatataggatgtcttaggccctaattcaccatttcttttttaagatctgatatgctatcattgccttaataatggaacaaaatagaagcatatctaacactttttaaattgataattttgtaaaattgattacgttgaatgctttttaagagaagtgtgtaaagtttttatattttcacaattaacgtatgtaaaaccttgtatcagaaatttatcatgtttactgtttaaaatgattgtatttataaaattgtcaatatcttaatgtatttaatgtagaatattgctttttaaaataatgtttttattttgctgtagaaaaataaaaaaaaatttgattatatatttttaatccttctttgccctaaagacttt

SEQ ID NO: 8349 - protein, 350 aa, Homo sapiens; identical to SEQ ID NO: 948

SEQ ID NO: 8350 - DNA, 1811 bp, Homo sapiens
gttaacgtgtcccgcgagcgaggcgcgtcgcaaaaggtcgcggcggaacttccctgcgcttttcagaccatactctttacggtactaggcactgctgagctgggagatgtcggcggcgtgttgggaggaaccgtggggtcttcccggcggctttgcgaagcgggtcctggtgaccggcggtgctggtttcattgcatcacatatgattgtctctttagtggaagattatccaaactatatgatcataaatctagacaagctggattactgtgcaagcttgaagaatcttgaaaccatttctaacaaacagaactacaaatttatacagatctttcattcgtacgtgcctttgagtttacctatgttaatgtttatggcactcacgttttggtaagtgctgctcatgaagccagagtggagaagtttatttatgtcagcacagatgaagtatatggtggcagtcttgataaggaatttgatgaatcttcacccaaacaacctacaaatccttatgcatcatctaaagcagctgctgaatgttttgtacagtcttactgggaacaatataagtttccagttgtcatcacaagaagcagtaatgtttatggaccacatcaatatccagaaaaggttattccaaaatttatatctttgctacagcacaacaggaaatgttgcattcatgggtcagggcttcaaacaagaaacttcctttatgctactgatgttgtagaagcatttctcactgtcctcaaaaaagggaaaccaggtgaaatttataacatcggaaccaattttgaaatgtcagttgtccagcttgccaaagaactaatacaactgatcaaagagaccaattcagagtctgaaatggaaaattgggttgattatgttaatgatagacccaccaatgacatgagatacccaatgaagtcagaaaaaatacatggcttaggatggagacctaaagtgccttggaaagaaggaataaagaaaacaattgaatggtacagagagaattttcacaactggaagaatgtggaaaaggcattagaaccctttccggtataatcaccatttatatagtcgagacagttgtcaaagaagaaagttatcctacctcgccaagtggtatgaaattaagtgaccaaatgaagtgcactcttttcttttggaattagattcatgactttctgtataaaattcaaatgcagaatgcctcaatctttgggagagtttcagtactggcatagaatttaaatgtcaaaattctttctgaaaccctttctcctagaaactaggaaataataggtgtagaagactctccctaagggtagccaggaagaagtctcctgattcggacaaccatgaggggtagtggtgctagggagaaggcaaccttcactggttttgaactcagtgcctaagaaagtctctgaaatgttcgtttttaggcaatataggatgtcttaggccctaattcaccatttcttttttaagatctgatatgctatcattgccttaataatggaacaaaatagaagcatatctaacactttttaaattgataattttgtaaaattgattacgttgaatgctttttaagagaagtgtgtaaagtttttatattttcacaattaacgtatgtaaaaccttgtatcagaaatttatcatgtttactgtttaaaatgattgtatttataaaattgtcaatatcttaatgtatttaatgtagaatattgctttttaaaataatgtttttattttgctgtagaaaaataaaaaaaaatttgattatatatttttaatccttc

SEQ ID NO: 8351 - protein, 109 aa, Homo sapiens
MKPEWRSLFMSAQMKYMVAVLIRNLMNLHPNNLQILMHHLKQLLNVLYSLTGNNISFQLSSQEAVMFMDHINIQKRLFQNLYLCYSTTGNVAFMGQGFKQETSFMLLML

SEQ ID NO: 8352 - DNA, 1795 bp, Homo sapiens
gttaacgtgtcccgcgagcgaggcgcgtcgcaaaaggtcgcggcggaacttccctgcgcttttcagaccatactctttacggtactaggcactgctgagctgggagatgtcggcggcgtgttgggaggaaccgtggggtcttcccggcggctttgcgaagcgggtcctggtgaccggcggtgctggtttcattgcatcacatatgattgtctctttagtggaagattatccaaactatatgatcataaatctagacaagctggattactgtgcaagcttgaagaatcttgaaaccatttctaacaaacagaactacaaatttatacagatctttcattcgtacgtgcctttgagtttacctatgttaatgtttatggcactcacgttttggtaagtgctgctcatgaagccagagtggagaagtttatttatgtcagcacagatgaagtatatggtggcagtcttgataaggaatttgatgaatcttcacccaaacaacctacaaatccttatgcatcatctaaagcagctgctgaatgttttgtacagtcttactgggaacaatataagtttccagttgtcatcacaagaagcagtaatgtttatggaccacatcaatatccagaaaaggttattccaaaatttatatctttgctacagcacaacaggaaatgttgcattcatgggtcagggcttcaaacaagaaacttcctttatgctactgatgttgtagaagcatttctcactgtcctcaaaaaagggaaaccaggtgaaatttataacatcggaaccaattttgaaatgtcagttgtccagcttgccaaagaactaatacaactgatcaaagagaccaattcagagtctgaaatggaaaattgggttgattatgttaatgatagacccaccaatgacatgagatacccaatgaagtcagaaaaaatacatggcttaggatggagacctaaagtgccttggaaagaaggaataaagaaaacaattgaatggtacagagagaattttcacaactggaagaatgtggaaaaggcattagaaccctttccggtataatcaccatttatatagtcgagacagttgtcaaagaagaaagttatcctacctcgccaagtggtatgaaattaagtgaccaaatgaagtgcactcttttcttttggaattagattcatgactttctgtataaaattcaaatgcagaatgcctcaatctttgggagagtttcagtactggcatagaatttaaatgtcaaaattctttctgaaaccctttctcctagaaactaggaaataataggtgtagaagactctccctaagggtagccaggaagaagtctcctgattcggacaaccatgaggggtagtggtgctagggagaaggcaaccttcactggttttgaactcagtgcctaagaaagtctctgaaatgttcgtttttaggcaatataggatgtcttaggccctaattcaccatttcttttttaagatctgatatgctatcattgccttaataatggaacaaaatagaagcatatctaacactttttaaattgataattttgtaaaattgattacgttgaatgctttttaagagaagtgtgtaaagtttttatattttcacaattaacgtatgtaaaaccttgtatcagaaatttatcatgtttactgtttaaaatgattgtatttataaaattgtcaatatcttaatgtatttaatgtagaatattgctttttaaaataatgtttttattttgctgtagaaaaataaaaaaaaatttgattat

SEQ ID NO: 8353 - protein, 109 aa, Homo sapiens; identical to SEQ ID NO: 8351

SEQ ID NO: 8354 - DNA, 1919 bp, Homo sapiens
gagcagtctccggaagctgcctctggctgctctgttaacgtgtcccgcgagcgaggcgcgtcgcaaaaggtcgcggcggaacttccctgcgcttttcagaccatactctttacggtactaggcactgctgagctgggagatgtcggcggcgtgttgggaggaaccgtggggtcttcccggcggctttgcgaagcgggtcctggtgaccggcggtgctggtttcattgcatcacatatgattgtctctttagtggaagattatccaaactatatgatcataaatctagacaagctggattactgtgcaagcttgaagaatcttgaaaccatttctaacaaacagaactacaaatttatacagggtgacatatgtgattctcactttgtgaaactgctttttgaaacagagaaaatagatatagtactacattttgccgcacaaacacatgtagatctttcattcgtacgtgcctttgagtttacctatgttaatgtttatggcactcacgttttggtaagtgctgctcatgaagccagagtggagaagtttatttatgtcagcacagatgaagtatatggtggcagtcttgataaggaatttgatgaatcttcacccaaacaacctacaaatccttatgcatcatctaaagcagctgctgaatgttttgtacagtcttactgggaacaatataagtttccagttgtcatcacaagaagcagtaatgtttatggaccacatcaatatccagaaaaggttattccaaaatttatatctttgctacagcacaacaggaaatgttgcattcatgggtcagggcttcaaacaagaaacttcctttatgctactgatgttgtagaagcatttctcactgtcctcaaaaaagggaaaccaggtgaaatttataacatcggaaccaattttgaaatgtcagttgtccagcttgccaaagaactaatacaactgatcaaagagaccaattcagagtctgaaatggaaaattgggttgattatgttaatgatagacccaccaatgacatgagatacccaatgaagtcagaaaaaatacatggcttaggatggagacctaaagtgccttggaaagaaggaataaagaaaacaattgaatggtacagagagaattttcacaactggaagaatgtggaaaaggcattagaaccctttccggtataatcaccatttatatagtcgagacagttgtcaaagaagaaagttatcctacctcgccaagtggtatgaaattaagtgaccaaatgaagtgcactcttttcttttggaattagattcatgactttctgtataaaattcaaatgcagaatgcctcaatctttgggagagtttcagtactggcatagaatttaaatgtcaaaattctttctgaaaccctttctcctagaaactaggaaataataggtgtagaagactctccctaagggtagccaggaagaagtctcctgattcggacaaccatgaggggtagtggtgctagggagaaggcaaccttcactggttttgaactcagtgcctaagaaagtctctgaaatgttcgtttttaggcaatataggatgtcttaggccctaattcaccatttcttttttaagatctgatatgctatcattgccttaataatggaacaaaatagaagcatatctaacactttttaaattgataattttgtaaaattgattacgttgaatgctttttaagagaagtgtgtaaagtttttatattttcacaattaacgtatgtaaaaccttgtatcagaaatttatcatgtttactgtttaaaatgattgtatttataaaattgtcaatatcttaatgtatttaatgtagaatattgctttttaaaataatgtttttattttgctgtagaaaaataaaaaaaaatttgattat

SEQ ID NO: 8355 - protein, 350 aa, Homo sapiens; identical to SEQ ID NO: 948

SEQ ID NO: 8356 - DNA, 717 bp, Homo sapiens
atgccccactaaatttaagaatcatttctccagtgtaatagtttttaaaataatctgtatcttatttttataattgttgagataatttcagatcttaatgacctatcatagaactttgaattatagcattaaaatttgaaatctatttttatataattttactttctcaaaggacttatttaattcatagaactgtagatatttctttaaaatgaacttatgacataaaattgaatacacatttcacaggggtcactttcctactgagtcccctcagaaggtttggagattaagaaatatgaacaaaatttagaaaagctacgagaatttgtattttcagtaaagattctgggatccccatgggaattagcttctctggagttgtagtacccagtcaatgctttaggagagtttacctttttacactttatgatttcacttcgtttaatctctttagttgcattcatgggtcagggcttcaaacaagaaacttcctttatgctactgatgttgtagaagcatttctcactgtcctcaaaaaagggaaaccaggtgaaatttataacatcggaaccaattttgaaatgtcagttgtccagcttgccaaagaactaatacaactgatcaaagagaccaattcagagtctgaaatggaaaattgggttgattatgttaatgatagacccaccaatgacatgagatacccaatgaagtcag

SEQ ID NO: 8357 - protein, 118 aa, Homo sapiens
MGISFSGVVVPSQCFRRVYLFTLYDFTSFNLFSCIHGSGLQTRNFLYATDVVEAFLTVLKKGKPGEIYNIGTNFEMSVVQLAKELIQLIKETNSESEMENWVDYVNDRPTNDMRYPMK

SEQ ID NO: 8358 - DNA, 1056 bp, Homo sapiens
gagcagtctccggaagctgcctctggctgctctgttaacgtgtcccgcgagcgaggcgcgtcgcaaaaggtcgcggcggaacttccctgcgcttttcagaccatactctttacggtactaggcactgctgagctgggagatgtcggcggcgtgttgggaggaaccgtggggtcttcccggcggctttgcgaagcgggtcctggtgaccggcggtgctggtttcattgcatcacatatgattgtctctttagtggaagattatccaaactatatgatcataaatctagacaagctggattactgtgcaagcttgaagaatcttgaaaccatttctaacaaacagaactacaaatttatacagggtgacatatgtgattctcactttgtgaaactgctttttgaaacagagaaaatagatatagtactacattttgccgcacaaacacatgtagatctttcattcgtacgtgcctttgagtttacctatgttaatgtttatggcactcacgttttggtaagtgctgctcatgaagccagagtggagaagtttatttatgtcagcacagatgaagtatatggtggcagtcttgataaggaatttgatgaatcttcacccaaacaacctacaaatccttatgcatcatctaaagcagctgctgaatgttttgtacagtcttactgggaacaatataagtttccagttgtcatcacaagaagcagtaatgtttatggaccacatcaatatccagaaaaggttattccaaaatttatatctttgctacagcacaacaggaaatgttgcattcatgggtcagggcttcaaacaagaaacttcctttatgctactgatgttgtagaagcatttctcactgtcctcaaaaaagggaaaccaggtgaaatttataacatcggaaccaattttgaaatgtcagttgtccagcttgccaaagaactaatacaactgatcaaagagaccaattcagagtctgaaatggaaaattgggttgattatgttaatgatagacccaccaatgacatgagatacccaatgaagtc

SEQ ID NO: 8359 - protein, 304 aa, Homo sapiens
MSAACWEEPWGLPGGFAKRVLVTGGAGFIASHMIVSLVEDYPNYMIINLDKLDYCASLKNLETISNKQNYKFIQGDICDSHFVKLLFETEKIDIVLHFAAQTHVDLSFVRAFEFTYVNVYGTHVLVSAAHEARVEKFIYVSTDEVYGGSLDKEFDESSPKQPTNPYASSKAAAECFVQSYWEQYKFPVVITRSSNVYGPHQYPEKVIPKFISLLQHNRKCCIHGSGLQTRNFLYATDVVEAFLTVLKKGKPGEIYNIGTNFEMSVVQLAKELIQLIKETNSESEMENWVDYVNDRPTNDMRYPM

SEQ ID NO: 8360 - DNA, 1913 bp, Homo sapiens
agtagcaagacgtgctaggcaatgaggagggagatgagttttccgtaacctgaagcaacatcctcctgattcctcattaaagaaaaaggcgggaactagtcaaaagccggggactgatgggacgctaggatctgcgcgtcccgcccatttcggcctctgactggtgaatgtcttcggcttatggcagaggagcccgcctcattggctctcaggctccagagcagcaggtctccggcgcccaccccgcctcccccagctgccgacgtggggcgggcagccgccggcggctgggagccgaggcgtcggtgcagacctggagacgggcatgggggggctgcggctgctggctgtggccctcacgtgctgctggtggccgcagggcagccagggtaagaccctgcggggcagcttcagcagcaccgcggcccaggacgcccagggccagcgcatcggccacttcgagttccatggtgaccatgctcttctgtgtgtcagaatcaacaacatagcagtagctgttggaaaagaagctaaactctacctgttccaagcccaggaatggctaaagctacagcaaagcagtcatggttatagctgtagtgaaaaattatccaaagctcagttgacaatgaccatgaaccagaccgaacataatctgacagtgtcccagattccgtctccacaaacgtggcatgtgttttatgcagacaagtatacatgccaagatgacaaggagaattctcaggtggaagatatcccatttgaaatggtgttactaaacccagatgccgaagggaatccatttgatcattttagtgctggagaatctgggttacatgagttctttttcctcctagtcctagtgtactttgtgattgcttgcatttatgctcaatcattgtggcaggctattaagaaaggcggacccatgcacatgattttaaaggttctgacaactgcattgctgttacaagctggttcagctttagctaattacattcatttctccagttactccaaagatggaataggggtaccatttatgggaagtttggcagaattttttgacatcgcttcccaaattcagatgttatacttacttttgagtctatgcatgggttggacaatagtcagaatgaagaagtctcaaagcagacctctccagtgggattctacgcctgcatccactggcattgcagtattcattgtcatgacacagagtgttttgctactttgggaacagtttgaagatatcagtcatcatagctaccattcacaccacaacttagcagggatcctcctaattgttctaagaatttgcctagcattgtcattaggctgtggactctatcagatcatcacagtggagagaagtacactcaaaagggagttctacatcacatttgccaaaggctgtatcttgtggtttttatgccatccagttcttgcatgcatttctgtcatttttagcgactaccaaagagacaaggttattacaataggtgttatcctttgccagtctgtttccatggttattctctacagactctttctgtctcacagtctatactgggaagtttcttcactttcttcagtaacactaccactgaccatatcatctggacacaaaagtcgccctcatttctgatacttgatttttgttgagaggaaaagtgaattggttaaaagagtgcaataaggatccaaatacagtgacttttttttcatacatttagtatgaaaacttgaacagcgaaagcagagcatgttatttatataactgcatttaagcagtaccaagactgaaaaaaaaggtaataaatgaaatgttttgaaatatacttaaacaacaaactttgaagaaagtgttgttataaaattattgaagcgatttctatgtggaaataaatgtg

SEQ ID NO: 8361 - protein, 440 aa, Homo sapiens; identical to SEQ ID NO: 950

SEQ ID NO: 8362 - DNA, 3578 bp, Homo sapiens
agtagcaagacgtgctaggcaatgaggagggagatgagttttccgtaacctgaagcaacatcctcctgattcctcattaaagaaaaaggcgggaactagtcaaaagccggggactgatgggacgctaggatctgcgcgtcccgcccatttcggcctctgactggtgaatgtcttcggcttatggcagaggagcccgcctcattggctctcaggctccagagcagcaggtctccggcgcccaccccgcctcccccagctgccgacgtggggcgggcagccgccggcggctgggagccgaggcgtcggtgcagacctggagacgggcatgggggggctgcggctgctggctgtggccctcacgtgctgctggtggccgcagggcagccagggtaagaccctgcggggcagcttcagcagcaccgcggcccaggacgcccagggccagcgcatcggccacttcgagttccatggtgaccatgctcttctgtgtgtcagaatcaacaacatagcagtagctgttggaaaagaagctaaactctacctgttccaagcccaggaatggctaaagctacagcaaagcagtcatggttatagctgtagtgaaaaattatccaaagctcagttgacaatgaccatgaaccagaccgaacataatctgacagtgtcccagattccgtctccacaaacgtggcatgtgttttatgcagacaagtatacatgccaagatgacaaggagaattctcaggtggaagatatcccatttgaaatggtgttactaaacccagatgccgaagggaatccatttgatcattttagtgctggagaatctgttactccaaagatggaataggggtaccatttatgggaagtttggcagaattttttgacatcgcttcccaaattcagatgttatacttacttttgagtctatgcatgggttggacaatagtcagaatgaagaagtctcaaagcagacctctccagtgggattctacgcctgcatccactggcattgcagtattcattgtcatgacacagagtgttttgctactttgggaacagtttgaagatatcagtcatcatagctaccattcacaccacaacttagcagggatcctcctaattgttctaagaatttgcctagcattgtcattaggctgtggactctatcagatcatcacagtggagagaagtacactcaaaagggagttctacatcacatttgccaaaggctgtatcttgtggtttttatgccatccagttcttgcatgcatttctgtcatttttagcgactaccaaagagacaaggttattacaataggtgttatcctttgccagtctgtttccatggttattctctacagactctttctgtctcacagtctatactgggaagtttcttcactttcttcagtaacactaccactgaccatatcatctggacacaaaagtcgccctcatttctgatacttgatttttgttgagaggaaaagtgaattggttaaaagagtgcaataaggatccaaatacagtgacttttttttcatacatttagtatgaaaacttgaacagcgaaagcagagcatgttatttatataactgcatttaagcagtaccaagactgaaaaaaaaggtaataaatgaaatgttttgaaatatacttaaacaacaaactttgaagaaagtgttgttataaaattattgaagcgatttctatgtggaaataaatgtgaaaaataactatgatattttggtaaaatattcaccacttataatgcctcatcttaatagctaactcaggtttaatagtcttataaaaagtaatcagttaaatgattacttgcttataaatatctaaactagtccagttatgaaatcagtgtaatacattgatttttaaaactgctgctttttatgctttaaggaaaatgtatttcatatttgagtttaaaggaattgaaattacttcaggaaatgaatataaaataggttcacagttaaatgaataagcttttgtttatttgtgggtggagttattctccaattttttctgccatttttggctctagttcaggttttagcttgattagcaaaggtttttgacaaacagtttatgaaaaaataaaacttaaatacattacacgggttgtaaggacaaaggattttaaaatctgagcacttaggtgaagggacaagcaggtttatgtgtttaaacagaaagaagggaaaaggtactatgtgatatggtactgaaattttgatcccaatagaattcatttctcttacgttgaatccccaatcataattaagccgtatacacagattaaattaacagaagcatttcacataaatgttggtttcagtcatcaactacccatgaattcctgcccaaggatacttaatcaggattaaattttctatgaataattgaaaaacaaaacactcactggatttgttataatccgtgttggcactggattctaagtagttgccatcttgaatcctttgtaataaagccatacttttgtgtgtgtgtgtgatgccccagtattgagtatgctagctaaaaaatatcaagtgcctgattaaagaattgctaaatggttgtcaatactcgctgtataaaatgagtattcccattaatagtcactgattggaaattattctgttgctgtttgtcaagctgttcaggccttttcctttttacttctggcttattttaaaaatattttttatctatttactgtgtgtttaagcaagcaacagtgcactgatctggtagttaaattttttaattaaatagttaaaataatgtagtgcaacttaaaaatatctatggctttgtttttgtttttcttttgtacctagtctcattggaaatgactagtattctgcctcattttcagggcagaatatgtgtttgtgacccaaaatgacaaagttaccaagttcaacctgctcattaaatcatctctctattagttctttgtaaatcacttagtacattagagctacaggttaagactagaaagtctgagttatgttttaggtatacatgatcgtctgagtggtcataaccttttcttttatcatgtctcgctaataaccccagctattgtctgttgtgttcagctgagatgcaaaaaagaaattaagcaaaaaagaaaaagatgaagacttttcatgaattttgtgaacttgccaaaaggggaagggaaaaatctttgtgttacttcactcaaagaacataagtaactgcaattaacatatatgaaatttattactctgcttgcatttatgaaactaaccagttttttaaactttaattcttaaatttatggttggaaatgctgataatttattttgttatttaagagctgttgttaagtggaggaaagtagttgttaataaatgtataaaactgttcttgactagtaatcagggacaaaatttatagttcataagtcatgacacagtattcgctctttttctgaatgtttacatagagattcatcactgcagattacagaaagttaagtgtatactacaaactctaattaaagataaaaatcttttct

SEQ ID NO: 8363 - protein, 201 aa, Homo sapiens
MGSLAEFFDIASQIQMLYLLLSLCMGWTIVRMKKSQSRPLQWDSTPASTGIAVFIVMTQSVLLLWEQFEDISHHSYHSHHNLAGILLIVLRICLALSLGCGLYQIITVERSTLKREFYITFAKGCILWFLCHPVLACISVIFSDYQRDKVITIGVILCQSVSMVILYRLFLSHSLYWEVSSLSSVTLPLTISSGHKSRPHF

SEQ ID NO: 8364 - DNA, 4921 bp, Homo sapiens
agtagcaagacgtgctaggcaatgaggagggagatgagttttccgtaacctgaagcaacatcctcctgattcctcattaaagaaaaaggcgggaactagtcaaaagccggggactgatgggacgctaggatctgcgcgtcccgcccatttcggcctctgactggtgaatgtcttcggcttatggcagaggagcccgcctcattggctctcaggctccagagcagcaggtctccggcgcccaccccgcctcccccagctgccgacgtggggcgggcagccgccggcggctgggagccgaggcgtcggtgcagacctggagacgggcatgggggggctgcggctgctggctgtggccctcacgtgctgctggtggccgcagggcagccagggtaagaccctgcggggcagcttcagcagcaccgcggcccaggacgcccagggccagcgcatcggccacttcgagttccatggtgaccatgctcttctgtgtgtcagaatcaacaacatagcagtagctgttggaaaagaagctaaactctacctgttccaagcccaggaatggctaaagctacagcaaagcagtcatggttatagctgtagtgaaaaattatccaaagctcagttgacaatgaccatgaaccagaccgaacataatctgacagtgtcccagattccgtctccacaaacgtggcatgtgttttatgcagacaagtatacatgccaagatgacaaggagaattctcaggtggaagatatcccatttgaaatggtgttactaaacccagatgccgaagggaatccatttgatcattttagtgctggagaatctgggttacatgagttctttttcctcctagtcctagtgtactttgtgattgcttgcatttatgctcaatcattgtggcaggctattaagaaaggcggacccatgcacatgattttaaaggttctgacaactgcattgctgttacaagctggttcagctttagctaattacattcatttctccagttactccaaagatggaataggggtaccatttatgggaagtttggcagaattttttgacatcgcttcccaaattcagatgttatacttacttttgagtctatgcatgggttggacaatagtcagaatgaagaagtctcaaagcagacctctccagtgggattctacgcctgcatccactggcattgcagtattcattgtcatgacacagagtgttttgctactttgggaacagtttgaagatatcagtcatcatagctaccattcacaccacaacttagcagggatcctcctaattgttctaagaatttgcctagcattgtcattaggctgtggactctatcagatcatcacagtggagagaagtacactcaaaagggagttctacatcacatttgccaaaggctgtatcttgtggtttttatgccatccagttcttgcatgcatttctgtcatttttagcgactaccaaagagacaaggttattacaataggtgttatcctttgccagtctgtttccatggttattctctacagactctttctgtctcacagtctatactgggaagtttcttcactttcttcagtaacactaccactgaccatatcatctggacacaaaagtcgccctcatttctgatacttgatttttgttgagaggaaaagtgaattggttaaaagagtgcaataaggatccaaatacagtgacttttttttcatacatttagtatgaaaacttgaacagcgaaagcagagcatgttatttatataactgcatttaagcagtaccaagactgaaaaaaaaggtaataaatgaaatgttttgaaatatacttaaacaacaaactttgaagaaagtgttgttataaaattattgaagcgatttctatgtggaaataaatgtgaaaaataactatgatattttggtaaaatattcaccacttataatgcctcatcttaatagctaactcaggtttaatagtcttataaaaagtaatcagttaaatgattacttgcttataaatatctaaactagtccagttatgaaatcagtgtaatacattgatttttaaaactgctgctttttatgctttaaggaaaatgtatttcatatttgagtttaaaggaattgaaattacttcaggaaatgaatataaaataggttcacagttaaatgaataagcttttgtttatttgtgggtggagttattctccaattttttctgccatttttggctctagttcaggttttagcttgattagcaaaggtttttgacaaacagtttatgaaaaaataaaacttaaatacattacacgggttgtaaggacaaaggattttaaaatctgagcacttaggtgaagggacaagcaggtttatgtgtttaaacagaaagaagggaaaaggtactatgtgatatggtactgaaattttgatcccaatagaattcatttctcttacgttgaatccccaatcataattaagccgtatacacagattaaattaacagaagcatttcacataaatgttggtttcagtcatcaactacccatgaattcctgcccaaggatacttaatcaggattaaattttctatgaataattgaaaaacaaaacactcactggatttgttataatccgtgttggcactggattctaagtagttgccatcttgaatcctttgtaataaagccatacttttgtgtgtgtgtgtgatgccccagtattgagtatgctagctaaaaaatatcaagtgcctgattaaagaattgctaaatggttgtcaatactcgctgtataaaatgagtattcccattaatagtcactgattggaaattattctgttgctgtttgtcaagctgttcaggccttttcctttttacttctggcttattttaaaaatattttttatctatttactgtgtgtttaagcaagcaacagtgcactgatctggtagttaaattttttaattaaatagttaaaataatgtagtgcaacttaaaaatatctatggctttgtttttgtttttcttttgtacctagtctcattggaaatgactagtattctgcctcattttcagggcagaatatgtgtttgtgacccaaaatgacaaagttaccaagttcaacctgctcattaaatcatctctctattagttctttgtaaatcacttagtacattagagctacaggttaagactagaaagtctgagttatgttttaggtatacatgatcgtctgagtggtcataaccttttcttttatcatgtctcgctaataaccccagctattgtctgttgtgttcagctgagatgcaaaaaagaaattaagcaaaaaagaaaaagatgaagacttttcatgaattttgtgaacttgccaaaaggggaagggaaaaatctttgtgttacttcactcaaagaacataagtaactgcaattaacatatatgaaatttattactctgcttgcatttatgaaactaaccagttttttaaactttaattcttaaatttatggttggaaatgctgataatttattttgttatttaagagctgttgttaagtggaggaaagtagttgttaataaatgtataaaactgttcttgactagtaatcagggacaaaatttatagttcataagtcatgacacagtattcgctctttttctgaatgtttacatagagattcatcactgcagattacagaaagttaagtgtatactacaaactctaattaaagataaaaatcttttctacttttctttgtcagataatgcttttttatgtgtttttacattttttgaaagaagataaatggttcatccagagctttattaagaagcatttcttttcttcccttaaaaaatagatgcttatttttattgacatgtgtataataagatgggtgcctactgtgatgcattttaccaggcattttaccttcattattactcatctctattgtgataaccaggctcccatttaactgagtataagagagaataaatgatttctctaaggtcatcaaactatttagtttttccactttaccttcatgatttaaggaacatgtattagctgtgttttagtgagaatgaattgctatccatcataatttttgctgttgatttgaacattaaaactggaattgtgctaaaatcagaacatgcgcttgaatatctgtaagacctcagcacacttcagtatttgaacctggcttttaaccagacagtattactagcaggagagttaatctaggcagaagagcttgctttagggtaattatttattatctccagtaaagtcacatctgatgaacataggagatacacaaatctgagatcatctctaaaataatgagactagaacctatctatcaacatgaacatgggctccttcagcatgtttcttctaggagactgcacgttctttggaatttggaaatttggaattatctgtgaaacattttcttaaatagcttctgtggtatcaaatcattgaggttgttttttgtttgttttgagaattgatatgattgttagaagtagccagatacgaagaggtaatactgttttttattccaacatgtatttgtgaattgagactaaaataatgagattggttttcctctgtgatctgaaagtagtgtggtagaagcaccgtagcttgatttcttgcaatagctctctaagtaatattaccatgtccacacttgggcagccttctgcacagctccaggggcatcatatgtgttgtgctgtaggagtgccatgaagcctggaggtgaggaaagaagtgatcctgcccactagggccattctccacagtgtagccaaaacaatctcttaaaaatggaaatcatctggatgatgagcatacagaaattctttgtgctaatcttgtaatttttttgtaag

SEQ ID NO: 8365 - protein, 440 aa, Homo sapiens; identical to SEQ ID NO: 950

SEQ ID NO: 8366 - DNA, 2659 bp, Homo sapiens
attgtggcaggctattaagaaaggcggacccatgcacatgattttaaaggttctgacaactgcattgctgttacaagctggttcagctttagctaattacattcatttctccaggtaactcaaaaccactaaaactgtgttcatcattacatctaattaatcctaattagtccaccaaaattatgcttgctttgattataaacaatttttttcacatttgtaatttacactactcttcttcaattcctcagttactccaaagatggaataggggtaccatttatgggaagtttggcagaatgtgagtatctttctgagcattttttaaaaagcttttacactcgctatctgctttttttttatttcttgtcatagtataaattttctgtcgaaaattgtttagaaatcagcttgactgagaacaggattacagtttaagttcccatatgtcttacttagtttcttcttaataataggtaatgtgtacagctcctcgttgtttttttgtttgtttgtttgagacagggttcttactccgtagcccaggctggagtgcagtggcacagtcacggctcactgcagcctcaaactcctaggctcaggtgatcctcctgcctcaggccttcccagtagctgggattacaggcacataccatcatgcctggctgatttttaaatttccttttctgtagatggggtctcactatgttgcccaggctggccttatactcttgggcttgagggatccacccaccctggcctcccaaagtcctggaattacaggcatgagtctccacactctgccttttcattgtttttaggtatatttatatacattctctcatcttatcctcaatagaaaaggggtctgcatatccttattttgcagataaaggatctgggctcagtgatgtgaaacatacttccacatgtcagtcagctattgagtggtagagactagactcagacctaaattttcttacctcaaagctgaagtttttcttcctattataattccactctctgttataactgactcttttctatttctgacccaaagcctaaaactcacatcaaaatatgctgtgaagaaaagtgataagttttcttaaaaatcattaaatgctacctcataaaataaatatatatatgaaacttgaagcatttatagatttctgttgttttcttgtagtgttaacctggatacaggtggttttgatacatcttttctgtttgaagtagcaggcttcccctgcagtgtaggtgatggccacctggtggcacatcacactaatgcatggagcttctcatttgtcttcaggattctgaaagtaaagccaatgtttggatgttatgggagctatgcatttcattgtattgtttcttgttaatagttttagaaaatactcttcacattatagttcagccatcaaaaaaaattcacccagaaatgaaggtactagtattctccatattgcagaaatcgtatttagaatttgctttaataagcagtgagttatagagaacaggattatgtagttagaaaagctaagaaaaatgggaaacgaaaagagttaaggttggacttaatggacatatggtatgggcatatatatgtatttttaaatagtattgctgctgttttaactattttaataaatatattacaaaatttatggcaatttttaaatctttagaattattacctgcgaatatctcttaatgaatttcgttagcttctctttgaaaatggctttttgtggtttttcttaaaaaaaaaaaaagatgttctcaatgcaaaaagcactaaattttttatattgtgaaaacttggttgacgttggttttcatgtcccattagtttttgacatcgcttcccaaattcagatgttatacttacttttgagtctatgcatgggttggacaatagtcagaatgaagaagtctcaaagcagacctctccagtgggattctacgcctgcatccactggcattgcagtattcattgtcatgacacagagtgttttgctactttgggaacagtttgaagatatcagtcatcatagctaccattcacaccacaacttagcagggatcctcctaattgttctaagaatttgcctagcattgtcattaggctgtggactctatcagatcatcacagtggagagaagtacactcaaaagggagttctacatcacatttgccaaaggctgtatcttgtggtttttatgccatccagttcttgcatgcatttctgtcatttttagcgactaccaaagagacaaggttattacaataggtgttatcctttgccagtctgtttccatggttattctctacagactctttctgtctcacagtctatactgggaagtttcttcactttcttcagtaacactaccactgaccatatcatctggacacaaaagtcgccctcatttctgatacttgatttttgttgagaggaaaagtgaattggttaaaagagtgcaataaggatccaaatacagtgacttttttttcatacatttagtatgaaaacttgaacagcgaaagcagagcatgttatttatataactgcatttaagcagtaccaagactgaaaaaaaaggtaataaatgaaatgttttgaaatatacttaaacaacaaactttg

SEQ ID NO: 8367 - protein, 220 aa, Homo sapiens
MFSMQKALNFLYCENLVDVGFHVPLVFDIASQIQMLYLLLSLCMGWTIVRMKKSQSRPLQWDSTPASTGIAVFIVMTQSVLLLWEQFEDISHHSYHSHHNLAGILLIVLRICLALSLGCGLYQIITVERSTLKREFYITFAKGCILWFLCHPVLACISVIFSDYQRDKVITIGVILCQSVSMVILYRLFLSHSLYWEVSSLSSVTLPLTISSGHKSRPHF

SEQ ID NO: 8368 - DNA, 593 bp, Homo sapiens
aaacacaggggaattctgcacaacaaacatttgcgcgagcgctctccctcgccccctctcgcttagctggatttttgtaagggggtttcttttaaattggattatccgaatggtcgcccatatggccttactctgcctgcatagactggccgggtgaagacgagtgaaaggacgcacggagagcctgagacagaagatagagaacttcttcagagcagcgtaggaaaagtgggtgctgggtgaaacggaaggcaaagagagagaatagaagaagaatctacaagaacgagaatgcaacagcagcattgcagacgcaccttcaggttcacctgcggaaggcacgcccagggcggaggagtggcgggactggcggaagatcaggaggcggcggaggaccccagggttcccaacactgacccctccgcaaagttcctccctgggagaagagactggccagctcttgttctaagggaagcaagctgctccatggaaagacccacagggcaagagctgatgtatctggccaaaggacagcaaagacttgaggcctgtcagcagctaagtgaaaaagtcacccgatcaaaccttgagat

SEQ ID NO: 8369 - protein, 99 aa, Homo sapiens
MQQQHCRRTFRFTCGRHAQGGGVAGLAEDQEAAEDPRVPNTDPSAKFLPGRRDWPALVLREASCSMERPTGQELMYLAKGQQRLEACQQLSEKVTRSNL

SEQ ID NO: 8370 - DNA, 5843 bp, Homo sapiens; identical to SEQ ID NO: 951

SEQ ID NO: 8371 - protein, 1325 aa, Homo sapiens; identical to SEQ ID NO: 952

SEQ ID NO: 8372 - DNA, 5702 bp, Homo sapiens
gagcggacaggcgtggcggccggagccccagcatccctgcttgaggtccaggagcggagcccgcggccaccgccgcctgatcagcgcgaccccggcccgcgcccgccccgcccggcaagatgctgcccgtgtaccaggaggtgaagcccaacccgctgcaggacgcgaacctctgctcacgcgtgttcttctggtggctcaatcccttgtttaaaattggccataaacggagattagaggaagatgatatgtattcagtgctgccagaagaccgctcacagcaccttggagaggagttgcaagggttctgggataaagaagttttaagagctgagaatgacgcacagaagccttctttaacaagagcaatcataaagtgttactggaaatcttatttagttttgggaatttttacgttaattgaggaaagtgccaaagtaatccagcccatatttttgggaaaaattattaattattttgaaaattatgatcccatggattctgtggctttgaacacagcgtacgcctatgccacggtgctgactttttgcacgctcattttggctatactgcatcacttatatttttatcacgttcagtgtgctgggatgaggttacgagtagccatgtgccatatgatttatcggaaggcacttcgtcttagtaacatggccatggggaagacaaccacaggccagatagtcaatctgctgtccaatgatgtgaacaagtttgatcaggtgacagtgttcttacacttcctgtgggcaggaccactgcaggcgattgcagtgactgccctactctggatggagataggaatatcgtgccttgctgggatggcagttctaatcattctcctgcccttgcaaagctgttttgggaagttgttctcatcactgaggagtaaaactgcaactttcacggatgccaggatcaggaccatgaatgaagttataactggtataaggataataaaaatgtacgcctgggaaaagtcattttcaaatcttattaccaatttgagaaagaaggagatttccaagattctgagaagttcctgcctcagagggatgaatttggcttcatttttcagtgcaagcaaaatcatcgtgtttgtgaccttcaccacctacgtgctcctcggcagtgtgatcacagccagccgcgtgttcgtggcagtgacgctgtatggggctgtgcggctgacggttaccctcttcttcccctcagccattgagagggtgtcagaggcaatcgtcagcatccgaagaatccagacctttttgctacttgatgagatatcacagcgcaaccgtcagctgccgtcagatggtaaaaagatggtgcatgtgcaggattttactgctttttgggataaggcatcagagaccccaactctacaaggcctttcctttactgtcagacctggcgaattgttagctgtggtcggccccgtgggagcagggaagtcatcactgttaagtgccgtgctcggggaattggccccaagtcacgggctggtcagcgtgcatggaagaattgcctatgtgtctcagcagccctgggtgttctcgggaactctgaggagtaatattttatttgggaagaaatacgaaaaggaacgatatgaaaaagtcataaaggcttgtgctctgaaaaaggatttacagctgttggaggatggtgatctgactgtgataggagatcggggaaccacgctgagtggagggcagaaagcacgggtaaaccttgcaagagcagtgtatcaagatgctgacatctatctcctggacgatcctctcagtgcagtagatgcggaagttagcagacacttgttcgaactgtgtatttgtcaaattttgcatgagaagatcacaattttagtgactcatcagttgcagtacctcaaagctgcaagtcagattctgatattgaaagatggtaaaatggtgcagaaggggacttacactgagttcctaaaatctggtatagattttggctcccttttaaagaaggataatgaggaaagtgaacaacctccagttccaggaactcccacactaaggaatcgtaccttctcagagtcttcggtttggtctcaacaatcttctagaccctccttgaaagatggtgctctggagagccaagatgttgcctatgtgcttcaagattggtggctttcatactgggcaaacaaacaaagtatgctaaatgtcactgtaaatggaggaggaaatgtaaccgagaagctagatcttaactggtacttaggaatttattcaggtttaactgtagctaccgttctttttggcatagcaagatctctattggtattctacgtccttgttaactcttcacaaactttgcacaacaaaatgtttgagtcaattctgaaagctccggtattattctttgatagaaatccaataggaagaattttaaatcgtttctccaaagacattggacacttggatgatttgctgccgctgacgtttttagatttcatccagacattgctacaagtggttggtgtggtctctgtggctgtggccgtgattccttggatcgcaatacccttggttccccttggaatcattttcatttttcttcggcgatattttttggaaacgtcaagagatgtgaagcgcctggaatctacaactcggagtccagtgttttcccacttatcatcttctctccaggggctctggaccatccgggcatacaaagcagaagagaggtgtcaggaactgtttgatgcacaccaggatttacattcagaggcttggttcttgtttttgacaacgtcccgctggtttgccgtccgtctggatgccatctgtgccatgtttgtcatcatcgttgcctttgggtccctgattctggcaaaaactctggatgccgggcaggttggtttggcactgtcctatgccctcacgctcatggggatgtttcagtggtgtgttcgacaaagtgctgaagttgagaatatgatgatctcagtagaaagggtcattgaatacacagaccttgaaaaagaagcaccttgggaatatcagaaacgcccaccaccagcctggccccatgaaggagtgataatctttgacaatgtgaacttcatgtacagtccaggtgggcctctggtactgaagcatctgacagcactcattaaatcacaagaaaaggttggcattgtgggaagaaccggagctggaaaaagttccctcatctcagccctttttagattgtcagaacccgaaggtaaaatttggattgataagatcttgacaactgaaattggacttcacgatttaaggaagaagatgtcaatcatacctcaggaacctgttttgttcactggaacaatgaggaaaaacctggatccctttaatgagcacacggatgaggaactgtggaatgccttacaagaggtacaacttaaagaaaccattgaagatcttcctggtaaaatggatactgaattagcagaatcaggatccaattttagtgttggacaaagacaactggtgtgccttgccagggcaattctcaggaaaaatcagatattgattattgatgaagcgacggcaaatgtggatccaagaactgatgagttaatacaaaaaaaaatccgggagaaatttgcccactgcaccgtgctaaccattgcacacagattgaacaccattattgacagcgacaagataatggttttagattcaggaagactgaaagaatatgatgagccgtatgttttgctgcaaaataaagagagcctattttacaagatggtgcaacaactgggcaaggcagaagccgctgccctcactgaaacagcaaaacaggtatacttcaaaagaaattatccacatattggtcacactgaccacatggttacaaacacttccaatggacagccctcgaccttaactattttcgagacagcactgtgaatccaaccaaaatgtcaagtccgttccgaaggcattttccactagtttttggactatgtaaaccacattgtacttttttttactttggcaacaaatatttatacatacaagatgctagttcatttgaatatttctcccaacttatccaaggatctccagctctaacaaaatggtttatttttatttaaatgtcaatagttgttttttaaaatccaaatcagaggtgcaggccaccagttaaatgccgtctatcaggttttgtgccttaagagactacagagtcaaagctcatttttaaaggagtaggacaaagttgtcacaggtttttgttgttgtttttattgcccccaaaattacatgttaatttccatttatatcagggattctatttacttgaagactgtgaagttgccattttgtctcattgttttctttgacataactaggatccattatttcccctgaaggcttcttgttagaaaatagtacagttacaaccaataggaacaacaaaaagaaaaagtttgtgacattgtagtagggagtgtgtaccccttactccccatcaaaaaaaaaaatggatacatggttaaaggatagaagggcaatattttatcatatgttctaaaagagaaggaagagaaaatactactttctcaaaatggaagcccttaaaggtgctttgatactgaaggacacaaatgtgaccgtccatcctcctttagagttgcatgacttggacacggtaactgttgcagttttagactcagcattgtgacacttcccaagaaggccaaacctctaaccgacattcctgaaatacgtggcattattcttttttggatttctcatttatggaaggctaaccctctgttgactgtaagccttttggtttgggctgtattgaaatcctttctaaattgcatgaataggctctgctaacgtgatgagacaaactgaaaattattgcaagcattgactataattatgcagtacgttctcaggatgcatccaggggttcattttcatgagcctgtccaggttagtttactcctgaccactaatagcattgtcatttgggctttctgttgaatgaatcaacaaaccacaatacttcctgggaccttttgtactttatttgaactatgagtctttaatttttcctgatgatggtggctgtaatatgttgagttcagtttactaaaggttttactattatggtttgaagtggagtctcatgacctctcagaataaggtgtcacctccctgaaattgcatatatgtatatagacatgcacacgtgtgcatttgtttgtatacatatatttgtccttcgtatagcaagttttttgctcatcagcagagagcaacagatgttttattgagtgaagccttaaaaagcacacaccacacacagctaactgccaaaatacattgaccgtagtagctgttcaactcctagtacttagaaatacacgtatggttaatgttcagtccaacaaaccacacacagtaaatgtttattaatagtcatggttcgtattttaggtgactgaaattgcatcagtgatcataatgaggtttgttaaaacgatagctatattcaaaatgtctatatgtttatttggacttttgaggttaaagacagtcatataaacgtcctgtttctgttttaatgttatcatagaattttttaatgaaactaaattcaattgaaataaatgatagttttcatctccattcaga

SEQ ID NO: 8373 - protein, 1278 aa, Homo sapiens
MLPVYQEVKPNPLQDANLCSRVFFWWLNPLFKIGHKRRLEEDDMYSVLPEDRSQHLGEELQGFWDKEVLRAENDAQKPSLTRAIIKCYWKSYLVLGIFTLIEESAKVIQPIFLGKIINYFENYDPMDSVALNTAYAYATVLTFCTLILAILHHLYFYHVQCAGMRLRVAMCHMIYRKALRLSNMAMGKTTTGQIVNLLSNDVNKFDQVTVFLHFLWAGPLQAIAVTALLWMEIGISCLAGMAVLIILLPLQSCFGKLFSSLRSKTATFTDARIRTMNEVITGIRIIKMYAWEKSFSNLITNLRKKEISKILRSSCLRGMNLASFFSASKIIVFVTFTTYVLLGSVITASRVFVAVTLYGAVRLTVTLFFPSAIERVSEAIVSIRRIQTFLLLDEISQRNRQLPSDGKKMVHVQDFTAFWDKASETPTLQGLSFTVRPGELLAVVGPVGAGKSSLLSAVLGELAPSHGLVSVHGRIAYVSQQPWVFSGTLRSNILFGKKYEKERYEKVIKACALKKDLQLLEDGDLTVIGDRGTTLSGGQKARVNLARAVYQDADIYLLDDPLSAVDAEVSRHLFELCICQILHEKITILVTHQLQYLKAASQILILKDGKMVQKGTYTEFLKSGIDFGSLLKKDNEESEQPPVPGTPTLRNRTFSESSVWSQQSSRPSLKDGALESQDVAYVLQDWWLSYWANKQSMLNVTVNGGGNVTEKLDLNWYLGIYSGLTVATVLFGIARSLLVFYVLVNSSQTLHNKMFESILKAPVLFFDRNPIGRILNRFSKDIGHLDDLLPLTFLDFIQTLLQVVGVVSVAVAVIPWIAIPLVPLGIIFIFLRRYFLETSRDVKRLESTTRSPVFSHLSSSLQGLWTIRAYKAEERCQELFDAHQDLHSEAWFLFLTTSRWFAVRLDAICAMFVIIVAFGSLILAKTLDAGQVGLALSYALTLMGMFQWCVRQSAEVENMMISVERVIEYTDLEKEAPWEYQKRPPPAWPHEGVIIFDNVNFMYSPGGPLVLKHLTALIKSQEKVGIVGRTGAGKSSLISALFRLSEPEGKIWIDKILTTEIGLHDLRKKMSIIPQEPVLFTGTMRKNLDPFNEHTDEELWNALQEVQLKETIEDLPGKMDTELAESGSNFSVGQRQLVCLARAILRKNQILIIDEATANVDPRTDELIQKKIREKFAHCTVLTIAHRLNTIIDSDKIMVLDSGRLKEYDEPYVLLQNKESLFYKMVQQLGKAEAAALTETAKQVYFKRNYPHIGHTDHMVTNTSNGQPSTLTIFETAL

SEQ ID NO: 8374 - DNA, 870 bp, Homo sapiens
cagacattgctacaagtggttggtgtggtctctgtggctgtggccgtgattccttggatcgcaatacccttggttccccttggaatcattttcatttttcttcggcgatattttttggaaacgtcaagagatgtgaagcgcctggaatctacaactcggagtccagtgttttcccacttatcatcttctctccaggggctctggaccatccgggcatacaaagcagaagagaggtgtcaggaactgtttgatgcacaccaggatttacattcaggtctgtctatttctggaaatggtttcaaaggacaggatctgctgctttttctggcttaacctccctggtcagatgagcttgttggcaggcacctcagggcccagccccacatcctgctttttttgcgcatcttcgtctccttccccatccccttcttctgggcttggactcctctcggaatcgctgctgcacgttccctctttgtgccccctgactggcttgtggggtctttctctcaccatgcatggcctgtggctctgtcagcaaacgttttctgcaaaaggccacctagtaagtgttttaggcattgtgtgccattattgtctctgttgtgatgaatcacctttgccattgtagcacaaaagcagatgtcaatacattggcaaatggctgtgactatgtttcaataaaactttatttacaaaaataggtgctggctcacgtgctgtagtttgctgaccccttgcatcagtgaagattttttcaatatggaaatttcagaatttccaccaaatctacaaaattcagatccgtcattccaatctttattttatcttgctgattaaatggcactttaaaaaccacatgctaaaagg

SEQ ID NO: 8375 - protein, 126 aa, Homo sapiens
MHTRIYIQVCLFLEMVSKDRICCFFWLNLPGQMSLLAGTSGPSPTSCFFCASSSPSPSPSSGLGLLSESLLHVPSLCPLTGLWGLSLTMHGLWLCQQTFSAKGHLVSVLGIVCHYCLCCDESPLPL

SEQ ID NO: 8376 - DNA, 2889 bp, Homo sapiens
gagcggacaggcgtggcggccggagccccagcatccctgcttgaggtccaggagcggagcccgcggccaccgccgcctgatcagcgcgaccccggcccgcgcccgccccgcccggcaagatgctgcccgtgtaccaggaggtgaagcccaacccgctgcaggacgcgaacctctgctcacgcgtgttcttctggtggctcaatcccttgtttaaaattggccataaacggagattagaggaagatgatatgtattcagtgctgccagaagaccgctcacagcaccttggagaggagttgcaagggttctgggataaagaagttttaagagctgagaatgacgcacagaagccttctttaacaagagcaatcataaagtgttactggaaatcttatttagttttgggaatttttacgttaattgaggaaagtgccaaagtaatccagcccatatttttgggaaaaattattaattattttgaaaattatgatcccatggattctgtggctttgaacacagcgtacgcctatgccacggtgctgactttttgcacgctcattttggctatactgcatcacttatatttttatcacgttcagtgtgctgggatgaggttacgagtagccatgtgccatatgatttatcggaaggcacttcgtcttagtaacatggccatggggaagacaaccacaggccagatagtcaatctgctgtccaatgatgtgaacaagtttgatcaggtgacagtgttcttacacttcctgtgggcaggaccactgcaggcgattgcagtgactgccctactctggatggagataggaatatcgtgccttgctgggatggcagttctaatcattctcctgcccttgcaaagctgttttgggaagttgttctcatcactgaggagtaaaactgcaactttcacggatgccaggatcaggaccatgaatgaagttataactggtataaggataataaaaatgtacgcctgggaaaagtcattttcaaatcttattaccaatttgagaaagaaggagatttccaagattctgagaagttcctgcctcagagggatgaatttggcttcatttttcagtgcaagcaaaatcatcgtgtttgtgaccttcaccacctacgtgctcctcggcagtgtgatcacagccagccgcgtgttcgtggcagtgacgctgtatggggctgtgcggctgacggttaccctcttcttcccctcagccattgagagggtgtcagaggcaatcgtcagcatccgaagaatccagacctttttgctacttgatgagatatcacagcgcaaccgtcagctgccgtcagatggtaaaaagatggtgcatgtgcaggattttactgctttttgggataaggcatcagagaccccaactctacaaggcctttcctttactgtcagacctggcgaattgttagctgtggtcggccccgtgggagcagggaagtcatcactgttaagtgccgtgctcggggaattggccccaagtcacgggctggtcagcgtgcatggaagaattgcctatgtgtctcagcagccctgggtgttctcgggaactctgaggagtaatattttatttgggaagaaatacgaaaaggaacgatatgaaaaagtcataaaggcttgtgctctgaaaaaggatttacagctgttggaggatggtgatctgactgtgataggagatcggggaaccacgctgagtggagggcagaaagcacgggtaaaccttgcaagagcagtgtatcaagatgctgacatctatctcctggacgatcctctcagtgcagtagatgcggaagttagcagacacttgttcgaactgtgtatttgtcaaattttgcatgagaagatcacaattttagtgactcatcagttgcagtacctcaaagctgcaagtcagattctgatattgaaagatggtaaaatggtgcagaaggggacttacactgagttcctaaaatctggtatagattttggctcccttttaaagaaggataatgaggaaagtgaacaacctccagttccaggaactcccacactaaggaatcgtaccttctcagagtcttcggtttggtctcaacaatcttctagaccctccttgaaagatggtgctctggagagccaagatacagagaatgtcccagttacactatcagaggagaaccgttctgaaggaaaagttggttttcaggcctataagaattacttcagagctggtgctcactggattgtcttcattttccttattctcctaaacactgcagctcaggttgcctatgtgcttcaagattggtggctttcatactgggcaaacaaacaaagtatgctaaatgtcactgtaaatggaggaggaaatgtaaccgagaagctagatcttaactggtacttaggaatttattcaggtttaactgtagctaccgttctttttggcatagcaagatctctattggtattctacgtccttgttaactcttcacaaactttgcacaacaaaatgtttgagtcaattctgaaagctccggtattattctttgatagaaatccaataggaagaattttaaatcgtttctccaaagacattggacacttggatgatttgctgccgctgacgtttttagatttcatccagagatgggatctcgctgtgttgtcctggctggtctcaaactcctaggctcaagcaatcctcctccctcctcaagcaaacctcagtgctgggattataggcatgagccactgtacctggctaaatgttgtttttttgatattcaatttttgtttatagaattttcatttgttttgctcttatacttttcatctttttatgtttattgaccaattaaatatcatttgggtaagcacct

SEQ ID NO: 8377 - protein, 859 aa, Homo sapiens
MLPVYQEVKPNPLQDANLCSRVFFWWLNPLFKIGHKRRLEEDDMYSVLPEDRSQHLGEELQGFWDKEVLRAENDAQKPSLTRAIIKCYWKSYLVLGIFTLIEESAKVIQPIFLGKIINYFENYDPMDSVALNTAYAYATVLTFCTLILAILHHLYFYHVQCAGMRLRVAMCHMIYRKALRLSNMAMGKTTTGQIVNLLSNDVNKFDQVTVFLHFLWAGPLQAIAVTALLWMEIGISCLAGMAVLIILLPLQSCFGKLFSSLRSKTATFTDARIRTMNEVITGIRIIKMYAWEKSFSNLITNLRKKEISKILRSSCLRGMNLASFFSASKIIVFVTFTTYVLLGSVITASRVFVAVTLYGAVRLTVTLFFPSAIERVSEAIVSIRRIQTFLLLDEISQRNRQLPSDGKKMVHVQDFTAFWDKASETPTLQGLSFTVRPGELLAVVGPVGAGKSSLLSAVLGELAPSHGLVSVHGRIAYVSQQPWVFSGTLRSNILFGKKYEKERYEKVIKACALKKDLQLLEDGDLTVIGDRGTTLSGGQKARVNLARAVYQDADIYLLDDPLSAVDAEVSRHLFELCICQILHEKITILVTHQLQYLKAASQILILKDGKMVQKGTYTEFLKSGIDFGSLLKKDNEESEQPPVPGTPTLRNRTFSESSVWSQQSSRPSLKDGALESQDTENVPVTLSEENRSEGKVGFQAYKNYFRAGAHWIVFIFLILLNTAAQVAYVLQDWWLSYWANKQSMLNVTVNGGGNVTEKLDLNWYLGIYSGLTVATVLFGIARSLLVFYVLVNSSQTLHNKMFESILKAPVLFFDRNPIGRILNRFSKDIGHLDDLLPLTFLDFIQRWDLAVLSWLVSNS

SEQ ID NO: 8378 - DNA, 324 bp, Homo sapiens
ccagttgtctcccaggtggatggaaagaggacattttgctttgcaagggtctctcttcaaaaggttcaaatttcgtgcagcttctggaaattctccatcttgatcatcgtaccgtggagctgtgccaccatctccgtgatctctgccaaagcggctgtgaaggaaagacatacacagtctgcagcgggaaaggcaggcaggggtcttcccctagcagctgtcagctcaacgctgcagggaaatcactccagtccctgcacagtattcaaaggtgtcttttgagcaaaaacagtgctatttctctataataaaaattgatggtgt

SEQ ID NO: 8379 - protein, 101 aa, Homo sapiens
SCLPGGWKEDILLCKGLSSKGSNFVQLLEILHLDHRTVELCHHLRDLCQSGCEGKTYTVCSGKGRQGSSPSSCQLNAAGKSLQSLHSIQRCLLSKNSAISL

SEQ ID NO: 8380 - DNA, 560 bp, Homo sapiens
aggggcacccagagagatggaatgaggcagactcggaggtctgtattttttattgtggtaaaatagctataccacaatattggccaacttaacgatttttacgggaacaattcagtggcattaagtgcctttacaaggtggtgcaactgctttgagtctctgctggtgatgtcactttggcaaagggacgaaatgagccaccagtgcgtcaggcctgctcagagttgtttggaggtagcatggacacaggtgcctgtccctgccccctagctgggctgcagcgcatcctaacaatgctccaggggctgggccggccctgagcctggaggtgggcagggctgcaactgcctcctgggccactagagggcatgtgggagccactcacatgcaccccaggccccacttcctgggtagggtgcctggcccctcaaaacgagtgctgctctgagcttgttgggatggatctttccctccttcagcttccgcctgctggcaatgcatggggtcctgcgcccccatttctgcctcggtgtcacagggcacacccctctccccccaag

SEQ ID NO: 8381 - protein, 63 aa, Homo sapiens [sequence omitted]

SEQ ID NO: 8382 - DNA, 1407 bp, Homo sapiens
aggtggatggaagtgatccgcagtgccaccagctctgcctcgcgaccccacgtgttgagtcacaaagagtctcttgtgtattgatggccggacacactcgtttccgcagtggctgctttcctggaagacgtttcctttcttctgtattaatgaagcctggtaaaattaacacctgtctgaaaatcaaaaacatggcttcccagcagctctcctgtctccacagccgcgttttttaaccccgacctctcagcgtctgaatgaacagcgctcccacctccagtcctggcatccgctgggggcgctgttctttagctagtgccagtattaaaacattgtcattacgagagtgccaaatgacatcttccctccaccctgcccctgaaaaacagtacacacacatccgttcaacacaagacagggcaagtgtttttcttcctaaaaaaagttctttcttttattattttcacctattggctgctgcattttacgaagtggacttcccggtgtttgtttgtttgtttgcaatacactcagtgcagccttaagcaaatgagatcattttcagatttcattttttttttcagtctttctacttttgtaataataggaagttagtaggactcacttctctgattaataagcaatttgcagcacacagcgttccactgcggggtttcacgctcacctgaaaacacctgttcccaacctacttcttggtgcaagttgaccaaatcgttttaagtggtaactctttccaaccgtagcagggttgttttctgttaagcaaagccgagatccagtgcaatacctggactgtcaccgtcctgtgagtggtgtacacaatgggaagataataagccgtggtgttttgctgtctgtctgtgtcacaagcatgaaaacccgtgtgtcattgatcagcaccatttgtggtatgttccgtgatgagcgtttagtgagcctgctggctgcagagcactatgaaatcatggcatggggtagtgtcagtcggactgcacagggaacacggtttccagtggctttggcccctactcgggaaacgtctgcctgttctcgatggtgatggggtggctgccattcccttggttttcctaagccctttctaacgagagtctcaaacaagcggaggcgagggccaattcaaccccattctttccagcgccccgcaccatagcacctgcccacctgagaaccaggaacgcaccctctctgtggagctctgactggtgtagctggaaacaaacagcaacttgcaaacggacgaagagcctgccgtgtgttaatcatttgccttacaagatgtaccagacggtttccagtactaacaaagggaataaaaatacctcacgccacaatccagcatattgatgttttaaggcaaaacaacca

SEQ ID NO: 8383 - protein, 62 aa, Homo sapiens
MKTRVSLISTICGMFRDERLVSLLAAEHYEIMAWGSVSRTAQGTRFPVALAPTRETSACSRW

SEQ ID NO: 8384 - DNA, 1129 bp, Homo sapiens
cggacacactcgtttccgcagtggctgctttcctggaagacgtttcctttcttctgtattaatgaagcctggtaaaattaacacctgtctgaaaatcaaaaacatggcttcccagcagctctcctgtctccacagccgcgttttttaaccccgacctctcagcgtctgaatgaacagcgctcccacctccagtcctggcatccgctgggggcgctgttctttagctagtgccagtattaaaacattgtcattacgagagtgccaaatgacatcttccctccaccctgcccctgaaaaacagtacacacacatccgttcaacacaagacagggcaagtgtttttcttcctaaaaaaagttctttcttttattattttcacctattggctgctgcattttacgaagtggacttcccggtgtttgtttgtttgtttgcaatacactcagtgcagccttaagcaaatgagatcattttcagatttcattttttttttcagtctttctacttttgtaataataggaagttagtaggactcacttctctgattaataagcaatttgcagcacacagcgttccactgcggggtttcacgctcacctgaaaacacctgttcccaacctacttcttggtgcaagttgaccaaatcgttttaagtggtaactctttccaaccgtagcagggttgttttctgttaagcaaagccgagatccagtgcaatacctggactgtcaccgtcctgtgagtggtgtacacaatgggaagataataagccgtggtgttttgctgtctgtctgtgtcacaagcatgaaaacccgtgtgtcattgatcagcaccatttgtggtatgttccgtgatgagcgtttagtgagcctgctggctgcagagcactatgaaatcatgcgccccgcaccatagcacctgcccacctgagaaccaggaacgcaccctctctgtggagctctgactggtgtagctggaaacaaacagcaacttgcaaacggacgaagagcctgccgtgtgttaatcatttgccttacaagatgtaccagacggtttccagtactaacaaagggaataaaaatacctcacgccacaatccagcatattgatgttttaaggcaaaacaacc

SEQ ID NO: 8385 - protein, 36 aa, Homo sapiens
MKTRVSLISTICGMFRDERLVSLLAAEHYEIMRPAP

SEQ ID NO: 8386 - DNA, 3292 bp, Homo sapiens
tttggcgtggctggccagctgacagacacccagatcaaaaggaacaccttcccatcggacttggacagaaataagatgaaagacatcccgaagaggcctttctctcagtgtttatctacaattatttctcctctgtttgcagagttgaaggagaagagccaggcgtgcggagggaacttggggtccattgaagagctgcgaggggccatctacctagcggaggaggcgtgccctggcatctccgacaccatggtggcccagctcgtgcagcggctccagagatactctctaagtggtggaggaacttcatcccactgaaattcctttggcatttggggttttgtttttccttttttccttcttcatcctcctccttttttaaaagtcaacgagagccttcgctgactccaccgaagaggtgcgccactgggagccaccccagcgccaggcgcccgtccagggacacacacagtcttcactgtgctgcagccagatgaagtctctcagatgggtggggagggtcagctccttccagcgatcattttattttattttattacttttgtttttaattttaaccatagtgcacatattccaggaaagtgtctttaaaaacaaaaacaaaccctgaaatgtatatttgggattatgataaggcaactaaagacatgaaacctcaggtatcctgctttaagttgataactccctctgggagctggagaatcgctctggtggatgggtgtacagatttgtatataatgtcatttttacggaaaccctttcggcgtgcataaggaatcactgtgtacaaactggccaagtgcttctgtagataacgtcagtggagtaaatattcgacaggccataacttgagtctattgccttgcctttattacatgtacattttgaattctgtgaccagtgatttgggttttattttgtatttgcagggtttgtcattaataattaatgcccctctcttacagaacactcctatttgtacctcaacaaatgcaaattttccccgtttgccctacgccccttttggtacacctagaggttgatttcctttttcatcgatggtactatttcttagtgttttaaattggaacatatcttgcctcatgaagctttaaattataattttcagtttctccccatgaagcgctctcgtctgacatttgtttggaatcgtgccactgctggtctgcgccagatgtaccgtcctttccaatacgattttctgttgcaccttgtagtggattctgcatatcatctttcccacctaaaaatgtctgaatgcttacacaaataaattttataacacgcttattttgcatactccttgaaatgtgactcttcagaggacagggcacctgctgtgtatgtgtggccgtgcgtgtgtactcgtggctgtgtgtgtgtgatgagacactttggaagactccagggagaagtccccaggcctggagctgccgagtgcccaggtcagcgccctggactgcttgcgcacttgctcaccgagatgatgcagttggaggttgctgatctgtgcgattgctgtagcggttgccggggaccttaagagttattttgcttctctggaaggggcctatgcttgctaggcaggcagccagtgtgtctgtttttcttggtttgctgtgggaccttgcttggcgagggggaaaatctctgggtttctggagtgggagggttcgtgcagcagctgttgactggtacatgaagcattcttttatgtttgttgaagctgatgattgacatctcccgtgggtgtgccagttcttgtggagttaagacaggatttttggaagcaaggaagttagtgggtgagcttggggatgtagctcagctatctgctggtctagtggcctctaagctatagggaggggacagagccctgagctacagatgcttgagtgggttattgtgtcggtttgctagtgcagtctggtttttaagctctaaaattgaggtattttattagaagtggatttgggttgaactcttaatttgtataagggatatattttggttggggaaatagaactgagttgctaattcttattgtactcattactccatacaagaatgttatgttgaataataaaattggagaagatttcattttgtgtttccagggagtattctgtgtggggaactgtttccttacgtgaggccggcggcataagtcaaagatgagttttgtccttgcgaatcacacagattgagtctgtgttccccagggtgtgccgttacctgatttttaagtgagccagggcggacagcagcttttctgatttacagagttcttcagatttacaaatggacaatgacatcacagtttttagcactgaagccagtctcatgctagtaacagtgggtgagccgctcgagggactgggttctaatgaatactggtatgaacggggagtctctgcagtcgccagacaaatcatactcagccccttcccccgtagagcaacaagtggttcttttagagttgactggcagcatttcctgtcgggggaggtggggtttgatggagttagaaagctcgcctctgtgtacattctctcctgggctgttactttctgtagacgcacaaaatcagccccaatgtttttaagggcatcttagccaaggaagctggcttttgtgtcgccacttccaggcctgcattaagagagagcccaggcaccagggctaccactggaacctgcctcagcgtcaactgctgctggtctgtagccaggcccagcctttgagacgggtttactgtcaccagtagcctctcagtgccagccctgagctgctcctggctcagctgcccagagcctgcagcctggggaggtactcagcctctgggagacgagggccgtggactgggtggctggtagctcctgcgtttttgagctgtgtcctggctggctgctgccaatgaggtggacaccagtgtggtttggggtgcactggccacttcttgctgggttctgattttcttggaagtgcatctgccttccttatccaatagttttatccctgcattgctcttgtgaagtggctggtttggttctgtatgtagcattttgtacctttcctctggcaaaacactgtcagtttataaacattttttatatttccctcctttaaaaacagcttgtgtatttctgctataaaatgtgtcagcaaaggcagagtgacctaatagggcatgttcttaagcacagggactgtatcatgcaggggccaataaagctcaagaaaacgagta

SEQ ID NO: 8387 - protein, 80 aa, Homo sapiens
MKDIPKRPFSQCLSTIISPLFAELKEKSQACGGNLGSIEELRGAIYLAEEACPGISDTMVAQLVQRLQRYSLSGGGTSSH

SEQ ID NO: 8388 - DNA, 4635 bp, Homo sapiens
gggacgcgctcggcgctcgcgggctcggcgggctgtgcgcgcccactccggctccagcggccagcgcgcgcgggcccaggccgcccggctccagcccagcagtagcggcagcagcggcggcggcggcagtgcgcgcgaggccctgcgcccccagcagctcctccctggcgccgtgcatggagacgcggcccgccacccgccgctgagcccccgccgcccggccgggacccgccagggctggggtggcctcgggctccggccggccccgccgcccgagggctgcgcgcggcccgcgggcctcgccgccccgcgcggatcgtcgcggcccggccgtcccgtcccaggaagtggccgtcctgagcgccatggctcactccccggtgcagtcgggcctgcccggcatgcagaacctaaaggcagacccagaagagctttttacaaaactagagaaaattgggaagggctcctttggagaggtgttcaaaggcattgacaatcggactcagaaagtggttgccataaagatcattgatctggaagaagctgaagatgagatagaggacattcaacaagaaatcacagtgctgagtcagtgtgacagtccatatgtaaccaaatattatggatcctatctgaaggatacaaaattatggataataatggaatatcttggtggaggctccgcactagatctattagaacctggcccattagatgaaacccagatcgctactatattaagagaaatactgaaaggactcgattatctccattcggagaagaaaatccacagagacattaaagcggccaacgtcctgctgtctgagcatggcgaggtgaagctggcggactttggcgtggctggccagctgacagacacccagatcaaaaggaacaccttcgtgggcaccccattctggatggcacccgaggtcatcaaacagtcggcctatgactcgaaggcagacatctggtccctgggcataacagctattgaacttgcaagaggggaaccacctcattccgagctgcaccccatgaaagttttattcctcattccaaagaacaacccaccgacgttggaaggaaactacagtaaacccctcaaggagtttgtggaggcctgtttgaataaggagccgagctttagacccactgctaaggagttattgaagcacaagtttatactacgcaatgcaaagaaaacttcctacttgaccgagctcatcgacaggtacaagagatggaaggccgagcagagccatgacgactcgagctccgaggattccgacgcggaaacagatggccaagcctcggggggcagtgattctggggactggatcttcacaatccgagaaaaagatcccaagaatctcgagaatggagctcttcagccatcggacttggacagaaataagatgaaagacatcccgaagaggcctttctctcagtgtttatctacaattatttctcctctgtttgcagagttgaaggagaagagccaggcgtgcggagggaacttggggtccattgaagagctgcgaggggccatctacctagcggaggaggcgtgccctggcatctccgacaccatggtggcccagctcgtgcagcggctccagagatactctctaagtggtggaggaacttcatcccactgaaattcctttggcatttggggttttgtttttccttttttccttcttcatcctcctccttttttaaaagtcaacgagagccttcgctgactccaccgaagaggtgcgccactgggagccaccccagcgccaggcgcccgtccagggacacacacagtcttcactgtgctgcagccagatgaagtctctcagatgggtggggagggtcagctccttccagcgatcattttattttattttattacttttgtttttaattttaaccatagtgcacatattccaggaaagtgtctttaaaaacaaaaacaaaccctgaaatgtatatttgggattatgataaggcaactaaagacatgaaacctcaggtatcctgctttaagttgataactccctctgggagctggagaatcgctctggtggatgggtgtacagatttgtatataatgtcatttttacggaaaccctttcggcgtgcataaggaatcactgtgtacaaactggccaagtgcttctgtagataacgtcagtggagtaaatattcgacaggccataacttgagtctattgccttgcctttattacatgtacattttgaattctgtgaccagtgatttgggttttattttgtatttgcagggtttgtcattaataattaatgcccctctcttacagaacactcctatttgtacctcaacaaatgcaaattttccccgtttgccctacgccccttttggtacacctagaggttgatttcctttttcatcgatggtactatttcttagtgttttaaattggaacatatcttgcctcatgaagctttaaattataattttcagtttctccccatgaagcgctctcgtctgacatttgtttggaatcgtgccactgctggtctgcgccagatgtaccgtcctttccaatacgattttctgttgcaccttgtagtggattctgcatatcatctttcccacctaaaaatgtctgaatgcttacacaaataaattttataacacgcttattttgcatactccttgaaatgtgactcttcagaggacagggcacctgctgtgtatgtgtggccgtgcgtgtgtactcgtggctgtgtgtgtgtgatgagacactttggaagactccagggagaagtccccaggcctggagctgccgagtgcccaggtcagcgccctggactgcttgcgcacttgctcaccgagatgatgcagttggaggttgctgatctgtgcgattgctgtagcggttgccggggaccttaagagttattttgcttctctggaaggggcctatgcttgctaggcaggcagccagtgtgtctgtttttcttggtttgctgtgggaccttgcttggcgagggggaaaatctctgggtttctggagtgggagggttcgtgcagcagctgttgactggtacatgaagcattcttttatgtttgttgaagctgatgattgacatctcccgtgggtgtgccagttcttgtggagttaagacaggatttttggaagcaaggaagttagtgggtgagcttggggatgtagctcagctatctgctggtctagtggcctctaagctatagggaggggacagagccctgagctacagatgcttgagtgggttattgtgtcggtttgctagtgcagtctggtttttaagctctaaaattgaggtattttattagaagtggatttgggttgaactcttaatttgtataagggatatattttggttggggaaatagaactgagttgctaattcttattgtactcattactccatacaagaatgttatgttgaataataaaattggagaagatttcattttgtgtttccagggagtattctgtgtggggaactgtttccttacgtgaggccggcggcataagtcaaagatgagttttgtccttgcgaatcacacagattgagtctgtgttccccagggtgtgccgttacctgatttttaagtgagccagggcggacagcagcttttctgatttacagagttcttcagatttacaaatggacaatgacatcacagtttttagcactgaagccagtctcatgctagtaacagtgggtgagccgctcgagggactgggttctaatgaatactggtatgaacggggagtctctgcagtcgccagacaaatcatactcagccccttcccccgtagagcaacaagtggttcttttagagttgactggcagcatttcctgtcgggggaggtggggtttgatggagttagaaagctcgcctctgtgtacattctctcctgggctgttactttctgtagacgcacaaaatcagccccaatgtttttaagggcatcttagccaaggaagctggcttttgtgtcgccacttccaggcctgcattaagagagagcccaggcaccagggctaccactggaacctgcctcagcgtcaactgctgctggtctgtagccaggcccagcctttgagacgggtttactgtcaccagtagcctctcagtgccagccctgagctgctcctggctcagctgcccagagcctgcagcctggggaggtactcagcctctgggagacgagggccgtggactgggtggctggtagctcctgcgtttttgagctgtgtcctggctggctgctgccaatgaggtggacaccagtgtggtttggggtgcactggccacttcttgctgggttctgattttcttggaagtgcatctgccttccttatccaatagttttatccctgcattgctcttgtgaagtggctggtttggttctgtatgtagcattttgtacctttcctctggcaaaacactgtcagtttataaacattttttatatttccctcctttaaaaacagcttgtgtatttctgctataaaatgtgtcagcaaaggcagagtgacctaatagggcatgttcttaagcacagggactgtatcatgcaggggccaataaagctcaagaaaacgagta

SEQ ID NO: 8389 - protein, 431 aa, Homo sapiens
MAHSPVQSGLPGMQNLKADPEELFTKLEKIGKGSFGEVFKGIDNRTQKVVAIKIIDLEEAEDEIEDIQQEITVLSQCDSPYVTKYYGSYLKDTKLWIIMEYLGGGSALDLLEPGPLDETQIATILREILKGLDYLHSEKKIHRDIKAANVLLSEHGEVKLADFGVAGQLTDTQIKRNTFVGTPFWMAPEVIKQSAYDSKADIWSLGITAIELARGEPPHSELHPMKVLFLIPKNNPPTLEGNYSKPLKEFVEACLNKEPSFRPTAKELLKHKFILRNAKKTSYLTELIDRYKRWKAEQSHDDSSSEDSDAETDGQASGGSDSGDWIFTIREKDPKNLENGALQPSDLDRNKMKDIPKRPFSQCLSTIISPLFAELKEKSQACGGNLGSIEELRGAIYLAEEACPGISDTMVAQLVQRLQRYSLSGGGTSSH

SEQ ID NO: 8390 - DNA, 1338 bp, Homo sapiens
tttggcgtggctggccagctgacagacacccagatcaaaaggaacaccttcccatcggacttggacagaaataagatgaaagacatcccgaagaggcctttctctcagtgtttatctacaattatttctcctctgtttgcagagttgaaggagaagagccaggcgtgcggagggaacttggggtccattgaagagctgcgaggggccatctacctagcggaggaggcgtgccctggcatctccgacaccatggtggcccagctcgtgcagcggctccagagatactctctaagtggtggaggaacttcatcccactgaaattcctttggcatttggggttttgtttttccttttttccttcttcatcctcctccttttttaaaagtcaacgagagccttcgctgactccaccgaagaggtgcgccactgggagccaccccagcgccaggcgcccgtccagggacacacacagtcttcactgtgctgcagccagatgaagtctctcagatgggtggggagggtcagctccttccagcgatcattttattttattttattacttttgtttttaattttaaccatagtgcacatattccaggaaagtgtctttaaaaacaaaaacaaaccctgaaatgtatatttgggattatgataaggcaactaaagacatgaaacctcaggtatcctgctttaagttgataactccctctgggagctggagaatcgctctggtggatgggtgtacagatttgtatataatgtcatttttacggaaaccctttcggcgtgcataaggaatcactgtgtacaaactggccaagtgcttctgtagataacgtcagtggagtaaatattcgacaggccataacttgagtctattgccttgcctttattacatgtacattttgaattctgtgaccagtgatttgggttttattttgtatttgcagggtttgtcattaataattaatgcccctctcttacagaacactcctatttgtacctcaacaaatgcaaattttccccgtttgccctacgccccttttggtacacctagaggttgatttcctttttcatcgatggtactatttcttagtgttttaaattggaacatatcttgcctcatgaagctttaaattataattttcagtttctccccatgaagcgctctcgtctgacatttgtttggaatcgtgccactgctggtctgcgccagatgtaccgtcctttccaatacgattttctgttgcaccttgtagtggattctgcatatcatctttcccacctaaaaatgtctgaatgcttacacaaataaattttataacacgcttattttgc

SEQ ID NO: 8391 - protein, 80 aa, Homo sapiens; identical to SEQ ID NO: 8387

SEQ ID NO: 8392 - DNA, 2625 bp, Homo sapiens
agacacgacattgcagcactggtgaccggatccagagcggagccaggctgcagtggtggggaggaccgggcaggtccagatgactttgaagggactccagaggaaggagagagtggaggaggagggctttgggttagggagagtgctttcgtttgttttaaatgggagaaactggagcatgttgccaagggcagagagccagcagagaggggtgaatggaagaaggagcgagaagggggttactgacgaagccttatcctggaggagagaaggatggactccagagcccagctttggggactggccttgaataaaaggagggccactctacctcatcctggagggagcacgaacctaaaggcagacccagaagagctttttacaaaactagagaaaattgggaagggctcctttggagaggtgttcaaaggcattgacaatcggactcagaaagtggttgccataaagatcattgatctggaagaagctgaagatgagatagaggacattcaacaagaaatcacagtgctgagtcagtgtgacagtccatatgtaaccaaatattatggatcctatctgaaggatacaaaattatggataataatggaatatcttggtggaggctccgcactagatctattagaacctggcccattagatgaaacccagatcgctactatattaagagaaatactgaaaggactcgattatctccattcggagaagaaaatccacagagacattaaagcggccaacgtcctgctgtctgagcatggcgaggtgaagctggcggactttggcgtggctggccagctgacagacacccagatcaaaaggaacaccttcgtgggcaccccattctggatggcacccgaggtcatcaaacagtcggcctatgactcgaaggcagacatctggtccctgggcataacagctattgaacttgcaagaggggaaccacctcattccgagctgcaccccatgaaagttttattcctcattccaaagaacaacccaccgacgttggaaggaaactacagtaaacccctcaaggagtttgtggaggcctgtttgaataaggagccgagctttagacccactgctaaggagttattgaagcacaagtttatactacgcaatgcaaagaaaacttcctacttgaccgagctcatcgacaggtacaagagatggaaggccgagcagagccatgacgactcgagctccgaggattccgacgcggaaacagatggccaagcctcggggggcagtgattctggggactggatcttcacaatccgagaaaaagatcccaagaatctcgagaatggagctcttcagccatcggacttggacagaaataagatgaaagacatcccgaagaggcctttctctcagtgtttatctacaattatttctcctctgtttgcagagttgaaggagaagagccaggcgtgcggagggaacttggggtccattgaagagctgcgaggggccatctacctagcggaggaggcgtgccctggcatctccgacaccatggtggcccagctcgtgcagcggctccagagatactctctaagtggtggaggaacttcatcccactgaaattcctttggcatttggggttttgtttttccttttttccttcttcatcctcctccttttttaaaagtcaacgagagccttcgctgactccaccgaagaggtgcgccactgggagccaccccagcgccaggcgcccgtccagggacacacacagtcttcactgtgctgcagccagatgaagtctctcagatgggtggggagggtcagctccttccagcgatcattttattttattttattacttttgtttttaattttaaccatagtgcacatattccaggaaagtgtctttaaaaacaaaaacaaaccctgaaatgtatatttgggattatgataaggcaactaaagacatgaaacctcaggtatcctgctttaagttgataactccctctgggagctggagaatcgctctggtggatgggtgtacagatttgtatataatgtcatttttacggaaaccctttcggcgtgcataaggaatcactgtgtacaaactggccaagtgcttctgtagataacgtcagtggagtaaatattcgacaggccataacttgagtctattgccttgcctttattacatgtacattttgaattctgtgaccagtgatttgggttttattttgtatttgcagggtttgtcattaataattaatgcccctctcttacagaacactcctatttgtacctcaacaaatgcaaattttccccgtttgccctacgccccttttggtacacctagaggttgatttcctttttcatcgatggtactatttcttagtgttttaaattggaacatatcttgcctcatgaagctttaaattataattttcagtttctccccatgaagcgctctcgtctgacatttgtttggaatcgtgccactgctggtctgcgccagatgtaccgtcctttccaatacgattttctgttgcaccttgtagtggattctgcatatcatctttcccacctaaaaatgtctgaatgcttacacaaataaattttataacacgcttattttgc

SEQ ID NO: 8393 - protein, 443 aa, Homo sapiens
MDSRAQLWGLALNKRRATLPHPGGSTNLKADPEELFTKLEKIGKGSFGEVFKGIDNRTQKVVAIKIIDLEEAEDEIEDIQQEITVLSQCDSPYVTKYYGSYLKDTKLWIIMEYLGGGSALDLLEPGPLDETQIATILREILKGLDYLHSEKKIHRDIKAANVLLSEHGEVKLADFGVAGQLTDTQIKRNTFVGTPFWMAPEVIKQSAYDSKADIWSLGITAIELARGEPPHSELHPMKVLFLIPKNNPPTLEGNYSKPLKEFVEACLNKEPSFRPTAKELLKHKFILRNAKKTSYLTELIDRYKRWKAEQSHDDSSSEDSDAETDGQASGGSDSGDWIFTIREKDPKNLENGALQPSDLDRNKMKDIPKRPFSQCLSTIISPLFAELKEKSQACGGNLGSIEELRGAIYLAEEACPGISDTMVAQLVQRLQRYSLSGGGTSSH

SEQ ID NO: 8394 - DNA, 2681 bp, Homo sapiens
gggacgcgctcggcgctcgcgggctcggcgggctgtgcgcgcccactccggctccagcggccagcgcgcgcgggcccaggccgcccggctccagcccagcagtagcggcagcagcggcggcggcggcagtgcgcgcgaggccctgcgcccccagcagctcctccctggcgccgtgcatggagacgcggcccgccacccgccgctgagcccccgccgcccggccgggacccgccagggctggggtggcctcgggctccggccggccccgccgcccgagggctgcgcgcggcccgcgggcctcgccgccccgcgcggatcgtcgcggcccggccgtcccgtcccaggaagtggccgtcctgagcgccatggctcactccccggtgcagtcgggcctgcccggcatgcagaacctaaaggcagacccagaagagctttttacaaaactagagaaaattgggaagggctcctttggagaggtgttcaaaggcattgacaatcggactcagaaagtggttgccataaagatcattgatctggaagaagctgaagatgagatagaggacattcaacaagaaatcacagtgctgagtcagtgtgacagtccatatgtaaccaaatattatggatcctatctgaaggatacaaaattatggataataatggaatatcttggtggaggctccgcactagatctattagaacctggcccattagatgaaacccagatcgctactatattaagagaaatactgaaaggactcgattatctccattcggagaagaaaatccacagagacattaaagcggccaacgtcctgctgtctgagcatggcgaggtgaagctggcggactttggcgtggctggccagctgacagacacccagatcaaaaggaacaccttcgtgggcaccccattctggatggcacccgaggtcatcaaacagtcggcctatgactcgaaggcagacatctggtccctgggcataacagctattgaacttgcaagaggggaaccacctcattccgagctgcaccccatgaaagttttattcctcattccaaagaacaacccaccgacgttggaaggaaactacagtaaacccctcaaggagtttgtggaggcctgtttgaataaggagccgagctttagacccactgctaaggagttattgaagcacaagtttatactacgcaatgcaaagaaaacttcctacttgaccgagctcatcgacaggtacaagagatggaaggccgagcagagccatgacgactcgagctccgaggattccgacgcggaaacagatggccaagcctcggggggcagtgattctggggactggatcttcacaatccgagaaaaagatcccaagaatctcgagaatggagctcttcagccatcggacttggacagaaataagatgaaagacatcccgaagaggcctttctctcagtgtttatctacaattatttctcctctgtttgcagagttgaaggagaagagccaggcgtgcggagggaacttggggtccattgaagagctgcgaggggccatctacctagcggaggaggcgtgccctggcatctccgacaccatggtggcccagctcgtgcagcggctccagagatactctctaagtggtggaggaacttcatcccactgaaattcctttggcatttggggttttgtttttccttttttccttcttcatcctcctccttttttaaaagtcaacgagagccttcgctgactccaccgaagaggtgcgccactgggagccaccccagcgccaggcgcccgtccagggacacacacagtcttcactgtgctgcagccagatgaagtctctcagatgggtggggagggtcagctccttccagcgatcattttattttattttattacttttgtttttaattttaaccatagtgcacatattccaggaaagtgtctttaaaaacaaaaacaaaccctgaaatgtatatttgggattatgataaggcaactaaagacatgaaacctcaggtatcctgctttaagttgataactccctctgggagctggagaatcgctctggtggatgggtgtacagatttgtatataatgtcatttttacggaaaccctttcggcgtgcataaggaatcactgtgtacaaactggccaagtgcttctgtagataacgtcagtggagtaaatattcgacaggccataacttgagtctattgccttgcctttattacatgtacattttgaattctgtgaccagtgatttgggttttattttgtatttgcagggtttgtcattaataattaatgcccctctcttacagaacactcctatttgtacctcaacaaatgcaaattttccccgtttgccctacgccccttttggtacacctagaggttgatttcctttttcatcgatggtactatttcttagtgttttaaattggaacatatcttgcctcatgaagctttaaattataattttcagtttctccccatgaagcgctctcgtctgacatttgtttggaatcgtgccactgctggtctgcgccagatgtaccgtcctttccaatacgattttctgttgcaccttgtagtggattctgcatatcatctttcccacctaaaaatgtctgaatgcttacacaaataaattttataacacgcttattttgc

SEQ ID NO: 8395 - protein, 431 aa, Homo sapiens; identical to SEQ ID NO: 8389

SEQ ID NO: 8396 - DNA, 866 bp, Homo sapiens
tttggcgtggctggccagctgacagacacccagatcaaaaggaacaccttcccatcggacttggacagaaataagatgaaagacatcccgaagaggcctttctctcagtgtttatctacaattatttctcctctgtttgcagagttgaaggagaagagccaggcgtgcggagggaacttggggtccattgaagagctgcgaggggccatctacctagcggaggaggcgtgccctggcatctccgacaccatggtggcccagctcgtgcagcggctccagagatactctctaagtggtggaggaacttcatcccactgaaattcctttggcatttggggttttgtttttccttttttccttcttcatcctcctccttttttaaaagtcaacgagagccttcgctgactccaccgaagaggtgcgccactgggagccaccccagcgccaggcgcccgtccagggacacacacagtcttcactgtgctgcagccagatgaagtctctcagatgggtggggagggtcagctccttccagcgatcattttattttattttattacttttgtttttaattttaaccatagtgcacatattccaggaaagtgtctttaaaaacaaaaacaaaccctgaaatgtatatttgggattatgataaggcaactaaagacatgaaacctcaggtatcctgctttaagttgataactccctctgggagctggagaatcgctctggtggatgggtgtacagatttgtatataatgtcatttttacggaaaccctttcggcgtgcataaggaatcactgtgtacaaactggccaagtgcttctgtagataacgtcagtggagtaaatattcgacaggccat

SEQ ID NO: 8397 - protein, 80 aa, Homo sapiens; identical to SEQ ID NO: 8387

SEQ ID NO: 8398 - DNA, 2209 bp, Homo sapiens
gggacgcgctcggcgctcgcgggctcggcgggctgtgcgcgcccactccggctccagcggccagcgcgcgcgggcccaggccgcccggctccagcccagcagtagcggcagcagcggcggcggcggcagtgcgcgcgaggccctgcgcccccagcagctcctccctggcgccgtgcatggagacgcggcccgccacccgccgctgagcccccgccgcccggccgggacccgccagggctggggtggcctcgggctccggccggccccgccgcccgagggctgcgcgcggcccgcgggcctcgccgccccgcgcggatcgtcgcggcccggccgtcccgtcccaggaagtggccgtcctgagcgccatggctcactccccggtgcagtcgggcctgcccggcatgcagaacctaaaggcagacccagaagagctttttacaaaactagagaaaattgggaagggctcctttggagaggtgttcaaaggcattgacaatcggactcagaaagtggttgccataaagatcattgatctggaagaagctgaagatgagatagaggacattcaacaagaaatcacagtgctgagtcagtgtgacagtccatatgtaaccaaatattatggatcctatctgaaggatacaaaattatggataataatggaatatcttggtggaggctccgcactagatctattagaacctggcccattagatgaaacccagatcgctactatattaagagaaatactgaaaggactcgattatctccattcggagaagaaaatccacagagacattaaagcggccaacgtcctgctgtctgagcatggcgaggtgaagctggcggactttggcgtggctggccagctgacagacacccagatcaaaaggaacaccttcgtgggcaccccattctggatggcacccgaggtcatcaaacagtcggcctatgactcgaaggcagacatctggtccctgggcataacagctattgaacttgcaagaggggaaccacctcattccgagctgcaccccatgaaagttttattcctcattccaaagaacaacccaccgacgttggaaggaaactacagtaaacccctcaaggagtttgtggaggcctgtttgaataaggagccgagctttagacccactgctaaggagttattgaagcacaagtttatactacgcaatgcaaagaaaacttcctacttgaccgagctcatcgacaggtacaagagatggaaggccgagcagagccatgacgactcgagctccgaggattccgacgcggaaacagatggccaagcctcggggggcagtgattctggggactggatcttcacaatccgagaaaaagatcccaagaatctcgagaatggagctcttcagccatcggacttggacagaaataagatgaaagacatcccgaagaggcctttctctcagtgtttatctacaattatttctcctctgtttgcagagttgaaggagaagagccaggcgtgcggagggaacttggggtccattgaagagctgcgaggggccatctacctagcggaggaggcgtgccctggcatctccgacaccatggtggcccagctcgtgcagcggctccagagatactctctaagtggtggaggaacttcatcccactgaaattcctttggcatttggggttttgtttttccttttttccttcttcatcctcctccttttttaaaagtcaacgagagccttcgctgactccaccgaagaggtgcgccactgggagccaccccagcgccaggcgcccgtccagggacacacacagtcttcactgtgctgcagccagatgaagtctctcagatgggtggggagggtcagctccttccagcgatcattttattttattttattacttttgtttttaattttaaccatagtgcacatattccaggaaagtgtctttaaaaacaaaaacaaaccctgaaatgtatatttgggattatgataaggcaactaaagacatgaaacctcaggtatcctgctttaagttgataactccctctgggagctggagaatcgctctggtggatgggtgtacagatttgtatataatgtcatttttacggaaaccctttcggcgtgcataaggaatcactgtgtacaaactggccaagtgcttctgtagataacgtcagtggagtaaatattcgacaggccat

SEQ ID NO: 8399 - protein, 431 aa, Homo sapiens; identical to SEQ ID NO: 8389

SEQ ID NO: 8400 - DNA, 421 bp, Homo sapiens
gaatctgtagtactgtcactgcaaccatacgctctagaaatatattgctttagagaaaaagcagcaaggccaaataaattgatacagaagaaatgtttagatatgtttttgcaagtttctgcatatctgaaatagaaccaatacatcacatggaaagccaatggctgtgttttgagtttatggagagccatatgtggcaaggaactgagggtggcatccaggcaacagacttcaagaaactgaggctgtcagtccaacaacccacaagaactgaatctgaccaacaatcacaggaacaaacttagaagtatactctttcccagacaaaccttcagatgagaccacagccccagccataagcttgaaaacaatctcatgagggaccttgagccacaggcatgtagtaaagctatgccaggaa

SEQ ID NO: 8401 - protein, 70 aa, Homo sapiens
MFRYVFASFCISEIEPIHHMESQWLCFEFMESHMWQGTEGGIQATDFKKLRLSVQQPTRTESDQQSQEQT

SEQ ID NO: 8402 - DNA, 771 bp, Homo sapiens
ggtttgtcacagatacactaatcatataaatgtaactcatacatttacaaggctatacatcacactgcagactgaaatctaaatttaaagaaataaactggagcttggggattctgcttttgcatcttcctcgttttctcttgccgctgccaagtaagaagtgcctttcacctcacaccatgtttctgaggcctccccagccatgtggaactgcaagtccagttaaacctctttttcttctcaggttccaaaattattttaggcatgggatcaaagaagaaacttctttgtagcagcatcccagtactaggactttttgtctctgcatggaaatctgaatatatttatatgttggagtgacatctctacaggaagcctagagacctaactgtttgctacatgtcaccaaagttaaagtggctaccttaatgagcagccaggatgccatcatctccgacctgaatgacaataacctccaaaccagcctttgtatactccttcctgctgctctgcagtccacttccacagaccagccaactgaatctccttatagattcataatggccatcagcacaaagatgttttatctgcagtcaaccagtcatgtttcatgatggcatcaaaatgtgtgctggagtttgctgggggtccactctagatcctgtttgcctgagtatcaccagcggacactgtagaacagcaaagattgctgcctgctccttcctctggaagcttcgtcccagaggggcacctgcaagatgccaaccagag

SEQ ID NO: 8403 - protein, 61 aa, Homo sapiens
MSSQDAIISDLNDNNLQTSLCILLPAALQSTSTDQPTESPYRFIMAISTKMFYLQSTSHVS

SEQ ID NO: 8404 - DNA, 540 bp, Homo sapiens
gagtgaacccacaaaaacaagagaacatcatgtttctagaggctgcctgcattccttggctaatgactttgcatcactctgacgtcttgctcccatggtcgtatcacctactactggccctgatctcactacttgttatatggaacaaagggataaggaagtgacttgcctaagtcactgaggaacctaatattgagattagcactcaatgattcctggctctcagaatgtgtgctgctaccaccaggccacactcttccctccagagagaagatgtgtcagcacggaattgtgctgaagcaaagatgtgaaatagaatgattacatatctacctagtgggaagatctggggaagaatctatcagtgctggcagagaagcaaaccatacgacatcactcatccccagaaagtgaagttaagggaaataaaaaacaatctacaccatttagaaaacacagccaccccatacccttggaaaaaatacactaaaatatcttcatctgatttgacctctaataacatgaataattgtcttataa

SEQ ID NO: 8405 - protein, 44 aa, Homo sapiens
MFLEAACIPWLMTLHHSDVLLPWSYHLLLALISLLVIWNKGIRK

SEQ ID NO: 8406 - DNA, 717 bp, Homo sapiens
aaggctgcaaacgaagccagaaagatggtggccagcacacctatggcaactatcaccacggtctccatgcttccggggagctcctgactcagtcccgttcacatcgtcctcatgggctaaggctgctggaagtggcaaactgggggaagaggatggcaggagctaggttcctccacgacacctccagagacctgagggcctcaagctgcagctccggggcacatcccgctgcgctcccacgacggccccgcggatggcaaagtcagcggcatcgcctatgcaggcaatcaaaggatgttgatggataagtgtttcaggcagaataatggccctcaaagatgttgacaccagaatcttcagaacctttgcatatgttacctaacatgacaaaagggactttgctgatgtgattaaggttaagaactttgagaagggaagattatcctggattatacaggtcgacgtttatttctttctgaactttcctggaggatcatcggccatactccagcagaagggtggatttgaaaaaataacgtttccacggcaacagtggcagcaattcaaaggaagacgttggagaattcacatgctattttagctggctctgtgattgcaatcacacaaatcattacattccagcgagatcccatcaacagaaggtttttccatttcagtctgtcaagtgaaatgaaaaggagcttttgaaaaacgtct

SEQ ID NO: 8407 - protein, 51 aa, Homo sapiens
MAGARFLHDTSRDLRASSCSSGAHPAALPRRPRGWQSQRHRLCRQSKDVDG

SEQ ID NO: 8408 - DNA, 548 bp, Homo sapiens
tcaagctgcagctccggggcacatcccgctgcgctcccacgacggccccgcggatggcaaagtcagcggcatcgcctatgcaggcaatcaaaggatgttgatggataagtgtttcaggcagaataatggccctcaaagatgttgacaccagaatcttcagaacctttgcatatgttacctaacatgacaaaagggactttgctgatgtgattaaggttaagaactttgagaagggaagattatcctggattatacaggtcgacgtttatttctttctgaactttcctggaggatcatcggccatactccagcagaagggtggatttgaaaaaataacgtttccacggcaacagtggcagcaattcaaaggaagacgttggagaattcacatgctattttagctggctctgtgattgcaatcacacaaatcattacattccagcgagatcccatcaacagaaggtttttccatttcagtctgtcaagtttttcaggcatgaatactgtaagcaagaagagaaaagttacaataaattgacatttatagt

SEQ ID NO: 8409 - protein, 69 aa, Homo sapiens
RFHGNSGSNSKEDVGEFTCYFSWLCDCNHTNHYIPARSHQQKVFPFQSVKFFRHEYCKQEEKSYNKLTF

SEQ ID NO: 8410 - DNA, 1864 bp, Homo sapiens
ctgccctctgggtctgttacagtccaacttggtggcaaggacagagggcctggaccagcaggtggactggaactggtaagaaaagagcttgggtgctccagagatagccccaccataaagacagtgggtttcagggtccctgtcaaggaatggaacggctcctgaccccaaagtccagatgtttggctggtcagtcgggtgcaagtttatgcccttgggaacagagttttgcctcactctgtgagggctgtaggcctatggtcgaaagggaaggggcttctgtctcctggggctcacctctgtgcagagaaacctcttcctacccagaccattctaggtaaaagccaagctatattcttcctcctctagcagtcctctctcctacctttcctcaggtatgatgttctgtccccgggggagatgcaacggctctcctttgcccgactcttctacctgcagccgaagtacgcagtgcttgatgaagccaccagtgccctgacagaggaagtggagagcgagctctatcgcatcggccagcagctggggatgacgttcatcagtgtgggacatcggcagagccttgagaaggtacccgtgctcacaaggatggcctgaggaggagaaagaacccaaaggctcagcctggccagggccagaggcccctcaaaacggggagtagcagtagcagagagaaccgagtggcctcctctgccagcggccagggcagcctgatctccatgtggtggtggtctcttgtagtttcattccttggttctgaaactctgtggaggaggaagatgggagctgatgagaatcaaagtggaatgaagctctggcttttggaaggagagccacactgtggcgggtcggcggccctcaggagagaccaggaggactgacagcgaagatcgagctcaggttcgccacatagatcccgtgcaggagccacatgggtcctgtgcaggacccctagcagtggtgggctgagcccaggtctaggtttctgtgggggacactgaatctcccagtgttcagtctcccaggactctgctgcctcagccagagcctccatatgcttgaagtgctgattacctacaaatgatttcagatcatgtttgctaaagagaaatctggaagtgtgagatctgtaagaaatgaaagaaatgactcttggagtcaagagatctggaaatcttttaatcagttaaattgtgcagcaatagatttttaactttaactgaccatttaagttttttaataagttttttacaaagaaaagttaaacattaaaaagaattacagctttctgtcttctctatcatggaatgatcttttttattgaatctccagatttgtatttgacagcttggtgggaagggaagcacactctgctgttctggaatcttatgcccagggtttttcacttctccccacatctccctttccacttgccagtgttgtgtagttagaacctgaaccactaacttccaggggcctttggtctgccctaccttaacccaaatgaaagtaaatccctttccccttagccaaaataaggttgggttttctaaaaaaatagtctatattagggaacaacaacagcaaattagacaaaacccagaaagcacaaagcatgaggtggagttactgtgcccaaagtcctcactcagaccagtgcccctccagttcagttgtctatgtattaccttccttaccttcataatttttgccaggcttctgtacttctagtacttgagttacttaatatttttaaaaacaaaccttttaagtttaaatggatttttaagtgaaattttacacttaacatagatggaaagtaactaaaaataaatacaagaaaaac

SEQ ID NO: 8411 - protein, 64 aa, Homo sapiens [sequence omitted]

SEQ ID NO: 8412 - DNA, 1592 bp, Homo sapiens
ggatctgagcctaaagatctccgagggacagagcctgctcatcacaggcaacacgggcactggctcagtgcagatgctgacggactttgggccccatggggtgctattcctgccacaaaagccattcttcactgacgggacccttcgggagcaggtgatatatcccctgaaggaggtctaccccgactcaggttctgccgatgatgagaggatcttgaggttcttggaattggcaggcctgtccaacttggtggcaaggacagagggcctggaccagcaggtggactggaactggtatgatgttctgtccccgggggagatgcaacggctctcctttgcccgactcttctacctgcagccgaagtacgcagtgcttgatgaagccaccagtgccctgacagaggaagtggagagcgagctctatcgcatcggccagcagctggggatgacgttcatcagtgtgggacatcggcagagccttgagaagtttcattccttggttctgaaactctgtggaggaggaagatgggagctgatgagaatcaaagtggaatgaagctctggcttttggaaggagagccacactgtggcgggtcggcggccctcaggagagaccaggaggactgacagcgaagatcgagctcaggttcgccacatagatcccgtgcaggagccacatgggtcctgtgcaggacccctagcagtggtgggctgagcccaggtctaggtttctgtgggggacactgaatctcccagtgttcagtctcccaggactctgctgcctcagccagagcctccatatgcttgaagtgctgattacctacaaatgatttcagatcatgtttgctaaagagaaatctggaagtgtgagatctgtaagaaatgaaagaaatgactcttggagtcaagagatctggaaatcttttaatcagttaaattgtgcagcaatagatttttaactttaactgaccatttaagttttttaataagttttttacaaagaaaagttaaacattaaaaagaattacagctttctgtcttctctatcatggaatgatcttttttattgaatctccagatttgtatttgacagcttggtgggaagggaagcacactctgctgttctggaatcttatgcccagggtttttcacttctccccacatctccctttccacttgccagtgttgtgtagttagaacctgaaccactaacttccaggggcctttggtctgccctaccttaacccaaatgaaagtaaatccctttccccttagccaaaataaggttgggttttctaaaaaaatagtctatattagggaacaacaacagcaaattagacaaaacccagaaagcacaaagcatgaggtggagttactgtgcccaaagtcctcactcagaccagtgcccctccagttcagttgtctatgtattaccttccttaccttcataatttttgccaggcttctgtacttctagtacttgagttacttaatatttttaaaaacaaaccttttaagtttaaatggatttttaagtgaaattttacacttaacatagatggaaagtaactaaaaataaatacaagaaaaac

SEQ ID NO: 8413 - protein, 160 aa, Homo sapiens
MLTDFGPHGVLFLPQKPFFTDGTLREQVIYPLKEVYPDSGSADDERILRFLELAGLSNLVARTEGLDQQVDWNWYDVLSPGEMQRLSFARLFYLQPKYAVLDEATSALTEEVESELYRIGQQLGMTFISVGHRQSLEKFHSLVLKLCGGGRWELMRIKVE

SEQ ID NO: 8414 - DNA, 1444 bp, Homo sapiens
tcgggtctcaggtcatggcggtcgcggggcccgcgcccggagctggcgccagtgcttgatgaagccaccagtgccctgacagaggaagtggagagcgagctctatcgcatcggccagcagctggggatgacgttcatcagtgtgggacatcggcagagccttgagaaggtacccgtgctcacaaggatggcctgaggaggagaaagaacccaaaggctcagcctggccagggccagaggcccctcaaaacggggagtagcagtagcagagagaaccgagtggcctcctctgccagcggccagggcagcctgatctccatgtggtggtggtctcttgtagtttcattccttggttctgaaactctgtggaggaggaagatgggagctgatgagaatcaaagtggaatgaagctctggcttttggaaggagagccacactgtggcgggtcggcggccctcaggagagaccaggaggactgacagcgaagatcgagctcaggttcgccacatagatcccgtgcaggagccacatgggtcctgtgcaggacccctagcagtggtgggctgagcccaggtctaggtttctgtgggggacactgaatctcccagtgttcagtctcccaggactctgctgcctcagccagagcctccatatgcttgaagtgctgattacctacaaatgatttcagatcatgtttgctaaagagaaatctggaagtgtgagatctgtaagaaatgaaagaaatgactcttggagtcaagagatctggaaatcttttaatcagttaaattgtgcagcaatagatttttaactttaactgaccatttaagttttttaataagttttttacaaagaaaagttaaacattaaaaagaattacagctttctgtcttctctatcatggaatgatcttttttattgaatctccagatttgtatttgacagcttggtgggaagggaagcacactctgctgttctggaatcttatgcccagggtttttcacttctccccacatctccctttccacttgccagtgttgtgtagttagaacctgaaccactaacttccaggggcctttggtctgccctaccttaacccaaatgaaagtaaatccctttccccttagccaaaataaggttgggttttctaaaaaaatagtctatattagggaacaacaacagcaaattagacaaaacccagaaagcacaaagcatgaggtggagttactgtgcccaaagtcctcactcagaccagtgcccctccagttcagttgtctatgtattaccttccttaccttcataatttttgccaggcttctgtacttctagtacttgagttacttaatatttttaaaaacaaaccttttaagtttaaatggatttttaagtgaaattttacacttaacatagatggaaagtaactaaaaataaatacaagaaaaac

SEQ ID NO: 8415 - protein, 75 aa, Homo sapiens
MKVNPFPLSQNKVGFSKKIVYIREQQQQIRQNPESTKHEVELLCPKSSLRPVPLQFSCLCITFLTFIIFARLLYF

SEQ ID NO: 8416 - DNA, 3043 bp, Homo sapiens
gcttccgggagagtccgcgtctcccgcaccttcctctctatcaaacgccgtctctgtggtagccggggccccgcccctcctcggactctacccagtactgaactaggggcagctgggctccagagtccctcgggtctcaggtcatggcggtcgcggggcccgcgcccggagctggcgccaggcccaggttagatctgcaatttctccagcggttcctgcagatactgaaggttttgtttccttcttggtcatcacaaaatgccttgatgttcctgacccttttgtgcctgaccctactggctgaagagctttgatcagttcacctgcaacctgctgtatgtgagctggaggaaggacctcactgagcaccttcaccgcctctacttccggggccgtgcgtactacaccctcaacgtgctgcgggatgacatcgataacccggaccagcgcatcagccaggacgtggagcgattctgccggcagctcagcagcatggccagcaagctcatcatctccccgttcaccctcgtctactacacttaccagtgcttccaaagcacaggctggctcgggcctgtgagcatcttcgggtatttcatcctggggaccgtggtgaacaaaactttgatgggccccattgtgatgaagctggtgcatcaggagaagctggagggagattttaggttcaagcacatgcagattcgggtgaatgcggagcctgctgctttctacagagctgggcatgtggagcacatgaggacagaccgcaggctgcagagactccttcagacccagagggagctgatgtccaaggagctctggctgtacatcggcatcaacacctttgactatctgggcagcatcctgagttacgttgtcatcgcaatccccattttcagcggggtctatggagacctgagtcccgcagagcttagcaccctggtcagcaagaatgcctttgtgtgcatctacctcatcagctgcttcacccagctcatcgacctgtccacgacgctctcagatgtggctggctacacgcacagaattgggcagcttcgggagacgcttctggacatgtccctgaagtcacaggactgcgagatcctgggcgagagcgagtggggcttggacacacccccagggtggccagcggcagagccagcagacacagcatttctccttgagcgggtctccatctctgccccctcctctgacaaacccctaatcaaggatctgagcctaaagatctccgagggacagagcctgctcatcacaggcaacacgggcactggcaagacctccttgctccgggttctgggtggcctctggacgagtacacggggctcagtgcagatgctgacggactttgggccccatggggtgctattcctgccacaaaagccattcttcactgacgggacccttcgggagcaggtgatatatcccctgaaggaggtctaccccgactcaggttctgccgatgatgagaggatcttgaggttcttggaattggcaggcctgtccaacttggtggcaaggacagagggcctggaccagcaggtggactggaactggtatgatgttctgtccccgggggagatgcaacggctctcctttgcccgactcttctacctgcagccgaagtacgcagtgcttgatgaagccaccagtgccctgacagaggaagtggagagcgagctctatcgcatcggccagcagctggggatgacgttcatcagtgtgggacatcggcagagccttgagaaggtacccgtgctcacaaggatggcctgaggaggagaaagaacccaaaggctcagcctggccagggccagaggcccctcaaaacggggagtagcagtagcagagagaaccgagtggcctcctctgccagcggccagggcagcctgatctccatgtggtggtggtctcttgtagtttcattccttggttctgaaactctgtggaggaggaagatgggagctgatgagaatcaaagtggaatgaagctctggcttttggaaggagagccacactgtggcgggtcggcggccctcaggagagaccaggaggactgacagcgaagatcgagctcaggttcgccacatagatcccgtgcaggagccacatgggtcctgtgcaggacccctagcagtggtgggctgagcccaggtctaggtttctgtgggggacactgaatctcccagtgttcagtctcccaggactctgctgcctcagccagagcctccatatgcttgaagtgctgattacctacaaatgatttcagatcatgtttgctaaagagaaatctggaagtgtgagatctgtaagaaatgaaagaaatgactcttggagtcaagagatctggaaatcttttaatcagttaaattgtgcagcaatagatttttaactttaactgaccatttaagttttttaataagttttttacaaagaaaagttaaacattaaaaagaattacagctttctgtcttctctatcatggaatgatcttttttattgaatctccagatttgtatttgacagcttggtgggaagggaagcacactctgctgttctggaatcttatgcccagggtttttcacttctccccacatctccctttccacttgccagtgttgtgtagttagaacctgaaccactaacttccaggggcctttggtctgccctaccttaacccaaatgaaagtaaatccctttccccttagccaaaataaggttgggttttctaaaaaaatagtctatattagggaacaacaacagcaaattagacaaaacccagaaagcacaaagcatgaggtggagttactgtgcccaaagtcctcactcagaccagtgcccctccagttcagttgtctatgtattaccttccttaccttcataatttttgccaggcttctgtacttctagtacttgagttacttaatatttttaaaaacaaaccttttaagtttaaatggatttttaagtgaaattttacacttaacatagatggaaagtaactaaaaataaatacaagaaaaac

SEQ ID NO: 8417 - protein, 433 aa, Homo sapiens
MASKLIISPFTLVYYTYQCFQSTGWLGPVSIFGYFILGTVVNKTLMGPIVMKLVHQEKLEGDFRFKHMQIRVNAEPAAFYRAGHVEHMRTDRRLQRLLQTQRELMSKELWLYIGINTFDYLGSILSYVVIAIPIFSGVYGDLSPAELSTLVSKNAFVCIYLISCFTQLIDLSTTLSDVAGYTHRIGQLRETLLDMSLKSQDCEILGESEWGLDTPPGWPAAEPADTAFLLERVSISAPSSDKPLIKDLSLKISEGQSLLITGNTGTGKTSLLRVLGGLWTSTRGSVQMLTDFGPHGVLFLPQKPFFTDGTLREQVIYPLKEVYPDSGSADDERILRFLELAGLSNLVARTEGLDQQVDWNWYDVLSPGEMQRLSFARLFYLQPKYAVLDEATSALTEEVESELYRIGQQLGMTFISVGHRQSLEKVPVLTRMA

SEQ ID NO: 8418 - DNA, 2872 bp, Homo sapiens
gcttccgggagagtccgcgtctcccgcaccttcctctctatcaaacgccgtctctgtggtagccggggccccgcccctcctcggactctacccagtactgaactaggggcagctgggctccagagtccctcgggtctcaggtcatggcggtcgcggggcccgcgcccggagctggcgccaggcccaggttagatctgcaatttctccagcggttcctgcagatactgaaggttttgtttccttcttggtcatcacaaaatgccttgatgttcctgacccttttgtgcctgaccctactggctgaagagctttgatcagttcacctgcaacctgctgtatgtgagctggaggaaggacctcactgagcaccttcaccgcctctacttccggggccgtgcgtactacaccctcaacgtgctgcgggatgacatcgataacccggaccagcgcatcagccaggacgtggagcgattctgccggcagctcagcagcatggccagcaagctcatcatctccccgttcaccctcgtctactacacttaccagtgcttccaaagcacaggctggctcgggcctgtgagcatcttcgggtatttcatcctggggaccgtggtgaacaaaactttgatgggccccattgtgatgaagctggtgcatcaggagaagctggagggagattttaggttcaagcacatgcagattcgggtgaatgcggagcctgctgctttctacagagctgggcatgtggagcacatgaggacagaccgcaggctgcagagactccttcagacccagagggagctgatgtccaaggagctctggctgtacatcggcatcaacacctttgactatctgggcagcatcctgagttacgttgtcatcgcaatccccattttcagcggggtctatggagacctgagtcccgcagagcttagcaccctggtcagcaagaatgcctttgtgtgcatctacctcatcagctgcttcacccagctcatcgacctgtccacgacgctctcagatgtggctggctacacgcacagaattgggcagcttcgggagacgcttctggacatgtccctgaagtcacaggactgcgagatcctgggcgagagcgagtggggcttggacacacccccagggtggccagcggcagagccagcagacacagcatttctccttgagcgggtctccatctctgccccctcctctgacaaacccctaatcaaggatctgagcctaaagatctccgagggacagagcctgctcatcacaggcaacacgggcactggcaagacctccttgctccgggttctgggtggcctctggacgagtacacggggctcagtgcagatgctgacggactttgggccccatggggtgctattcctgccacaaaagccattcttcactgacgggacccttcgggagcaggtgatatatcccctgaaggaggtctaccccgactcaggttctgccgatgatgagaggatcttgaggttcttggaattggcaggcctgtccaacttggtggcaaggacagagggcctggaccagcaggtggactggaactggtatgatgttctgtccccgggggagatgcaacggctctcctttgcccgactcttctacctgcagccgaagtacgcagtgcttgatgaagccaccagtgccctgacagaggaagtggagagcgagctctatcgcatcggccagcagctggggatgacgttcatcagtgtgggacatcggcagagccttgagaagtttcattccttggttctgaaactctgtggaggaggaagatgggagctgatgagaatcaaagtggaatgaagctctggcttttggaaggagagccacactgtggcgggtcggcggccctcaggagagaccaggaggactgacagcgaagatcgagctcaggttcgccacatagatcccgtgcaggagccacatgggtcctgtgcaggacccctagcagtggtgggctgagcccaggtctaggtttctgtgggggacactgaatctcccagtgttcagtctcccaggactctgctgcctcagccagagcctccatatgcttgaagtgctgattacctacaaatgatttcagatcatgtttgctaaagagaaatctggaagtgtgagatctgtaagaaatgaaagaaatgactcttggagtcaagagatctggaaatcttttaatcagttaaattgtgcagcaatagatttttaactttaactgaccatttaagttttttaataagttttttacaaagaaaagttaaacattaaaaagaattacagctttctgtcttctctatcatggaatgatcttttttattgaatctccagatttgtatttgacagcttggtgggaagggaagcacactctgctgttctggaatcttatgcccagggtttttcacttctccccacatctccctttccacttgccagtgttgtgtagttagaacctgaaccactaacttccaggggcctttggtctgccctaccttaacccaaatgaaagtaaatccctttccccttagccaaaataaggttgggttttctaaaaaaatagtctatattagggaacaacaacagcaaattagacaaaacccagaaagcacaaagcatgaggtggagttactgtgcccaaagtcctcactcagaccagtgcccctccagttcagttgtctatgtattaccttccttaccttcataatttttgccaggcttctgtacttctagtacttgagttacttaatatttttaaaaacaaaccttttaagtttaaatggatttttaagtgaaattttacacttaacatagatggaaagtaactaaaaataaatacaagaaaaac

SEQ ID NO: 8419 - protein, 447 aa, Homo sapiens
MASKLIISPFTLVYYTYQCFQSTGWLGPVSIFGYFILGTVVNKTLMGPIVMKLVHQEKLEGDFRFKHMQIRVNAEPAAFYRAGHVEHMRTDRRLQRLLQTQRELMSKELWLYIGINTFDYLGSILSYVVIAIPIFSGVYGDLSPAELSTLVSKNAFVCIYLISCFTQLIDLSTTLSDVAGYTHRIGQLRETLLDMSLKSQDCEILGESEWGLDTPPGWPAAEPADTAFLLERVSISAPSSDKPLIKDLSLKISEGQSLLITGNTGTGKTSLLRVLGGLWTSTRGSVQMLTDFGPHGVLFLPQKPFFTDGTLREQVIYPLKEVYPDSGSADDERILRFLELAGLSNLVARTEGLDQQVDWNWYDVLSPGEMQRLSFARLFYLQPKYAVLDEATSALTEEVESELYRIGQQLGMTFISVGHRQSLEKFHSLVLKLCGGGRWELMRIKVE

SEQ ID NO: 8420 - DNA, 3508 bp, Homo sapiens
cgcttccgggagagtccgcgtctcccgcaccttcctctctatcaaacgccgtctctgtggtagccggggccccgcccctcctcggactctacccagtactgaactaggggcagctgggctccagagtccctcgggtctcaggtcatggcggtcgcggggcccgcgcccggagctggcgccaggcccaggttagatctgcaatttctccagcggttcctgcagatactgaaggttttgtttccttcttggtcatcacaaaatgccttgatgttcctgacccttttgtgcctgaccctactggagcaatttgtgatctaccaggttggcttgatccccagtcagtactatggggtcctgggaaacaaagacttggaagggtttaagactctgacattcctggctgtcatgctcattgttctgaactccacgctgaagagctttgatcagttcacctgcaacctgctgtatgtgagctggaggaaggacctcactgagcaccttcaccgcctctacttccggggccgtgcgtactacaccctcaacgtgctgcgggatgacatcgataacccggaccagcgcatcagccaggacgtggagcgattctgccggcagctcagcagcatggccagcaagctcatcatctccccgttcaccctcgtctactacacttaccagtgcttccaaagcacaggctggctcgggcctgtgagcatcttcgggtatttcatcctggggaccgtggtgaacaaaactttgatgggccccattgtgatgaagctggtgcatcaggagaagctggagggagattttaggttcaagcacatgcagattcgggtgaatgcggagcctgctgctttctacagagctgggcatgtggagcacatgaggacagaccgcaggctgcagagactccttcagacccagagggagctgatgtccaaggagctctggctgtacatcggcatcaacacctttgactatctgggcagcatcctgagttacgttgtcatcgcaatccccattttcagcggggtctatggagacctgagtcccgcagagcttagcaccctggtcagcaagaatgcctttgtgtgcatctacctcatcagctgcttcacccagctcatcgacctgtccacgacgctctcagatgtggctggctacacgcacagaattgggcagcttcgggagacgcttctggacatgtccctgaagtcacaggactgcgagatcctgggcgagagcgagtggggcttggacacacccccagggtggccagcggcagagccagcagacacagcatttctccttgagcgggtctccatctctgccccctcctctgacaaacccctaatcaaggatctgagcctaaagatctccgagggacagagcctgctcatcacaggcaacacgggcactggcaagacctccttgctccgggttctgggtggcctctggacgagtacacggggctcagtgcagatgctgacggactttgggccccatggggtgctattcctgccacaaaagccattcttcactgacgggacccttcgggagcaggtcagtctagttcagggggctcactcctccctcctcaaccccgcccacccacagctgggacctctggcactgtgacaagtctcaggtcctagagtcagggcaaaaggtgaggtggtgaagtggcccgggcctgggaactgctggctctaagaaccttctattcacatccatggattgggcccactactcatagcagctcctgaggcaggtaaatggggcaaggactcacgccaaataccacacgcgtatgtcaaacacccaaggtcggattctggggcccctgccctcaggaggctgtcagactgttccccctaaacacacttctgaaggttgtagggaccttgccctgctgtctgccggccagagcctctcccatctgacccaggccaggcgttcccacctctcctccttgggaggttccagtgggttctggagggagggtgggctgtgtgcagctccgtcttttgctcgccctcctaggttggtgtggtttttttcttttctcaggtgatatatcccctgaaggaggtctaccccgactcaggttctgccgatgatgagaggatcttgaggttcttggaattggcaggcctgtccaacttggtggcaaggacagagggcctggaccagcaggtggactggaactggtatgatgttctgtccccgggggagatgcaacggctctcctttgcccgactcttctacctgcagccgaagtacgcagtgcttgatgaagccaccagtgccctgacagaggaagtggagagcgagctctatcgcatcggccagcagctggggatgacgttcatcagtgtgggacatcggcagagccttgagaagtttcattccttggttctgaaactctgtggaggaggaagatgggagctgatgagaatcaaagtggaatgaagctctggcttttggaaggagagccacactgtggcgggtcggcggccctcaggagagaccaggaggactgacagcgaagatcgagctcaggttcgccacatagatcccgtgcaggagccacatgggtcctgtgcaggacccctagcagtggtgggctgagcccaggtctaggtttctgtgggggacactgaatctcccagtgttcagtctcccaggactctgctgcctcagccagagcctccatatgcttgaagtgctgattacctacaaatgatttcagatcatgtttgctaaagagaaatctggaagtgtgagatctgtaagaaatgaaagaaatgactcttggagtcaagagatctggaaatcttttaatcagttaaattgtgcagcaatagatttttaactttaactgaccatttaagttttttaataagttttttacaaagaaaagttaaacattaaaaagaattacagctttctgtcttctctatcatggaatgatcttttttattgaatctccagatttgtatttgacagcttggtgggaagggaagcacactctgctgttctggaatcttatgcccagggtttttcacttctccccacatctccctttccacttgccagtgttgtgtagttagaacctgaaccactaacttccaggggcctttggtctgccctaccttaacccaaatgaaagtaaatccctttccccttagccaaaataaggttgggttttctaaaaaaatagtctatattagggaacaacaacagcaaattagacaaaacccagaaagcacaaagcatgaggtggagttactgtgcccaaagtcctcactcagaccagtgcccctccagttcagttgtctatgtattaccttccttaccttcataatttttgccaggcttctgtacttctagtacttgagttacttaatatttttaaaaacaaaccttttaagtttaaatggatttttaagtgaaattttacacttaacatagatggaaagtaactaaaaataaatacaagaaaaac

SEQ ID NO: 8421 - protein, 497 aa, Homo sapiens
MAVAGPAPGAGARPRLDLQFLQRFLQILKVLFPSWSSQNALMFLTLLCLTLLEQFVIYQVGLIPSQYYGVLGNKDLEGFKTLTFLAVMLIVLNSTLKSFDQFTCNLLYVSWRKDLTEHLHRLYFRGRAYYTLNVLRDDIDNPDQRISQDVERFCRQLSSMASKLIISPFTLVYYTYQCFQSTGWLGPVSIFGYFILGTVVNKTLMGPIVMKLVHQEKLEGDFRFKHMQIRVNAEPAAFYRAGHVEHMRTDRRLQRLLQTQRELMSKELWLYIGINTFDYLGSILSYVVIAIPIFSGVYGDLSPAELSTLVSKNAFVCIYLISCFTQLIDLSTTLSDVAGYTHRIGQLRETLLDMSLKSQDCEILGESEWGLDTPPGWPAAEPADTAFLLERVSISAPSSDKPLIKDLSLKISEGQSLLITGNTGTGKTSLLRVLGGLWTSTRGSVQMLTDFGPHGVLFLPQKPFFTDGTLREQVSLVQGAHSSLLNPAHPQLGPLAL

SEQ ID NO: 8422 - DNA, 3172 bp, Homo sapiens
cgcttccgggagagtccgcgtctcccgcaccttcctctctatcaaacgccgtctctgtggtagccggggccccgcccctcctcggactctacccagtactgaactaggggcagctgggctccagagtccctcgggtctcaggtcatggcggtcgcggggcccgcgcccggagctggcgccaggcccaggttagatctgcaatttctccagcggttcctgcagatactgaaggttttgtttccttcttggtcatcacaaaatgccttgatgttcctgacccttttgtgcctgaccctactggagcaatttgtgatctaccaggttggcttgatccccagtcagtactatggggtcctgggaaacaaagacttggaagggtttaagactctgacattcctggctgtcatgctcattgttctgaactccacgctgaagagctttgatcagttcacctgcaacctgctgtatgtgagctggaggaaggacctcactgagcaccttcaccgcctctacttccggggccgtgcgtactacaccctcaacgtgctgcgggatgacatcgataacccggaccagcgcatcagccaggacgtggagcgattctgccggcagctcagcagcatggccagcaagctcatcatctccccgttcaccctcgtctactacacttaccagtgcttccaaagcacaggctggctcgggcctgtgagcatcttcgggtatttcatcctggggaccgtggtgaacaaaactttgatgggccccattgtgatgaagctggtgcatcaggagaagctggagggagattttaggttcaagcacatgcagattcgggtgaatgcggagcctgctgctttctacagagctgggcatgtggagcacatgaggacagaccgcaggctgcagagactccttcagacccagagggagctgatgtccaaggagctctggctgtacatcggcatcaacacctttgactatctgggcagcatcctgagttacgttgtcatcgcaatccccattttcagcggggtctatggagacctgagtcccgcagagcttagcaccctggtcagcaagaatgcctttgtgtgcatctacctcatcagctgcttcacccagctcatcgacctgtccacgacgctctcagatgtggctggctacacgcacagaattgggcagcttcgggagacgcttctggacatgtccctgaagtcacaggactgcgagatcctgggcgagagcgagtggggcttggacacacccccagggtggccagcggcagagccagcagacacagcatttctccttgagcgggtctccatctctgccccctcctctgacaaacccctaatcaaggatctgagcctaaagatctccgagggacagagcctgctcatcacaggcaacacgggcactggcaagacctccttgctccgggttctgggtggcctctggacgagtacacggggctcagtgcagatgctgacggactttgggccccatggggtgctattcctgccacaaaagccattcttcactgacgggacccttcgggagcaggtgatatatcccctgaaggaggtctaccccgactcaggttctgccgatgatgagaggatcttgaggttcttggaattggcaggcctgtccaacttggtggcaaggacagagggcctggaccagcaggtggactggaactggtatgatgttctgtccccgggggagatgcaacggctctcctttgcccgactcttctacctgcagccgaagtacgcagtgcttgatgaagccaccagtgccctgacagaggaagtggagagcgagctctatcgcatcggccagcagctggggatgacgttcatcagtgtgggacatcggcagagccttgagaaggtacccgtgctcacaaggatggcctgaggaggagaaagaacccaaaggctcagcctggccagggccagaggcccctcaaaacggggagtagcagtagcagagagaaccgagtggcctcctctgccagcggccagggcagcctgatctccatgtggtggtggtctcttgtagtttcattccttggttctgaaactctgtggaggaggaagatgggagctgatgagaatcaaagtggaatgaagctctggcttttggaaggagagccacactgtggcgggtcggcggccctcaggagagaccaggaggactgacagcgaagatcgagctcaggttcgccacatagatcccgtgcaggagccacatgggtcctgtgcaggacccctagcagtggtgggctgagcccaggtctaggtttctgtgggggacactgaatctcccagtgttcagtctcccaggactctgctgcctcagccagagcctccatatgcttgaagtgctgattacctacaaatgatttcagatcatgtttgctaaagagaaatctggaagtgtgagatctgtaagaaatgaaagaaatgactcttggagtcaagagatctggaaatcttttaatcagttaaattgtgcagcaatagatttttaactttaactgaccatttaagttttttaataagttttttacaaagaaaagttaaacattaaaaagaattacagctttctgtcttctctatcatggaatgatcttttttattgaatctccagatttgtatttgacagcttggtgggaagggaagcacactctgctgttctggaatcttatgcccagggtttttcacttctccccacatctccctttccacttgccagtgttgtgtagttagaacctgaaccactaacttccaggggcctttggtctgccctaccttaacccaaatgaaagtaaatccctttccccttagccaaaataaggttgggttttctaaaaaaatagtctatattagggaacaacaacagcaaattagacaaaacccagaaagcacaaagcatgaggtggagttactgtgcccaaagtcctcactcagaccagtgcccctccagttcagttgtctatgtattaccttccttaccttcataatttttgccaggcttctgtacttctagtacttgagttacttaatatttttaaaaacaaaccttttaagtttaaatggatttttaagtgaaattttacacttaacatagatggaaagtaactaaaaataaatacaagaaaaac

SEQ ID NO: 8423 - protein, 592 aa, Homo sapiens
MAVAGPAPGAGARPRLDLQFLQRFLQILKVLFPSWSSQNALMFLTLLCLTLLEQFVIYQVGLIPSQYYGVLGNKDLEGFKTLTFLAVMLIVLNSTLKSFDQFTCNLLYVSWRKDLTEHLHRLYFRGRAYYTLNVLRDDIDNPDQRISQDVERFCRQLSSMASKLIISPFTLVYYTYQCFQSTGWLGPVSIFGYFILGTVVNKTLMGPIVMKLVHQEKLEGDFRFKHMQIRVNAEPAAFYRAGHVEHMRTDRRLQRLLQTQRELMSKELWLYIGINTFDYLGSILSYVVIAIPIFSGVYGDLSPAELSTLVSKNAFVCIYLISCFTQLIDLSTTLSDVAGYTHRIGQLRETLLDMSLKSQDCEILGESEWGLDTPPGWPAAEPADTAFLLERVSISAPSSDKPLIKDLSLKISEGQSLLITGNTGTGKTSLLRVLGGLWTSTRGSVQMLTDFGPHGVLFLPQKPFFTDGTLREQVIYPLKEVYPDSGSADDERILRFLELAGLSNLVARTEGLDQQVDWNWYDVLSPGEMQRLSFARLFYLQPKYAVLDEATSALTEEVESELYRIGQQLGMTFISVGHRQSLEKVPVLTRMA

SEQ ID NO: 8424 - DNA, 3001 bp, Homo sapiens
cgcttccgggagagtccgcgtctcccgcaccttcctctctatcaaacgccgtctctgtggtagccggggccccgcccctcctcggactctacccagtactgaactaggggcagctgggctccagagtccctcgggtctcaggtcatggcggtcgcggggcccgcgcccggagctggcgccaggcccaggttagatctgcaatttctccagcggttcctgcagatactgaaggttttgtttccttcttggtcatcacaaaatgccttgatgttcctgacccttttgtgcctgaccctactggagcaatttgtgatctaccaggttggcttgatccccagtcagtactatggggtcctgggaaacaaagacttggaagggtttaagactctgacattcctggctgtcatgctcattgttctgaactccacgctgaagagctttgatcagttcacctgcaacctgctgtatgtgagctggaggaaggacctcactgagcaccttcaccgcctctacttccggggccgtgcgtactacaccctcaacgtgctgcgggatgacatcgataacccggaccagcgcatcagccaggacgtggagcgattctgccggcagctcagcagcatggccagcaagctcatcatctccccgttcaccctcgtctactacacttaccagtgcttccaaagcacaggctggctcgggcctgtgagcatcttcgggtatttcatcctggggaccgtggtgaacaaaactttgatgggccccattgtgatgaagctggtgcatcaggagaagctggagggagattttaggttcaagcacatgcagattcgggtgaatgcggagcctgctgctttctacagagctgggcatgtggagcacatgaggacagaccgcaggctgcagagactccttcagacccagagggagctgatgtccaaggagctctggctgtacatcggcatcaacacctttgactatctgggcagcatcctgagttacgttgtcatcgcaatccccattttcagcggggtctatggagacctgagtcccgcagagcttagcaccctggtcagcaagaatgcctttgtgtgcatctacctcatcagctgcttcacccagctcatcgacctgtccacgacgctctcagatgtggctggctacacgcacagaattgggcagcttcgggagacgcttctggacatgtccctgaagtcacaggactgcgagatcctgggcgagagcgagtggggcttggacacacccccagggtggccagcggcagagccagcagacacagcatttctccttgagcgggtctccatctctgccccctcctctgacaaacccctaatcaaggatctgagcctaaagatctccgagggacagagcctgctcatcacaggcaacacgggcactggcaagacctccttgctccgggttctgggtggcctctggacgagtacacggggctcagtgcagatgctgacggactttgggccccatggggtgctattcctgccacaaaagccattcttcactgacgggacccttcgggagcaggtgatatatcccctgaaggaggtctaccccgactcaggttctgccgatgatgagaggatcttgaggttcttggaattggcaggcctgtccaacttggtggcaaggacagagggcctggaccagcaggtggactggaactggtatgatgttctgtccccgggggagatgcaacggctctcctttgcccgactcttctacctgcagccgaagtacgcagtgcttgatgaagccaccagtgccctgacagaggaagtggagagcgagctctatcgcatcggccagcagctggggatgacgttcatcagtgtgggacatcggcagagccttgagaagtttcattccttggttctgaaactctgtggaggaggaagatgggagctgatgagaatcaaagtggaatgaagctctggcttttggaaggagagccacactgtggcgggtcggcggccctcaggagagaccaggaggactgacagcgaagatcgagctcaggttcgccacatagatcccgtgcaggagccacatgggtcctgtgcaggacccctagcagtggtgggctgagcccaggtctaggtttctgtgggggacactgaatctcccagtgttcagtctcccaggactctgctgcctcagccagagcctccatatgcttgaagtgctgattacctacaaatgatttcagatcatgtttgctaaagagaaatctggaagtgtgagatctgtaagaaatgaaagaaatgactcttggagtcaagagatctggaaatcttttaatcagttaaattgtgcagcaatagatttttaactttaactgaccatttaagttttttaataagttttttacaaagaaaagttaaacattaaaaagaattacagctttctgtcttctctatcatggaatgatcttttttattgaatctccagatttgtatttgacagcttggtgggaagggaagcacactctgctgttctggaatcttatgcccagggtttttcacttctccccacatctccctttccacttgccagtgttgtgtagttagaacctgaaccactaacttccaggggcctttggtctgccctaccttaacccaaatgaaagtaaatccctttccccttagccaaaataaggttgggttttctaaaaaaatagtctatattagggaacaacaacagcaaattagacaaaacccagaaagcacaaagcatgaggtggagttactgtgcccaaagtcctcactcagaccagtgcccctccagttcagttgtctatgtattaccttccttaccttcataatttttgccaggcttctgtacttctagtacttgagttacttaatatttttaaaaacaaaccttttaagtttaaatggatttttaagtgaaattttacacttaacatagatggaaagtaactaaaaataaatacaagaaaaac

SEQ ID NO: 8425 - protein, 606 aa, Homo sapiens; identical to SEQ ID NO: 954

SEQ ID NO: 8426 - DNA, 2867 bp, Homo sapiens
gtcggtcgcttccgggagagtccgcgtctcccgcaccttcctctctatcaaacgccgtctctgtggtagccggggccccgcccctcctcggactctacccagtactgaactaggggcagctgggctccagagtccctcgggtctcaggtcatggcggtcgcggggcccgcgcccggagctggcgccaggcccaggttagatctgcaatttctccagcggttcctgcagatactgaaggttttgtttccttcttggtcatcacaaaatgccttgatgttcctgacccttttgtgcctgaccctactggagcaatttgtgatctaccaggttggcttgatccccagtcagtactatggggtcctgggaaacaaagacttggaagggtttaagactctgacattcctggctgtcatgctcattgttctgaactccacgggaccagcgcatcagccaggacgtggagcgattctgccggcagctcagcagcatggccagcaagctcatcatctccccgttcaccctcgtctactacacttaccagtgcttccaaagcacaggctggctcgggcctgtgagcatcttcgggtatttcatcctggggaccgtggtgaacaaaactttgatgggccccattgtgatgaagctggtgcatcaggagaagctggagggagattttaggttcaagcacatgcagattcgggtgaatgcggagcctgctgctttctacagagctgggcatgtggagcacatgaggacagaccgcaggctgcagagactccttcagacccagagggagctgatgtccaaggagctctggctgtacatcggcatcaacacctttgactatctgggcagcatcctgagttacgttgtcatcgcaatccccattttcagcggggtctatggagacctgagtcccgcagagcttagcaccctggtcagcaagaatgcctttgtgtgcatctacctcatcagctgcttcacccagctcatcgacctgtccacgacgctctcagatgtggctggctacacgcacagaattgggcagcttcgggagacgcttctggacatgtccctgaagtcacaggactgcgagatcctgggcgagagcgagtggggcttggacacacccccagggtggccagcggcagagccagcagacacagcatttctccttgagcgggtctccatctctgccccctcctctgacaaacccctaatcaaggatctgagcctaaagatctccgagggacagagcctgctcatcacaggcaacacgggcactggcaagacctccttgctccgggttctgggtggcctctggacgagtacacggggctcagtgcagatgctgacggactttgggccccatggggtgctattcctgccacaaaagccattcttcactgacgggacccttcgggagcaggtgatatatcccctgaaggaggtctaccccgactcaggttctgccgatgatgagaggatcttgaggttcttggaattggcaggcctgtccaacttggtggcaaggacagagggcctggaccagcaggtggactggaactggtatgatgttctgtccccgggggagatgcaacggctctcctttgcccgactcttctacctgcagccgaagtacgcagtgcttgatgaagccaccagtgccctgacagaggaagtggagagcgagctctatcgcatcggccagcagctggggatgacgttcatcagtgtgggacatcggcagagccttgagaagtttcattccttggttctgaaactctgtggaggaggaagatgggagctgatgagaatcaaagtggaatgaagctctggcttttggaaggagagccacactgtggcgggtcggcggccctcaggagagaccaggaggactgacagcgaagatcgagctcaggttcgccacatagatcccgtgcaggagccacatgggtcctgtgcaggacccctagcagtggtgggctgagcccaggtctaggtttctgtgggggacactgaatctcccagtgttcagtctcccaggactctgctgcctcagccagagcctccatatgcttgaagtgctgattacctacaaatgatttcagatcatgtttgctaaagagaaatctggaagtgtgagatctgtaagaaatgaaagaaatgactcttggagtcaagagatctggaaatcttttaatcagttaaattgtgcagcaatagatttttaactttaactgaccatttaagttttttaataagttttttacaaagaaaagttaaacattaaaaagaattacagctttctgtcttctctatcatggaatgatcttttttattgaatctccagatttgtatttgacagcttggtgggaagggaagcacactctgctgttctggaatcttatgcccagggtttttcacttctccccacatctccctttccacttgccagtgttgtgtagttagaacctgaaccactaacttccaggggcctttggtctgccctaccttaacccaaatgaaagtaaatccctttccccttagccaaaataaggttgggttttctaaaaaaatagtctatattagggaacaacaacagcaaattagacaaaacccagaaagcacaaagcatgaggtggagttactgtgcccaaagtcctcactcagaccagtgcccctccagttcagttgtctatgtattaccttccttaccttcataatttttgccaggcttctgtacttctagtacttgagttacttaatatttttaaaaacaaaccttttaagtttaaatggatttttaagtgaaattttacacttaacatagatggaaagtaactaaaaataaatacaagaaaaac

SEQ ID NO: 8427 - protein, 447 aa, Homo sapiens; identical to SEQ ID NO: 8419

SEQ ID NO: 8428 - DNA, 1324 bp, Homo sapiens
ctgccctctgggtctgttacagtccaacttggtggcaaggacagagggcctggaccagcaggtggactggaactggtaagaaaagagcttgggtgctccagagatagccccaccataaagacagtgggtttcagggtccctgtcaaggaatggaacggctcctgaccccaaagtccagatgtttggctggtcagtcgggtgcaagtttatgcccttgggaacagagttttgcctcactctgtgagggctgtaggcctatggtcgaaagggaaggggcttctgtctcctggggctcacctctgtgcagagaaacctcttcctacccagaccattctaggtaaaagccaagctatattcttcctcctctagcagtcctctctcctacctttcctcaggtatgatgttctgtccccgggggagatgcaacggctctcctttgcccgactcttctacctgcagccgaagtacgcagtgcttgatgaagccaccagtgccctgacagaggaagtggagagcgagctctatcgcatcggccagcagctggggatgacgttcatcagtgtgggacatcggcagagccttgagaaggtacccgtgctcacaaggatggcctgaggaggagaaagaacccaaaggctcagcctggccagggccagaggcccctcaaaacggggagtagcagtagcagagagaaccgagtggcctcctctgccagcggccagggcagcctgatctccatgtggtggtggtctcttgtagtttcattccttggttctgaaactctgtggaggaggaagatgggagctgatgagaatcaaagtggaatgaagctctggcttttggaaggagagccacactgtggcgggtcggcggccctcaggagagaccaggaggactgacagcgaagatcgagctcaggttcgccacatagatcccgtgcaggagccacatgggtcctgtgcaggacccctagcagtggtgggctgagcccaggtctaggtttctgtgggggacactgaatctcccagtgttcagtctcccaggactctgctgcctcagccagagcctccatatgcttgaagtgctgattacctacaaatgatttcagatcatgtttgctaaagagaaatctggaagtgtgagatctgtaagaaatgaaagaaatgactcttggagtcaagagatctggaaatcttttaatcagttaaattgtgcagcaatagatttttaactttaactgaccatttaagttttttaataagttttttacaaagaaaagttaaacattaaaaagaattacagctttctgtcttctctatcatgg

SEQ ID NO: 8429 - protein, 64 aa, Homo sapiens [sequence omitted]

SEQ ID NO: 8430 - DNA, 904 bp, Homo sapiens
tcgggtctcaggtcatggcggtcgcggggcccgcgcccggagctggcgccagtgcttgatgaagccaccagtgccctgacagaggaagtggagagcgagctctatcgcatcggccagcagctggggatgacgttcatcagtgtgggacatcggcagagccttgagaaggtacccgtgctcacaaggatggcctgaggaggagaaagaacccaaaggctcagcctggccagggccagaggcccctcaaaacggggagtagcagtagcagagagaaccgagtggcctcctctgccagcggccagggcagcctgatctccatgtggtggtggtctcttgtagtttcattccttggttctgaaactctgtggaggaggaagatgggagctgatgagaatcaaagtggaatgaagctctggcttttggaaggagagccacactgtggcgggtcggcggccctcaggagagaccaggaggactgacagcgaagatcgagctcaggttcgccacatagatcccgtgcaggagccacatgggtcctgtgcaggacccctagcagtggtgggctgagcccaggtctaggtttctgtgggggacactgaatctcccagtgttcagtctcccaggactctgctgcctcagccagagcctccatatgcttgaagtgctgattacctacaaatgatttcagatcatgtttgctaaagagaaatctggaagtgtgagatctgtaagaaatgaaagaaatgactcttggagtcaagagatctggaaatcttttaatcagttaaattgtgcagcaatagatttttaactttaactgaccatttaagttttttaataagttttttacaaagaaaagttaaacattaaaaagaattacagctttctgtcttctctatcatgg

SEQ ID NO: 8431 - protein, 53 aa, Homo sapiens
MWWWSLVVSFLGSETLWRRKMGADENQSGMKLWLLEGEPHCGGSAALRRDQED

SEQ ID NO: 8432 - DNA, 2503 bp, Homo sapiens
gcttccgggagagtccgcgtctcccgcaccttcctctctatcaaacgccgtctctgtggtagccggggccccgcccctcctcggactctacccagtactgaactaggggcagctgggctccagagtccctcgggtctcaggtcatggcggtcgcggggcccgcgcccggagctggcgccaggcccaggttagatctgcaatttctccagcggttcctgcagatactgaaggttttgtttccttcttggtcatcacaaaatgccttgatgttcctgacccttttgtgcctgaccctactggctgaagagctttgatcagttcacctgcaacctgctgtatgtgagctggaggaaggacctcactgagcaccttcaccgcctctacttccggggccgtgcgtactacaccctcaacgtgctgcgggatgacatcgataacccggaccagcgcatcagccaggacgtggagcgattctgccggcagctcagcagcatggccagcaagctcatcatctccccgttcaccctcgtctactacacttaccagtgcttccaaagcacaggctggctcgggcctgtgagcatcttcgggtatttcatcctggggaccgtggtgaacaaaactttgatgggccccattgtgatgaagctggtgcatcaggagaagctggagggagattttaggttcaagcacatgcagattcgggtgaatgcggagcctgctgctttctacagagctgggcatgtggagcacatgaggacagaccgcaggctgcagagactccttcagacccagagggagctgatgtccaaggagctctggctgtacatcggcatcaacacctttgactatctgggcagcatcctgagttacgttgtcatcgcaatccccattttcagcggggtctatggagacctgagtcccgcagagcttagcaccctggtcagcaagaatgcctttgtgtgcatctacctcatcagctgcttcacccagctcatcgacctgtccacgacgctctcagatgtggctggctacacgcacagaattgggcagcttcgggagacgcttctggacatgtccctgaagtcacaggactgcgagatcctgggcgagagcgagtggggcttggacacacccccagggtggccagcggcagagccagcagacacagcatttctccttgagcgggtctccatctctgccccctcctctgacaaacccctaatcaaggatctgagcctaaagatctccgagggacagagcctgctcatcacaggcaacacgggcactggcaagacctccttgctccgggttctgggtggcctctggacgagtacacggggctcagtgcagatgctgacggactttgggccccatggggtgctattcctgccacaaaagccattcttcactgacgggacccttcgggagcaggtgatatatcccctgaaggaggtctaccccgactcaggttctgccgatgatgagaggatcttgaggttcttggaattggcaggcctgtccaacttggtggcaaggacagagggcctggaccagcaggtggactggaactggtatgatgttctgtccccgggggagatgcaacggctctcctttgcccgactcttctacctgcagccgaagtacgcagtgcttgatgaagccaccagtgccctgacagaggaagtggagagcgagctctatcgcatcggccagcagctggggatgacgttcatcagtgtgggacatcggcagagccttgagaaggtacccgtgctcacaaggatggcctgaggaggagaaagaacccaaaggctcagcctggccagggccagaggcccctcaaaacggggagtagcagtagcagagagaaccgagtggcctcctctgccagcggccagggcagcctgatctccatgtggtggtggtctcttgtagtttcattccttggttctgaaactctgtggaggaggaagatgggagctgatgagaatcaaagtggaatgaagctctggcttttggaaggagagccacactgtggcgggtcggcggccctcaggagagaccaggaggactgacagcgaagatcgagctcaggttcgccacatagatcccgtgcaggagccacatgggtcctgtgcaggacccctagcagtggtgggctgagcccaggtctaggtttctgtgggggacactgaatctcccagtgttcagtctcccaggactctgctgcctcagccagagcctccatatgcttgaagtgctgattacctacaaatgatttcagatcatgtttgctaaagagaaatctggaagtgtgagatctgtaagaaatgaaagaaatgactcttggagtcaagagatctggaaatcttttaatcagttaaattgtgcagcaatagatttttaactttaactgaccatttaagttttttaataagttttttacaaagaaaagttaaacattaaaaagaattacagctttctgtcttctctatcatgg

SEQ ID NO: 8433 - protein, 433 aa, Homo sapiens; identical to SEQ ID NO: 8417

SEQ ID NO: 8434 - DNA, 900 bp, Homo sapiens
caggtgatatatcccctgaaggaggtctaccccgactcaggttctgccgatgatgagaggatcttgaggttcttggaattggcaggcctgtccaacttggtggcaaggacagagggcctggaccagcaggtggactggaactggtatgatgttctgtccccgggggagatgcaacggctctcctttgcccgactcttctacctgcagccgaagtacgcagtgcttgatgaagccaccagtgccctgacagaggaagtggagagcgagctctatcgcatcggccagcagctggggatgacgttcatcagtgtgggacatcggcagagccttgagaagtttcattccttggttctgaaactctgtggaggaggaagatgggagctgatgagaatcaaagtggaatgaagctctggcttttggaaggagagccacactgtggcgggtcggcggccctcaggagagaccaggaggactgacagcgaagatcgagctcaggttcgccacatagatcccgtgcaggagccacatgggtcctgtgcaggacccctagcagtggtgggctgagcccaggtctaggtttctgtgggggacactgaatctcccagtgttcagtctcccaggactctgctgcctcagccagagcctccatatgcttgaagtgctgattacctacaaatgatttcagatcatgtttgctaaagagaaatctggaagtgtgagatctgtaagaaatgaaagaaatgactcttggagtcaagagatctggaaatcttttaatcagttaaattgtgcagcaatagatttttaactttaactgaccatttaagttttttaataagttttttacaaagaaaagttaaacattaaaaagaattacagctttctgtcttctctatcatg

SEQ ID NO: 8435 - protein, 78 aa, Homo sapiens [sequence omitted]

SEQ ID NO: 8436 - DNA, 1051 bp, Homo sapiens
ggatctgagcctaaagatctccgagggacagagcctgctcatcacaggcaacacgggcactggctcagtgcagatgctgacggactttgggccccatggggtgctattcctgccacaaaagccattcttcactgacgggacccttcgggagcaggtgatatatcccctgaaggaggtctaccccgactcaggttctgccgatgatgagaggatcttgaggttcttggaattggcaggcctgtccaacttggtggcaaggacagagggcctggaccagcaggtggactggaactggtatgatgttctgtccccgggggagatgcaacggctctcctttgcccgactcttctacctgcagccgaagtacgcagtgcttgatgaagccaccagtgccctgacagaggaagtggagagcgagctctatcgcatcggccagcagctggggatgacgttcatcagtgtgggacatcggcagagccttgagaagtttcattccttggttctgaaactctgtggaggaggaagatgggagctgatgagaatcaaagtggaatgaagctctggcttttggaaggagagccacactgtggcgggtcggcggccctcaggagagaccaggaggactgacagcgaagatcgagctcaggttcgccacatagatcccgtgcaggagccacatgggtcctgtgcaggacccctagcagtggtgggctgagcccaggtctaggtttctgtgggggacactgaatctcccagtgttcagtctcccaggactctgctgcctcagccagagcctccatatgcttgaagtgctgattacctacaaatgatttcagatcatgtttgctaaagagaaatctggaagtgtgagatctgtaagaaatgaaagaaatgactcttggagtcaagagatctggaaatcttttaatcagttaaattgtgcagcaatagatttttaactttaactgaccatttaagttttttaataagttttttacaaagaaaagttaaacattaaaaagaattacagctttctgtcttctctatcatg

SEQ ID NO: 8437 - protein, 160 aa, Homo sapiens; identical to SEQ ID NO: 8413

SEQ ID NO: 8438 - DNA, 2460 bp, Homo sapiens
cgcttccgggagagtccgcgtctcccgcaccttcctctctatcaaacgccgtctctgtggtagccggggccccgcccctcctcggactctacccagtactgaactaggggcagctgggctccagagtccctcgggtctcaggtcatggcggtcgcggggcccgcgcccggagctggcgccaggcccaggttagatctgcaatttctccagcggttcctgcagatactgaaggttttgtttccttcttggtcatcacaaaatgccttgatgttcctgacccttttgtgcctgaccctactggagcaatttgtgatctaccaggttggcttgatccccagtcagtactatggggtcctgggaaacaaagacttggaagggtttaagactctgacattcctggctgtcatgctcattgttctgaactccacgctgaagagctttgatcagttcacctgcaacctgctgtatgtgagctggaggaaggacctcactgagcaccttcaccgcctctacttccggggccgtgcgtactacaccctcaacgtgctgcgggatgacatcgataacccggaccagcgcatcagccaggacgtggagcgattctgccggcagctcagcagcatggccagcaagctcatcatctccccgttcaccctcgtctactacacttaccagtgcttccaaagcacaggctggctcgggcctgtgagcatcttcgggtatttcatcctggggaccgtggtgaacaaaactttgatgggccccattgtgatgaagctggtgcatcaggagaagctggagggagattttaggttcaagcacatgcagattcgggtgaatgcggagcctgctgctttctacagagctgggcatgtggagcacatgaggacagaccgcaggctgcagagactccttcagacccagagggagctgatgtccaaggagctctggctgtacatcggcatcaacacctttgactatctgggcagcatcctgagttacgttgtcatcgcaatccccattttcagcggggtctatggagacctgagtcccgcagagcttagcaccctggtcagcaagaatgcctttgtgtgcatctacctcatcagctgcttcacccagctcatcgacctgtccacgacgctctcagatgtggctggctacacgcacagaattgggcagcttcgggagacgcttctggacatgtccctgaagtcacaggactgcgagatcctgggcgagagcgagtggggcttggacacacccccagggtggccagcggcagagccagcagacacagcatttctccttgagcgggtctccatctctgccccctcctctgacaaacccctaatcaaggatctgagcctaaagatctccgagggacagagcctgctcatcacaggcaacacgggcactggcaagacctccttgctccgggttctgggtggcctctggacgagtacacggggctcagtgcagatgctgacggactttgggccccatggggtgctattcctgccacaaaagccattcttcactgacgggacccttcgggagcaggtgatatatcccctgaaggaggtctaccccgactcaggttctgccgatgatgagaggatcttgaggttcttggaattggcaggcctgtccaacttggtggcaaggacagagggcctggaccagcaggtggactggaactggtatgatgttctgtccccgggggagatgcaacggctctcctttgcccgactcttctacctgcagccgaagtacgcagtgcttgatgaagccaccagtgccctgacagaggaagtggagagcgagctctatcgcatcggccagcagctggggatgacgttcatcagtgtgggacatcggcagagccttgagaagtttcattccttggttctgaaactctgtggaggaggaagatgggagctgatgagaatcaaagtggaatgaagctctggcttttggaaggagagccacactgtggcgggtcggcggccctcaggagagaccaggaggactgacagcgaagatcgagctcaggttcgccacatagatcccgtgcaggagccacatgggtcctgtgcaggacccctagcagtggtgggctgagcccaggtctaggtttctgtgggggacactgaatctcccagtgttcagtctcccaggactctgctgcctcagccagagcctccatatgcttgaagtgctgattacctacaaatgatttcagatcatgtttgctaaagagaaatctggaagtgtgagatctgtaagaaatgaaagaaatgactcttggagtcaagagatctggaaatcttttaatcagttaaattgtgcagcaatagatttttaactttaactgaccatttaagttttttaataagttttttacaaagaaaagttaaacattaaaaagaattacagctttctgtcttctctatcatg

SEQ ID NO: 8439 - protein, 606 aa, Homo sapiens; identical to SEQ ID NO: 954

SEQ ID NO: 8440 - DNA, 943 bp, Homo sapiens
ccaggactggaagtctgaacctggggtggagaatgggagtatcagttgacagtgtgtgctgttggccaggtttaggcacgaagggggtagtgctctcattggagaattttaaaacaagaataggattgatgaaggcggtttgctttttactgtcatcatgctccagcaagtctaaacagtgtcattggtagaatattcctctctgcctggggcagactgtcccacagtcccccgccttggtatgccactggggcatatatttgtcttagaggtgtgtgtgtatgctggggagtgagggaggttccccatgatggcaggtagcagggctggccatttcatggacatcctgccctctgggtctgttacagtccaacttggtggcaaggacagagggcctggaccagcaggtggactggaactggtaagaaaagagcttgggtgctccagagatagccccaccataaagacagtgggtttcagggtccctgtcaaggaatggaacggctcctgaccccaaagtccagatgtttggctggtcagtcgggtgcaagtttatgcccttgggaacagagttttgcctcactctgtgagggctgtaggcctatggtcgaaagggaaggggcttctgtctcctggggctcacctctgtgcagagaaacctcttcctacccagaccattctaggtaaaaagcctccatatgcttgaagtgctgattacctacaaatgatttcagatcatgtttgctaaagagaaatctggaagtgtgagatctgtaagaaatgaaagaaatgactcttggagtcaagagatctggaaatcttttaatcagttaaattgtgcagcaatagatttttaactttaactgaccatttaagttttttaataagttttttacaaagaaaagttaaacattaaaaagaattacagctttctgtcttctct

SEQ ID NO: 8441 - protein, 67 aa, Homo sapiens [sequence omitted]

SEQ ID NO: 8442 - DNA, 1565 bp, Homo sapiens
agacaataccattaaggcatgactgaagccgtgaatgggcgctaccagtagacagatcctgagaccaagatcatttgaatggccttggtttctaaaggagggtgtgatatgggacaggccgctgattcaaggaagaggggctcctctcctcttcctttgactgttttggggtctgtacccagatctcacctcattctttctgtccttaaggagagatgcccactgggacaaggaaagtgatgccttccttcacccaccccttcccttatgaagatctgcaacctgtggtttcaaagccttcgcccagcattctgaggcccccacccctgcatcatccatgatgtgccctgtctattctttttttttttttttttttttttttttgagatggagtttcactctgtcacccagactggagtgcagtggtgtgatctcggctcactgcaacctccacctcccgggttcaagcaattcccctgcctcagcctcttccgtagctggggctacaggtgcacgccaccttgcctgcctaatttttgtatatttagtagagacagcgtttcaccatgttggccagggtggtctccatctcctgaccttgtgatccacctgcctcggcctcccaaagtgttgggattacaggcgtgagccactgtgcacagccttgccctgtctattttgaccagccaggaggctctggctttttgcagaaggcttctttgttgtgcaggttctgccgatgatgagaggatcttgaggttcttggaattggcaggcctggtaagtggggagagggaccctcaggacccgagcccacctgggagcaccagctacaggtaggcaggtgctggccctgctatgcttgggcccaggactggaagtctgaacctggggtggagaatgggagtatcagttgacagtgtgtgctgttggccaggtttaggcacgaagggggtagtgctctcattggagaattttaaaacaagaataggattgatgaaggcggtttgctttttactgtcatcatgctccagcaagtctaaacagtgtcattggtagaatattcctctctgcctggggcagactgtcccacagtcccccgccttggtatgccactggggcatatatttgtcttagaggtgtgtgtgtatgctggggagtgagggaggttccccatgatggcaggtagcagggctggccatttcatggacatcctgccctctgggtctgttacagtccaacttggtggcaaggacagagggcctggaccagcaggtggactggaactggtaagaaaagagcttgggtgctccagagatagccccaccataaagacagtgggtttcagggtccctgtcaaggaatggaacggctcctgaccccaaagtccagatgtttggctggtcagtcgggtgcaagtttatgcccttgggaacagagttttgcctcactctgtgagggctgtaggcctatggtcgaaagggaaggggcttctgtctcctggggctcacctctgtgcagagaaacctcttcctacccagaccattctaggtaaaagccaagct

SEQ ID NO: 8443 - protein, 53 aa, Homo sapiens
MALVSKGGCDMGQAADSRKRGSSPLPLTVLGSVPRSHLILSVLKERCPLGQGK

SEQ ID NO: 8444 - DNA, 1701 bp, Homo sapiens
ccttcccagactcccttaatggctaagcctatctgctgccatggccctgagggcacacttagtactcctgattccaagtgaagaatgcagtgtgcctgcctgccctctggactgagagctcctcaaagacagagataattttctcatttctttattgcactagctaactagtgcaatgcctggtacacctagtgaccgctctgtgtatgtttatttaacaatagtttttatttattgagggctccttatgtgcttggcactttatatttagaaacttttaattctaactctaacctattacataggtattattggctccattttatagattaaaaaaactgaggcttggaggcttaagtagcctgcctgtgtcacgcagctagtaactggccagagccaggatttgaactaggtctgcccaactctagagtttatgttcttcacacagacaataccattaaggcatgactgaagccgtgaatgggcgctaccagtagacagatcctgagaccaagatcatttgaatggccttggtttctaaaggagggtgtgatatgggacaggcggccccccaacctggctgaacctctccagccctgtggacatcccagcctttccttgtcagagctgggcatgtggagcacatgaggacagaccgcaggctgcagagactccttcagacccagagggagctgatgtccaaggagctctggctgtacagtaggcgagggggcccagggaagtgggaaccatggggttggactggtctgcttcccttcccacacctctctacctcctgtctgcaaggataaatgtgccatgatgaaggaattaaccggggatgaggagggggggctgttgcctttctgtgagtatcctcaggagaatgaggatccagagagtccacgtggccctacttggcgtcctgctccctgtcttagggttgtgtccgctgtagggcatgtggatggttcctgggtgtctcacagatgtgttttctacagtcggcatcaacacctttgactatctgggcagcatcctgagttacgttgtcatcgcaatccccattttcagcggggtctatggagacctgagtcccgcagagcttagcaccctggtcagcaagaatgcctttgtgtgcatctacctcatcagctgcttcacccagctcatcgacctgtccacgacgctctcagatgtggctggctacacgcacagaattgggcagcttcgggagacgcttctggacatgtccctgaagtcacaggactgcgagatcctgggcgagagcgagtggggcttggacacacccccagggtggccagcggcagagccagcagacacagcatttctccttgagcgggtctccatctctgccccctcctctgacaaacccctaatcaaggatctgagcctaaagatctccgagggacagagcctgctcatcacaggcaacacgggcactggcaagacctccttgctccgggttctgggtggcctctggacgagtacacggggtgatatatcccctgaaggaggtctaccccgactcaggagagatgcccactgggacaaggaaagtgatgccttccttcacccaccccttcccttatgaagatctgcaacctgtggtttcaaagccttcgcccagcattctgaggcccccacccctgcatcatccatgatgtgccctgtctattc

SEQ ID NO: 8445 - protein, 217 aa, Homo sapiens
MWMVPGCLTDVFSTVGINTFDYLGSILSYVVIAIPIFSGVYGDLSPAELSTLVSKNAFVCIYLISCFTQLIDLSTTLSDVAGYTHRIGQLRETLLDMSLKSQDCEILGESEWGLDTPPGWPAAEPADTAFLLERVSISAPSSDKPLIKDLSLKISEGQSLLITGNTGTGKTSLLRVLGGLWTSTRGDISPEGGLPRLRRDAHWDKESDAFLHPPLPL

SEQ ID NO: 8446 - DNA, 4498 bp, Homo sapiens
gagacagagtttctctcttgttgcccaggctggagtgcagtgacataatctcagctcactgcaacctctgcctccctggttcaagtgattctcctgccttcgcctcctttcagagcaatttgtgatctaccaggttggcttgatccccagtcagtactatggggtcctgggaaacaaagacttggaagggtttaagactctgacattcctggctgtcatgctcattgttctgaactccacgctgaagagctttgatcagttcacctgcaacctgctgtatgtgagctggaggaaggacctcactgagcaccttcaccgcctctacttccggggccgtgcgtactacaccctcaacgtgctgcgggatgacatcgataacccgtaggcgccccaactcagtcctttctacactctgtgtggtcctttccttctggcctagccctggagactgctggtggcagacaccaaggagatcatctgcagtcgttttcaaatgctgctgcccagagtcatgggggagggtgccctgcagaggactcctggagaagctgcagggctgtgaataggcagctaaaaagaagaagcctgccaggtgcagtggcatgcacctgtagtcccaacaactcaggaggctgaggcaggaggatcacttgagcccaggagtagtgcaccgtgagcacacttgggaatagccactgtactctagcctgggcaacatagcagaaacccccatctcttaaaaaaaagaaaaatgttaggagcagctttcttttgtccttttcatactttatatcttagtcttccagtaagaagactaaggggtttctttagagggttctaaagaaaatgtccttgctagaaaaaccagctcttagattttcatcagtaaaaaaaattaccactatccaggactcagtctaggattcacatctccattctatcaccactcaggttataactcttaaagtcaccaagccccaggttccccttctgtaaaatgaggacaataatagttcctatctcaaagggtgtagtgaggatgaaatatcattcatgtaatgcacatgtacagtgcttgacacatagcaagtgtttcagtgtaagttagctattgttattttacagatgaggaagctgaagcccagagattgcaagtgacttgcccaaggtcacgtcactcattgggaataggaatcagtatggccctagtggtgagatgagacatagggggtctccttcacacccatcccctcactcaccaccttcctagcaagcactttgttggttggggtacctctcagctcaagcttagctttggtgcaaagatgcgtgggaggctgctgctgctgcctaacttctaggcctctttctgatggctatggcttccatcctgcctctgccccctgagtagctgggactacaggtgtgcctcacagcctggagctttcacagccagataactaaaggggccaggctagggcttatataagagaaatttgggaggattgagataaaggggatagtcttcttgatcatccaaaacagctcatctaccttcaagtttttctttggctctgctcagagctggctcaggcccctgggtactggacctttcagttcccactttttcaggggattaactaaggcaccgtaagatgcaactctctagaaccctgtttaaaggccctgggatttagttgcccctaggaaaccagccttgtctggttccctcttcccatagggtcagtgttcacagcactgtgaggcaaggtcaagagcagaggtgatgtgaaagtttcttgttctctctacctttgggcccatctccctgggtccagctactctgtgtcattggctccagggaccagcgcatcagccaggacgtggagcgattctgccggcagctcagcagcatggccagcaagctcatcatctccccgttcaccctcgtctactacacttaccagtgcttccaaagcacaggctggctcgggcctgtgagcatcttcgggtatttcatcctggggaccgtggtgaacaaaactttgatgggccccattgtgatgaagctggtgcatcaggagaagctggagggagattttaggttcaagcacatgcagattcgggtgaatgcggagcctgctgctttctacaggtgagtctggagagatggttccccttctgccttgccagagctgagagtggagaaggaaagatgaatcctcaaccctcccaccaccaccgagctcaggggctgagtgttgtcacacttggctgtgaccctctccctctacctccccctgcccttgcctgcctcatccttaggtccaggggtttgcttctgaagctggtggttccttactgtggccagctttagtcttagtggcctagcgtggggcctgaaattgtcaaatgaatgaatgcctcatcctcttgctggtgactgtaagacatccgtctgcctctgctcttctgtctgttaagaagctttcttgccagtgcctgaggttcaagcctgatcctttgtctccgtagcgtgggatggaatgggagcttctcagaaaaccaggagacctgctccccacaatgctgtctaatggagccaagcgtctggtctcctgacggcagcagcaggagcagcagcagcggcatgaaatcccatcccttccctccagggccagaaccggtccctgtgctctgccttatgtgaggcctctgaaatcagcgttaggattgatagtgcaggcagaggtttgcgtttaagaagtggaagctactccttggctctgtacttggggtggatgtgatagccctgggacctttgctcctcagtctctgctgcagtttgcaacctccaccacttgagggcaccaagaatactgggaatctgcgctggggtggggttgtgaggtgggcagggctgggtgtgtaaaaaagttgcttttggaggccgggcatggtggctcatgcctgtaatcccagcactttgggaggccgaggcgggtggattgcctgaggtcaagagttcgagaccagccatggccaacatggtgaaaccctgtctctactaaaaatacaaaaaattagctgagcatggtggcgggcacctgtaatcccagctactggggaggctgaggcaggagaatcacttgaatccgggaggcagaggttgcagtaaggcaagatcctgccattgcactccagcctgggtgacagagcaagactccgtctcaaaaaaaaaaaaagaaaaaagttgcttttggattctgcagcctctgctcatgaagctctggggaaggcaggttagtttgtagagtttcagatgagttcttctgtggcctctgtgcaaaatctgaaatctccctccaccttttctgcctagcgaatttcttcccatccttgaaaccccagatcacctcctctggagagccttcccagactcccttaatggctaagcctatctgctgccatggccctgagggcacacttagtactcctgattccaagtgaagaatgcagtgtgcctgcctgccctctggactgagagctcctcaaagacagagataattttctcatttctttattgcactagctaactagtgcaatgcctggtacacctagtgaccgctctgtgtatgtttatttaacaatagtttttatttattgagggctccttatgtgcttggcactttatatttagaaacttttaattctaactctaacctattacataggtattattggctccattttatagattaaaaaaactgaggcttggaggcttaagtagcctgcctgtgtcacgcagctagtaactggccagagccaggatttgaactaggtctgcccaactctagagtttatgttcttcacacagacaataccattaaggcatgactgaagccgtgaatgggcgctaccagtagacagatcctgagaccaagatcatttgaatggccttggtttctaaaggagggtgtgatatgggacaggcggccccccaacctggctgaacctctccagccctgtggacatcccagcctttccttgtcagagctgggcatgtggagcacatgaggacagaccgcaggctgcagagactccttcagacccagagggagctgatgtccaaggagctctggctgtacagtaggcgagggggcccagggaagtgggaaccatggggttggactggtctgcttcccttcccacacctctctacctcctgtctgcaaggataaatgtgccatgatgaaggaattaaccggggatgaggagggggggctgttgcctttctgtgagtatcctcaggagaatgaggatccagagagtccacgtggccctacttggcgtcctgctccctgtcttagggttgtgtccgctgtagggcatgtggatggttcctgggtgtctcacagatgtgttttctacagtcggcatcaacacctttgactatctgggcagcatcctgagttacgttgtcatcgcaatccccatt

SEQ ID NO: 8447 - protein, 81 aa, Homo sapiens [sequence omitted]

SEQ ID NO: 8448 - DNA, 3077 bp, Homo sapiens
gcttccgggagagtccgcgtctcccgcaccttcctctctatcaaacgccgtctctgtggtagccggggccccgcccctcctcggactctacccagtactgaactaggggcagctgggctccagagtccctcgggtctcaggtcatggcggtcgcggggcccgcgcccggagctggcgccaggcccaggttagatctgcaatttctccagcggttcctgcagatactgaaggttttgtttccttcttggtcatcacaaaatgccttgatgttcctgacccttttgtgcctgaccctactggctgaagagctttgatcagttcacctgcaacctgctgtatgtgagctggaggaaggacctcactgagcaccttcaccgcctctacttccggggccgtgcgtactacaccctcaacgtgctgcgggatgacatcgataacccggaccagcgcatcagccaggacgtggagcgattctgccggcagctcagcagcatggccagcaagctcatcatctccccgttcaccctcgtctactacacttaccagtgcttccaaagcacaggctggctcgggcctgtgagcatcttcgggtatttcatcctggggaccgtggtgaacaaaactttgatgggccccattgtgatgaagctggtgcatcaggagaagctggagggagattttaggttcaagcacatgcagattcgggtgaatgcggagcctgctgctttctacaggtgagtctggagagatggttccccttctgccttgccagagctgagagtggagaaggaaagatgaatcctcaaccctcccaccaccaccgagctcaggggctgagtgttgtcacacttggctgtgaccctctccctctacctccccctgcccttgcctgcctcatccttaggtccaggggtttgcttctgaagctggtggttccttactgtggccagctttagtcttagtggcctagcgtggggcctgaaattgtcaaatgaatgaatgcctcatcctcttgctggtgactgtaagacatccgtctgcctctgctcttctgtctgttaagaagctttcttgccagtgcctgaggttcaagcctgatcctttgtctccgtagcgtgggatggaatgggagcttctcagaaaaccaggagacctgctccccacaatgctgtctaatggagccaagcgtctggtctcctgacggcagcagcaggagcagcagcagcggcatgaaatcccatcccttccctccagggccagaaccggtccctgtgctctgccttatgtgaggcctctgaaatcagcgttaggattgatagtgcaggcagaggtttgcgtttaagaagtggaagctactccttggctctgtacttggggtggatgtgatagccctgggacctttgctcctcagtctctgctgcagtttgcaacctccaccacttgagggcaccaagaatactgggaatctgcgctggggtggggttgtgaggtgggcagggctgggtgtgtaaaaaagttgcttttggaggccgggcatggtggctcatgcctgtaatcccagcactttgggaggccgaggcgggtggattgcctgaggtcaagagttcgagaccagccatggccaacatggtgaaaccctgtctctactaaaaatacaaaaaattagctgagcatggtggcgggcacctgtaatcccagctactggggaggctgaggcaggagaatcacttgaatccgggaggcagaggttgcagtaaggcaagatcctgccattgcactccagcctgggtgacagagcaagactccgtctcaaaaaaaaaaaaagaaaaaagttgcttttggattctgcagcctctgctcatgaagctctggggaaggcaggttagtttgtagagtttcagatgagttcttctgtggcctctgtgcaaaatctgaaatctccctccaccttttctgcctagcgaatttcttcccatccttgaaaccccagatcacctcctctggagagccttcccagactcccttaatggctaagcctatctgctgccatggccctgagggcacacttagtactcctgattccaagtgaagaatgcagtgtgcctgcctgccctctggactgagagctcctcaaagacagagataattttctcatttctttattgcactagctaactagtgcaatgcctggtacacctagtgaccgctctgtgtatgtttatttaacaatagtttttatttattgagggctccttatgtgcttggcactttatatttagaaacttttaattctaactctaacctattacataggtattattggctccattttatagattaaaaaaactgaggcttggaggcttaagtagcctgcctgtgtcacgcagctagtaactggccagagccaggatttgaactaggtctgcccaactctagagtttatgttcttcacacagacaataccattaaggcatgactgaagccgtgaatgggcgctaccagtagacagatcctgagaccaagatcatttgaatggccttggtttctaaaggagggtgtgatatgggacaggcggccccccaacctggctgaacctctccagccctgtggacatcccagcctttccttgtcagagctgggcatgtggagcacatgaggacagaccgcaggctgcagagactccttcagacccagagggagctgatgtccaaggagctctggctgtacagtaggcgagggggcccagggaagtgggaaccatggggttggactggtctgcttcccttcccacacctctctacctcctgtctgcaaggataaatgtgccatgatgaaggaattaaccggggatgaggagggggggctgttgcctttctgtgagtatcctcaggagaatgaggatccagagagtccacgtggccctacttggcgtcctgctccctgtcttagggttgtgtccgctgtagggcatgtggatggttcctgggtgtctcacagatgtgttttctacagtcggcatcaacacctttgactatctgggcagcatcctgagttacgttgtcatcgcaatccccatt

SEQ ID NO: 8449 - protein, 81 aa, Homo sapiens [sequence omitted]

SEQ ID NO: 8450 - DNA, 456 bp, Homo sapiens
agagtccctcgggtctcaggtcatggcggtcgcggggcccgcgcccggagctggcgccaggcccaggttagatctgcaatttctccagcggttcctgcagatactgaaggttttgtttccttcttggtcatcacaaaatgccttgatgttcctgacccttttgtgcctgaccctactggggaccagcgcatcagccaggacgtggagcgattctgccggcagctcagcagcatggccagcaagctcatcatctccccgttcaccctcgtctactacacttaccagtgcttccaaagcacaggctggctcgggcctgtgagcatcttcgggtatttcatcctggggaccgtggtgaacaaaactttgatgggccccattgtgatgaagctggtgcatcaggagaagctggagggagattttaggtgtgtctccctcacttgaggtttctgggctggg

SEQ ID NO: 8451 - protein, 98 aa, Homo sapiens
MAVAGPAPGAGARPRLDLQFLQRFLQILKVLFPSWSSQNALMFLTLLCLTLLGTSASARTWSDSAGSSAAWPASSSSPRSPSSTTLTSASKAQAGSGL

SEQ ID NO: 8452 - DNA, 1351 bp, Homo sapiens
ctcggactctacccagtactgaactaggggcagctgggctccagagtccctcgggtctcaggtcatggcggtcgcggggcccgcgcccggagctggcgccaggcccaggttagatctgcaatttctccagcggttcctgcagatactgaaggttttgtttccttcttggtcatcacaaaatgccttgatgttcctgacccttttgtgcctgaccctactggctgaagagctttgatcagttcacctgcaacctgctgtatgtgagctggaggaaggacctcactgagcaccttcaccgcctctacttccggggccgtgcgtactacaccctcaacgtgctgcgggatgacatcgataacccgtaggcgccccaactcagtcctttctacactctgtgtggtcctttccttctggcctagccctggagactgctggtggcagacaccaaggagatcatctgcagtcgttttcaaatgctgctgcccagagtcatgggggagggtgccctgcagaggactcctggagaagctgcagggctgtgaataggcagctaaaaagaagaagcctgccaggtgcagtggcatgcacctgtagtcccaacaactcaggaggctgaggcaggaggatcacttgagcccaggagtagtgcaccgtgagcacacttgggaatagccactgtactctagcctgggcaacatagcagaaacccccatctcttaaaaaaaagaaaaatgttaggagcagctttcttttgtccttttcatactttatatcttagtcttccagtaagaagactaaggggtttctttagagggttctaaagaaaatgtccttgctagaaaaaccagctcttagattttcatcagtaaaaaaaattaccactatccaggactcagtctaggattcacatctccattctatcaccactcaggttataactcttaaagtcaccaagccccaggttccccttctgtaaaatgaggacaataatagttcctatctcaaagggtgtagtgaggatgaaatatcattcatgtaatgcacatgtacagtgcttgacacatagcaagtgtttcagtgtaagttagctattgttattttacagatgaggaagctgaagcccagagattgcaagtgacttgcccaaggtcacgtcactcattgggaataggaatcagtatggccctagtggtgagatgagacatagggggtctccttcacacccatcccctcactcaccaccttcctagcaagcactttgttggttggggtacctctcagctcaagcttagctttggtgcaaagatgcgtgggaggctgctgctgctgcctaacttctaggcctctttct

SEQ ID NO: 8453 - protein, 56 aa, Homo sapiens
MAVAGPAPGAGARPRLDLQFLQRFLQILKVLFPSWSSQNALMFLTLLCLTLLAEEL

SEQ ID NO: 8454 - DNA, 1490 bp, Homo sapiens
ccccgcccctcctcggactctacccagtactgaactaggggcagctgggctccagagtccctcgggtctcaggtcatggcggtcgcggggcccgcgcccggagctggcgccaggcccaggttagatctgcaatttctccagcggttcctgcagatactgaaggttttgtttccttcttggtcatcacaaaatgccttgatgttcctgacccttttgtgcctgaccctactggagcaatttgtgatctaccaggttggcttgatccccagtcagtactatggggtcctgggaaacaaagacttggaagggtttaagactctgacattcctggctgtcatgctcattgttctgaactccacgctgaagagctttgatcagttcacctgcaacctgctgtatgtgagctggaggaaggacctcactgagcaccttcaccgcctctacttccggggccgtgcgtactacaccctcaacgtgctgcgggatgacatcgataacccgtaggcgccccaactcagtcctttctacactctgtgtggtcctttccttctggcctagccctggagactgctggtggcagacaccaaggagatcatctgcagtcgttttcaaatgctgctgcccagagtcatgggggagggtgccctgcagaggactcctggagaagctgcagggctgtgaataggcagctaaaaagaagaagcctgccaggtgcagtggcatgcacctgtagtcccaacaactcaggaggctgaggcaggaggatcacttgagcccaggagtagtgcaccgtgagcacacttgggaatagccactgtactctagcctgggcaacatagcagaaacccccatctcttaaaaaaaagaaaaatgttaggagcagctttcttttgtccttttcatactttatatcttagtcttccagtaagaagactaaggggtttctttagagggttctaaagaaaatgtccttgctagaaaaaccagctcttagattttcatcagtaaaaaaaattaccactatccaggactcagtctaggattcacatctccattctatcaccactcaggttataactcttaaagtcaccaagccccaggttccccttctgtaaaatgaggacaataatagttcctatctcaaagggtgtagtgaggatgaaatatcattcatgtaatgcacatgtacagtgcttgacacatagcaagtgtttcagtgtaagttagctattgttattttacagatgaggaagctgaagcccagagattgcaagtgacttgcccaaggtcacgtcactcattgggaataggaatcagtatggccctagtggtgagatgagacatagggggtctccttcacacccatcccctcactcaccaccttcctagcaagcactttgttggttggggtacctctcagctcaagcttagctttggtgcaaagatgcgtgggaggctgctgctgctgcctaacttctaggcctctttct

SEQ ID NO: 8455 - protein, 142 aa, Homo sapiens
MAVAGPAPGAGARPRLDLQFLQRFLQILKVLFPSWSSQNALMFLTLLCLTLLEQFVIYQVGLIPSQYYGVLGNKDLEGFKTLTFLAVMLIVLNSTLKSFDQFTCNLLYVSWRKDLTEHLHRLYFRGRAYYTLNVLRDDIDNP

SEQ ID NO: 8456 - DNA, 730 bp, Homo sapiens
agccggggccccgcccctcctcggactctacccagtactgaactaggggcagctgggctccagagtccctcgggtctcaggtcatggcggtcgcggggcccgcgcccggagctggcgccagagcaatttgtgatctaccaggttggcttgatccccagtcagtactatggggtcctgggaaacaaagacttggaagggtttaagactctgacattcctggctgtcatgctcattgttctgaactccacggtaagatctttccctctctctgtgtctctcgtcctctccagtccagtgtgaccgtaatgcctagtggaacttagcctccaggaagcaggaagcaagctgtgggggtgtgtttcctcccttttctgggaactaaagggatagttgcctttattaagcacgttgatcttgctattggcccacgtgggactgattcctcagatgtttccactcctgggcccaggccacaggttctggtttaattcagcatttagcagaactgatcattgcccctttccttcctagaactcttatttccggcagctcattaaaacggctcagcagccagagctgctgctcctcctctgcgggaccgaggctgtgactcaccctggcaccatgtcacacctcccagcctttgaacagtgctttcttgcagaatggcctcctcccctacccctcattcagtaggggggctaccacctgctcactcttcgtcatccct

SEQ ID NO: 8457 - protein, 39 aa, Homo sapiens
MAVAGPAPGAGARAICDLPGWLDPQSVLWGPGKQRLGRV

SEQ ID NO: 8458 - DNA, 719 bp, Homo sapiens
ctcggactctacccagtactgaactaggggcagctgggctccagagtccctcgggtctcaggtcatggcggtcgcggggcccgcgcccggagctggcgccaggcccaggttagatctgcaatttctccagcggttcctgcagatactgaaggttttgtttccttcttggtcatcacaaaatgccttgatgttcctgacccttttgtgcctgaccctactggagcaatttgtgatctaccaggttggcttgatccccagtcagtactatggggtcctgggaaacaaagacttggaagggtttaagactctgacattcctggctgtcatgctcattgttctgaactccacggtaagatctttccctctctctgtgtctctcgtcctctccagtccagtgtgaccgtaatgcctagtggaacttagcctccaggaagcaggaagcaagctgtgggggtgtgtttcctcccttttctgggaactaaagggatagttgcctttattaagcacgttgatcttgctattggcccacgtgggactgattcctcagatgtttccactcctgggcccaggccacaggttctggtttaattcagcatttagcagaactgatcattgcccctttccttcctagaactcttatttccggcagctcattaaaacggctcagcagccagagctgctgctcctcctctgcgggaccgaggctgtgactcaccctg

SEQ ID NO: 8459 - protein, 111 aa, Homo sapiens
MAVAGPAPGAGARPRLDLQFLQRFLQILKVLFPSWSSQNALMFLTLLCLTLLEQFVIYQVGLIPSQYYGVLGNKDLEGFKTLTFLAVMLIVLNSTVRSFPLSVSLVLSSPV

SEQ ID NO: 8460 - DNA, 379 bp, Homo sapiens
gtagccggggccccgcccctcctcggactctacccagtactgaactaggggcagctgggctccagagtccctcgggtctcaggtcatggcggtcgcggggcccgcgcccggagctggcgccaggcccaggttagatctgcaatttctccagcggttcctgcagatactgaaggttttgtttccttcttggtcatcacaaaatgccttgatgttcctgacccttttgtgcctgaccctactgggctggagtgcagtgacataatctcagctcactgcaacctctgcctccctggttcaagtgattctcctgccttcgcctcctgagtagctgggattacaagcacccaccaccacgcccgactaaactttgtatttttca

SEQ ID NO: 8461 - protein, 58 aa, Homo sapiens
MAVAGPAPGAGARPRLDLQFLQRFLQILKVLFPSWSSQNALMFLTLLCLTLLGWSAVT

SEQ ID NO: 8462 - DNA, 521 bp, Homo sapiens
aaaagtaccagagagtggactcggctgacccggcggctacagcgcccccatattttctgggagacttcccttttgacaataggtatccgagagtgtaactactttatggtacgtttcctgaggacagctgctctgtgaagcccactgccccaaaggcacctatcaaagaccctgcaaacaagcagatggcaatccaggttgccaatgacattgcccatcccaggtacctgggctgcctgcttttccctgaagtgggagcctggcttgcaggatgacttctcggaaccagctggtgcagaaggtgctgcaggagctgcaggaagcagtggagtgcgaaggcctggagggtctcataggtgcttccttggaggccaagcaggtcctgtcttccttcactctccccacctgccgggagggaggccctggcctccaggtgctggaagtggactcggtggccctgagcctgtatccagaagatgctccacggaacatgctgccgctggtgtgcaagggggagggca

SEQ ID NO: 8463 - protein, 104 aa, Homo sapiens
MTLPIPGTWAACFSLKWEPGLQDDFSEPAGAEGAAGAAGSSGVRRPGGSHRCFLGGQAGPVFLHSPHLPGGRPWPPGAGSGLGGPEPVSRRCSTEHAAAGVQGG

SEQ ID NO: 8464 - DNA, 3465 bp, Homo sapiens
gcacttgagggtgggcgatttcctggggggagtggcttaagccgcttccccaccggccagttggctgtagacggtccatgctcaatggtcctctacagatatgaaactggttctggagtgagacgagctcggctggggacgctacttgagaaggcctttccccacagggtgacttaaatgtcccaggctggaaggtggagcgagaagtggatgcccccagggctctgggtcacactccaggatgacttctcggaaccagctggtgcagaaggtgctgcaggagctgcaggaagcagtggagtgcgaaggcctggagggtctcataggtgcttccttggaggccaagcaggtcctgtcttccttcactctccccacctgccgggagggaggccctggcctccaggtgctggaagtggactcggtggccctgagcctgtatccagaagatgctccacggaacatgctgccgctggtgtgcaagggggagggcagcctgctgttcgaggcggccagcatgctgctgtggggtgacgcaggcctcagcctggagctgcgggcccgcaccgtggtagagatgctgctgcacagacactactacctccagggcatgatcgactccaaagtgatgctgcaggccgtgcgctactccctatgctctgaggagtcccctgagatgaccagcttgccccccgccacgctggaggccatcttcgatgccgacgtcaaggcctcctgtttccccagcagcttctccaacgtgtggcacttgtatgctctcgcctctgtcctccagcggaacatctactccatctaccccatgcgcaacctcaagatccggccctacttcaaccgtgtcatccggccccgccgctgcgaccacgtgccctccacgctgcacatcatgtgggctggccagcccctcaccagccacttcttccgccaccagtactttgcccctgtggtggggctggaagaggtggaggctgaaggtgcccctggcgtggccccagctcttccagccctggccccactctcatcgccggccaagaccctggagctgctcaaccgtgaacctggcctcagctactctcacctctgtgagcgctacagcgtcaccaaaagcaccttctaccgctggcggcggcagtcccaggagcaccggcagaaggttgctgcccgcttctccgccaagcacttcctgcaggacagcttccaccgggggggcgtcgtgccacttcagcagttcctccagcggttcccggagatctcccgctcaacctactatgcctggaagcatgagctgctgggctctggcacctgcccggccttgccccccagggaggtgctgggcatggaggagctagagaagctgccggaggagcaggtggctgaggaggagctggagtgctccgcactggcggtgtcaagccctggaatggtcttaatgcagcgggccaagttgtacctggagcattgcatctccctgaacacactggtaccctatcgctgcttcaaacgcaggttccctggcatctcacggtccacttattataattggcggcgaaaggccctccggaggaaccccagcttcaagccggcaccagccctctctgctgctgggactccccagctagcatctgttggggaaggggctgtaattccttggaagagtgaggcggaagagggggcagggaatgccacaggtgaggaccctcccgcccccggggagctcctgccactaaggatgcccctgtcccgttggcagaggcgtctgcgcagggctgcccgcaggcaggtgctgagtgggcatctccctttctgccgcttccgcctccgctaccccagcctgtcaccttctgccttttgggtctggaagagtcttgctcggggttggcccagaggcctgtccaaacttcaggtgccggtccccaccttgggcaaaggggggcaggaggctgaggagaagcaggagaaggaggctggcagggatgtgacagctgtgatggccccacctgtgggggcttcttcagaagatgtagagggagggccttccagagagggggccctgcaggagggggccacagcccagggccagccccacagtgggcccttgctgagccaacctgtggtggcagcagcgggtggcagggatggccggatgctggtgatggacatgatcgctaccacgaagttcaaggcccaggccaagctgttcttgcagaagcgcttccagtccaagagctttccctcctacaaggagttcagtgccctctttcccctcactgcccgctccacatactacatgtggaagcgagccctctatgacggcctgaccctggtagatggctgacagggaggtacaaaaggggctgggaagaagggggaccagtttggagagggtcagggacctgagctgaccccaggcttggccaggatgtcctttgctctgggtcccacagtgtctaccctaagtccaagggtatatttgtgttattttctggctccaggacagagaatgccagaaatcagccatctggtctcccgtaggaaactgtgggaccagagatatcctctttcgttgtttgctggtcatatttttactgttatgatttagtttttggttttgatttgagtgggttggttggcccccttgctggagttggaagccgtatgtatgtcagggggtttagaggggggttggttagctagagctgctttcagcttttcctggagacaaaaggagtgttatagcatgatcatcggtcccactgggcagaacgttatcttcagtttcttttgggggttggcatcctctttactcagttgtttcccaaaggaacattaggctcgaatatgggggccaggtgtggtggcttatgcctgtaatcctagcgctttgggaggccaaggcaggaggatcacttgaggctaggagttagagaccaccctgggcaatgtagtgagacctcatctcttagaaaaaaaaaaagaaagaaaatcaaatgtagagctgatcagcagcttgtgcctggcatccccaagggagaaggtgccaggtcagcaggagcagcagcagggatgtatagaaagaaccacagctggcctctaaaggatggcactgaggcaccggagatcttgaggcactggagatcactgaggggctggcctgtcccctgcaaggagtgtgggaccaggtggggcaaggctgggagatgcaggctctgtttgcagattatggcccagagtctctgcttgtgggtgcttgatccacctgctgggaccctgcagtcctcggccagcctggctgtcagttggggattccacctttctgctgagcgtcttctcggagctggaggcccatcttcagtgagagatcacaaagcggccaggcaggtgggagactgaatttgccttgttcgagagtaacgtttgaaaaccaaagaaataaagtgatgcagtgcccac

SEQ ID NO: 8465 - protein, 117 aa, Homo sapiens
MSQAGRWSEKWMPPGLWVTLQDDFSEPAGAEGAAGAAGSSGVRRPGGSHRCFLGGQAGPVFLHSPHLPGGRPWPPGAGSGLGGPEPVSRRCSTEHAAAGVQGGGQPAVRGGQHAAVG

SEQ ID NO: 8466 - DNA, 464 bp, Homo sapiens
attcagtgatagtggcggtggataacaatgacctcctaccagctgtgaatttctcgtcttccactagtactagtaaaagagattgctgctggctaagaatacccaccggtggggtcttgagccttggaggagcctccctcggggtcaggaatcgagcggggacaccgctgggccactcagaaggaccgtttcctggggactgatcaagaggagggaaggtcctattacagcccagaggccacgtggggcctgagccccaaacctcagctgctgttccagcagccccgtagctgggtggagcctccgggcctgacgtggaccttcactggagaagtgactcaggtgggaaaagtctccccgggcctctccacctgcaggatcgccttcctacaccttcccccgcccgcttccttcgcgcgggctcctcccaatgaccaccagcagaactgcagcctcctgcctta

SEQ ID NO: 8467 - protein, 113 aa, Homo sapiens
ALEEPPSGSGIERGHRWATQKDRFLGTDQEEGRSYYSPEATWGLSPKPQLLFQQPRSWVEPPGLTWTFTGEVTQVGKVSPGLSTCRIAFLHLPPPASFARAPPNDHQQNCSLL

SEQ ID NO: 8468 - DNA, 5334 bp, Homo sapiens
ctgtcactgcagcctggcggcctgagcgccgagcctggggctggggccgcggtgctgaggacgcaaatcagccccgtagctgggtggagcctccgggcctgacgtggaccttcactggagaagtgactcagggatcctcccaggatgtctgcctcaccagacgacctgagtacagggggaaggttacagaacatgacagtggatgaatgcttccagtctcggaacaccgtcctccaggggcagccctttgggggtgtccccaccgtgctgtgcctcaacatcgccctgtgggtgctcgtccttgtggtttactccttcctccggaaagctgcgtgggactatgggcgcctggctctgctgatacacaatgacagcctgacctcgctgatctatggggagcagagcgagaagacatctccctcggagacttccttggagatggaacgcagagacaagggattctgttcctggttcttcaacagcataacaatgaaggacgaggatctgattaacaagtgtggggacgacgcacgcatctacatcgtgttccagtaccacctcatcatctttgtgctcatcatctgtatcccctccctgggcatcattttgcccatcaactatactggatctgttctggactggagcagtcactttgctcggaccaccattgtcaatgtctccacagagagcaagctcctgtggctgcatagcctgctgtccttcttctacttcatcaccaacttcatgttcatggctcatcactgcctggggtttgcacccaggaatagccaaaaggtcacaaggacactaatgatcacctatgtgcccaaggacattgaagacccagaactcatcattaagcattttcacgaggcctatccaggcagtgtcgtgacaagagtccacttctgctacgacgtcaggaacctgatcgacttggacgatcagaggcgccatgccatgcggggccggcttttctatacagccaaggccaagaagactgggaaggtgatgatcaggatccacccctgtgcccgcctgtgcttctgcaagtgctggacctgcttcaaggaggtggatgcagagcagtattacagcgagctagaggagcagctaacggacgagttcaacgccgagctcaaccgcgtgccgctcaagcggctggacctgatctttgtcaccttccaggactccaggatggccaagcgtgtccgtaaggattacaagtatgtccagtgtggtgtgcaaccccagcagtcctcagtgaccaccatcgtcaaatcatattactggagggtcactatggccccacaccccaaagacattatttggaaacacctgtctgtccgccgcttcttttggtgggcccgctttatcgcaatcaacaccttcctcttcttcctcttcttctttctcaccacgcctgccatcatcatgaacactatcgacatgtacaacgtcacccgccccatcgagaagctgcagaacccaattgtgacccagttcttcccctctgtgatgctctggggcttcacagtgatactgcctctgattgtctacttctccgccttcctcgaggcccactggaccagatcaagtcagaatctggtcatggtgcacaagtgctacatctttctggtgttcatggtagtcattctgccctctatgggactgaccagtttggatgtctttctccgctggctctttgacatctactatctagagcaagcatccatcaggttccagtgtgtgttcctgccagacaacggcgccttctttgtcaactacgtgatcacggcagctttacttggcacaggcatggagctgctgcgtctggggtcactcttctgctacagcacccgcctcttcttctctagatcagagccagagagagtcaacatcagaaagaaccaggccatagacttccagtttgggcgtgagtatgcgtggatgatgaacgtgttcagcgtggtgatggcgtacagcatcacttgccccatcattgtgccttttgggttgctctacctgtgcatgaagcacttgacggatcgctataacatgtactactcctttgcacccaccaaactgaacgagcagatccacatggctgccgtctcccaggccatctttgcgccactcttgggtctgttctggatgctgttcttctccatcctgcggttgggttctctccacgccatcaccatcttttccctgtccaccctcctcattgccatggtgattgcctttgttggcatttttctggggaagcttcggatggttgccgactacgagcccgaggaggaggagatccagacagtgtttgacatggagccaagcagcacctcctccacgcccacctccctcctgtatgtggccaccgtgctgcaagaaccggagttgaatctgacccccgcctcctccccagccaggcacacctatggcaccatgaacaaccagccggaagagggagaagaagagagtggtctgaggggctttgcgagggagctagactcggcccagttccaggaagggctggaactggagggccagaaccagtaccactgaccgggacctgaggcctccactggcgacttgttgaggggtcaggggagggcctggcaaggggaggcaggagggtggcctggacctccccactacctcctgcagactttgagaagcccacagtggagacatccaccaccccagccatgggccatacgggggtcctgacctgctgcccggctggaactgggggtgctcggcagtgctgaaggagcctgggaagggatgggaggatacaggcaagcacatgtcttgagagaggtggctggagccccggcacagagactgaacgctggggtcccttcctgggaccaagatggagaaggtgttcctaagggaggagacagaaggaggctgccgaaggctctgtggggtcatcaccactctgcatcagctgcccttccaaggagcttctgctgctgctcctcctcccagccccggcccattcctcccctgcagtctgaggaggcaaaggtatgtgcacggggcacattgacaggacacggaggaccacctcatcacagggttccctgcatggggatctgtaaagagaaagtttctgcacccaccagagcaagagccaactgaaagcgtagacctgagaagaggtaactcagccccttcctgctcctctgccctcatcagatgtccccaggagcagcagggcagaggcccttctttctattcttacaagggtagctagagcgtgatcactcagggctcatcaaatgagactcgtgtgcatttttcagaaggaaaccttggttagtccttgctgggtaacacaaagtggggtgagacgacagaagccgaattcatggaaggggggtcttctccccaaaactctgtgtggtgggaaaccagctatacctccccaagccccagggcctaaagagaagacccccgaagccaaagatgtggccacttaaaagcgtctcctgcctcctacccaactgagtgcctgggcccccagcttggccaagatgggcagtacgttagggtaagaaccccatgcttcaaacttaaggactgaccatcacctgcgtcccaagtaggacccttcctcccttctcggggctgcccctgcaccctgccttgaagaccacccaagcggcctccagtgtgggcctggtccagacattgcagatgcttcaaccgtgatgtcgccccaggcctgccaggggtgtggtggaggggaaggccacgtgctccagggagaagccctttctggagaagcaaggctgtcctcccagggctgccactaccagagacctgggggagctgaattccgaacagtgatggtgacactcagcacctttgccacagccggggggaaccggcttctgcctctgggatgggctctcatcaggaccaccgtgcagcccagccagggaggacatgagaagggccagtgggggcctcaatgaaccagaacaagccaagctgaatggggtctgtgtgctccagggccctcttcagccccctcccccaaaggtctgggtccctgccaccaacctactgaaggccggcccccggctcacctcacctgagcacctgcaccaggccccaggcacatggctgccctgaactcagatcacctagaccttgtccctgccccacctttgccccatcctagccccagaagctccaagcttcaccgcaggtgagaaattgtgctcaatgggcagaaactgctatacccccagggcatggcccacattttggcatgagggtgtctttccagagagcttgggttggctggagagaggctgtctttcccattccttgtccagctaggaataaaggggaaatggtcctagcctggcccctacacacccaggtcccacaggccccctccccactggaatttcaccaaccaacaaggggaaagtacgctgttacagcatagcggtcaggcccagcaggagcttggcacatgatggggaggtggccagctccaggccctgcccgaccccatcatgtgtatttggtgtatggggtgtggggggtcacaccagaagctggcctggggtctcttctttgctggacacagctccctggcccctgcccccagcccctgcagcccctgccggactgtggaagccacatatgggaaaagtcctggcagacaatgtggcgggatgactgggggcttctccctctgaacctgggtccagtgtagcctggctctgagagaaggtggtgagcatgtggagaaggttccatagtccactcttaggggaaccagcaaagcctcatggcagttggctccatctggacctcccatggtcactacaggatggtggagcagggggcatcttttagcctccccccgccaccacatccaggccctctcaggcacctcctgcctcagcccacacctgcctcacccattgcccccctccccccacctactgccatcccactcctctgccagccacttcccagccgccccaccccactccatccaccaaatcacctcctgacttaatcctttctggaaggagctgccgcccaggaaccggtattgcctagagcctccaggaggggccctcctcaggcctccagtggccccatgcccacctgcctgaccctccactgcccctggaagcaaagtgcctatcagcagcgttgcgtcctctggggcccccggtcgggggggagggggtgtgggctaaccttggccaccaccacaaaaggaatgtgccagaatgctgaaccttcttgttaatgctatgaccgtgccttgaataaacaagtcctcccaacctc

SEQ ID NO: 8469 - protein, 806 aa, Homo sapiens
MSASPDDLSTGGRLQNMTVDECFQSRNTVLQGQPFGGVPTVLCLNIALWVLVLVVYSFLRKAAWDYGRLALLIHNDSLTSLIYGEQSEKTSPSETSLEMERRDKGFCSWFFNSITMKDEDLINKCGDDARIYIVFQYHLIIFVLIICIPSLGIILPINYTGSVLDWSSHFARTTIVNVSTESKLLWLHSLLSFFYFITNFMFMAHHCLGFAPRNSQKVTRTLMITYVPKDIEDPELIIKHFHEAYPGSVVTRVHFCYDVRNLIDLDDQRRHAMRGRLFYTAKAKKTGKVMIRIHPCARLCFCKCWTCFKEVDAEQYYSELEEQLTDEFNAELNRVPLKRLDLIFVTFQDSRMAKRVRKDYKYVQCGVQPQQSSVTTIVKSYYWRVTMAPHPKDIIWKHLSVRRFFWWARFIAINTFLFFLFFFLTTPAIIMNTIDMYNVTRPIEKLQNPIVTQFFPSVMLWGFTVILPLIVYFSAFLEAHWTRSSQNLVMVHKCYIFLVFMVVILPSMGLTSLDVFLRWLFDIYYLEQASIRFQCVFLPDNGAFFVNYVITAALLGTGMELLRLGSLFCYSTRLFFSRSEPERVNIRKNQAIDFQFGREYAWMMNVFSVVMAYSITCPIIVPFGLLYLCMKHLTDRYNMYYSFAPTKLNEQIHMAAVSQAIFAPLLGLFWMLFFSILRLGSLHAITIFSLSTLLIAMVIAFVGIFLGKLRMVADYEPEEEEIQTVFDMEPSSTSSTPTSLLYVATVLQEPELNLTPASSPARHTYGTMNNQPEEGEEESGLRGFARELDSAQFQEGLELEGQNQYH

SEQ ID NO: 8470 - DNA, 3232 bp, Homo sapiens
gacggtccctggcatctgccagttggggtggcatctcggctggcagactcctgcccatgactttttctcctcctcggcaggttctctccacgccatcaccatcttttccctgtccaccctcctcattgccatggtgattgcctttgttggcatttttctggggaagcttcggatggttgccgactacgagcccgaggaggaggagatccagacagtgtttgacatggagccaagcagcacctcctccacgcccacctccctcctgtatgtggccaccgtgctgcaagaaccggagttgaatctgacccccgcctcctccccagccaggcacacctatggcaccatgaacaaccagccggaagagggagaagaagagagtggtctgaggggctttgcgagggagctagactcggcccagttccaggaagggctggaactggagggccagaaccagtaccactgaccgggacctgaggcctccactggcgacttgttgaggggtcaggggagggcctggcaaggggaggcaggagggtggcctggacctccccactacctcctgcagactttgagaagcccacagtggagacatccaccaccccagccatgggccatacgggggtcctgacctgctgcccggctggaactgggggtgctcggcagtgctgaaggagcctgggaagggatgggaggatacaggcaagcacatgtcttgagagaggtggctggagccccggcacagagactgaacgctggggtcccttcctgggaccaagatggagaaggtgttcctaagggaggagacagaaggaggctgccgaaggctctgtggggtcatcaccactctgcatcagctgcccttccaaggagcttctgctgctgctcctcctcccagccccggcccattcctcccctgcagtctgaggaggcaaaggtatgtgcacggggcacattgacaggacacggaggaccacctcatcacagggttccctgcatggggatctgtaaagagaaagtttctgcacccaccagagcaagagccaactgaaagcgtagacctgagaagaggtaactcagccccttcctgctcctctgccctcatcagatgtccccaggagcagcagggcagaggcccttctttctattcttacaagggtagctagagcgtgatcactcagggctcatcaaatgagactcgtgtgcatttttcagaaggaaaccttggttagtccttgctgggtaacacaaagtggggtgagacgacagaagccgaattcatggaaggggggtcttctccccaaaactctgtgtggtgggaaaccagctatacctccccaagccccagggcctaaagagaagacccccgaagccaaagatgtggccacttaaaagcgtctcctgcctcctacccaactgagtgcctgggcccccagcttggccaagatgggcagtacgttagggtaagaaccccatgcttcaaacttaaggactgaccatcacctgcgtcccaagtaggacccttcctcccttctcggggctgcccctgcaccctgccttgaagaccacccaagcggcctccagtgtgggcctggtccagacattgcagatgcttcaaccgtgatgtcgccccaggcctgccaggggtgtggtggaggggaaggccacgtgctccagggagaagccctttctggagaagcaaggctgtcctcccagggctgccactaccagagacctgggggagctgaattccgaacagtgatggtgacactcagcacctttgccacagccggggggaaccggcttctgcctctgggatgggctctcatcaggaccaccgtgcagcccagccagggaggacatgagaagggccagtgggggcctcaatgaaccagaacaagccaagctgaatggggtctgtgtgctccagggccctcttcagccccctcccccaaaggtctgggtccctgccaccaacctactgaaggccggcccccggctcacctcacctgagcacctgcaccaggccccaggcacatggctgccctgaactcagatcacctagaccttgtccctgccccacctttgccccatcctagccccagaagctccaagcttcaccgcaggtgagaaattgtgctcaatgggcagaaactgctatacccccagggcatggcccacattttggcatgagggtgtctttccagagagcttgggttggctggagagaggctgtctttcccattccttgtccagctaggaataaaggggaaatggtcctagcctggcccctacacacccaggtcccacaggccccctccccactggaatttcaccaaccaacaaggggaaagtacgctgttacagcatagcggtcaggcccagcaggagcttggcacatgatggggaggtggccagctccaggccctgcccgaccccatcatgtgtatttggtgtatggggtgtggggggtcacaccagaagctggcctggggtctcttctttgctggacacagctccctggcccctgcccccagcccctgcagcccctgccggactgtggaagccacatatgggaaaagtcctggcagacaatgtggcgggatgactgggggcttctccctctgaacctgggtccagtgtagcctggctctgagagaaggtggtgagcatgtggagaaggttccatagtccactcttaggggaaccagcaaagcctcatggcagttggctccatctggacctcccatggtcactacaggatggtggagcagggggcatcttttagcctccccccgccaccacatccaggccctctcaggcacctcctgcctcagcccacacctgcctcacccattgcccccctccccccacctactgccatcccactcctctgccagccacttcccagccgccccaccccactccatccaccaaatcacctcctgacttaatcctttctggaaggagctgccgcccaggaaccggtattgcctagagcctccaggaggggccctcctcaggcctccagtggccccatgcccacctgcctgaccctccactgcccctggaagcaaagtgcctatcagcagcgttgcgtcctctggggcccccggtcgggggggagggggtgtgggctaaccttggccaccaccacaaaaggaatgtgccagaatgctgaaccttcttgttaatgctatgaccgtgccttgaataaacaagtcctcccaacctc

SEQ ID NO: 8471 - protein, 110 aa, Homo sapiens
MVIAFVGIFLGKLRMVADYEPEEEEIQTVFDMEPSSTSSTPTSLLYVATVLQEPELNLTPASSPARHTYGTMNNQPEEGEEESGLRGFARELDSAQFQEGLELEGQNQYH

SEQ ID NO: 8472 - DNA, 540 bp, Homo sapiens
acatgttctaaaggagcagtggactaggagtggggagtcctgccactgaaccagccctgggagcacctagatgctcatcaaatgatcaagaacaattaggtgggtgggacagacaggacccaggctgctggggaagaaggcaggctccaaggtctggaggagacagaggcgatgggggtggggcatgaggggagagggtgtgcccagggccttgcccccaacgtgaccttgctcctgtcccctgtctctatcccaagcagctgtatgtggccaccgtgctgcaagaaccggagttgaatctgacccccgcctcctccccagccaggcacacctatggcaccatgaacaaccagccggaagagggagaagaagagagtgtgcctatcagcagcgttgcgtcctctggggcccccggtcgggggggagggggtgtgggctaaccttggccaccaccacaaaaggaatgtgccagaatgctgaaccttcttgttaatgctatgaccgtgccttgaataaacaagtcctcccaacctctcctgg

SEQ ID NO: 8473 - protein, 32 aa, Homo sapiens
MNNQPEEGEEESVPISSVASSGAPGRGGGGVG

SEQ ID NO: 8474 - DNA, 1884 bp, Homo sapiens
ttcccaggccaccatagcggctggcggagggagcgcgcgccttgctggcctggagggggcgggggccgtggcggctttaaagcgcccagcccaggcgtcgcggggtggggcggctctggcggctgcggggcgcagggcgcagcggccaagcggggtccccggaagcacagctggggtgtctccacctacgactggccgcgcgccttttctctcccgcgccagggaaggagcggctgcggcccccgccgggcggaggcacggggggcgtacgaggggcggaggggaccgcgtcgcggaggagatggcgcggcacgtgcggtgacggcacccgagccctgagggtcccagccccgcgctccgcgtccccgggacagcatggagcgcccggagcccgagctgatccggcagagctggcgggcagtgagccgcagcccgctggagcacggcaccgtcctgtttgccaggctgtttgccctggagcctgacctgctgcccctcttccagtacaactgccgccagttctccagcccagaggactgtctctcctcgcctgagttcctggaccacatcaggaaggtgatgctcgtgattgatgctgcagtgaccaatgtggaagacctgtcctcactggaggagtaccttgccagcctgggcaggaagcaccgggcagtgggtgtgaagctcagctccttctcgacagtgggtgagtctctgctctacatgctggagaagtgtctgggccctgccttcacaccagccacacgggctgcctggagccaactctacggggccgtagtgcaggccatgagtcgaggctgggatggcgagtaagaggcgaccccgcccggcagcccccatccatctgtgtctgtctgttggcctgtatctgttgtagcccaggctccccaagcttccctgcatcttggtccttgtccccttggccacactggagaggtgatggggcagggctgggtctcagtatcctagagtccagctgcagaaggagtggcttttcctccaggaaggggcttctgggtgtcccctcatccccagtagcctctttcttgcgtttctttttaccttttttggcactccctctgaccccgcgatgagtgttttggtggcagaggtgggatgagctggaaaggtatggaggtgggagaggatggggctcttctgtctgtcctgcttcttcaggtgagtgcaggccaaggcgggggtgagatggctgagcttccagcgccttctgtcctgcctgcccagtcccttcactgctttcctgccccaagatggcttgcttttcacaaataaagagaaagagcagctttagccttcttggtggaatcccaggcagtgggagcagaatcagaactgccagggaagggaagggggacctgggtctcaatgggtctcatttgagtctcgcgggctgtgcagatgccctgacagagtcggtttcctttggcggcattccctttccctcattcagcacttctgctgggaactccctgactattccgctgctgcaggaacccagctagctggccaggtggggaggggctggggaccggccaggaaggaggggtgacttcatcccagagagacccgagttcccccagcccttcatcaccaacccgctcctgcaggagtgagtcttacctcccctggccctcctttctggctcagcctgcagcgactgtgaggccacagctcctcagattcactgcccgctgtgtgccagtactcaggcagctggagagaagagaaggcagcagcagaggcccccgccctcaccccagccatctgcacttgtaccatttgctctgtgctgactgtggtcctataaattcatgagaaataaactggttctgtgtgcctctctga

SEQ ID NO: 8475 - protein, 151 aa, Homo sapiens; identical to SEQ ID NO: 960

SEQ ID NO: 8476 - DNA, 1057 bp, Homo sapiens
ccagttttatagaggagaaaacagaagcccggggaggctagaactcgcctaaggtcacacagcttggatgtagtgcagccacagcgggtgcctgagaaaaaacagtttgtgggacacatcacgtttctgccaagtgctacagctgaagcccatattcatagaagcaccctgacagcccttctccagcaacttccagaaaacagaacctgagcactcaaagctgcatcagcccatgtggccttgctcccagagaagcatctgccagtttgggcatggaggaacagaaagtgggcagggaattctccttggctccttagaaggcagtgggagcccagggaagcgttcggccccagtgcagcctaattgggagggagggatgggtagaggctggctgggcttctccttcctcaccctcatgcaaggtggctgcccctctggctccttcagagctcttcccttccaagttcctactgagaaataagaaggcacaaaggaaaatcagccacctcctggaggtcactgtgggccacctgctttgctaagagccaagcacagacccctgcattctccctgcaggagagcccacccggctcagaagaaagcaattccgcctgtggggaggagaggaagggaggggaggggaggacacacggtgaggtggaagcagcgagcagagcttctccatccctcctctccttccctgccagaaatgcaattaagcaagtggcccagactcagccgcacagacagcgcttcctgctgggggaagtcaaaagggctgtagcagtgggaaagggaggtcatcgggccccagatctaattaaccaacctgccttgcttttgacgttgctgcatttcctctattaacattaatgatggttggtctgaatgcccaagcatggccagaagcttccctccccaccacccagtaggtagcacagcctgtccctgggaccaatatccagtctccgtggcaaccgcctcctgaagatgctttaaagagatctgaccctgtcagagttgttgggagcttcagaggagggaaaatggagtgtgg

SEQ ID NO: 8477 - protein, 82 aa, Homo sapiens
MWPCSQRSICQFGHGGTESGQGILLGSLEGSGSPGKRSAPVQPNWEGGMGRGWLGFSFLTLMQGGCPSGSFRALPFQVPTEK

SEQ ID NO: 8478 - DNA, 4766 bp, Homo sapiens
ttatcatccttcaagtggggctgaacaccattgcagacctttggtacctgttcggagacctcagtctttcattggtgagcacccaagggtttgctgtggaaatgtttttgctccctgatgttgctgagtaggagctggtggccttctctgtctctactgcaggtggcagagtggctgtgttctgggtcccaggtgggctggaccccccaacctccgcagacagcaggacatcagggagtgggcccggctgaggactggatagggttcaagggagaggatagattaacattcttggaagtctctttttgcatttgttttataatgtctgtgaactcacaattttcatttcctgacccacggtctccatatttggaggccagtaagggcctttacagttggccatcactctgctgtggtgctgctccatcacctccaaaccagctcctaacaagtttattcattcattcattcatttattcagaaaatgtgtaaagatcatccgcgaagttaagataaggagccattagccatgtgatgggttgggctgggacagtagaggaagcactgggaaagttcaaggaggttagtgtacctggaacatggagcggactggtgagcaactgtgttgcagatgcaggtgccttgtccttggcacagtaacatcctggggttttgggtgtagagcctggagaggtagcagagggctggcccatgtttatcttgtgtagtgcttgggtggtgggtgttacagaaaggcttagggtttccacatattcttctctctcctcttggccattttttatgattatgactgatatattaaaagctatatataatgcatgcatagtgcctaaggaataatgaggtctcacatgcctagcaccccacgctggcctctgtttgcaggtgactgtgggaaaacacctgactgctcgtgtcctgtgcctcatagtgctgcccctggctctctatacagccacctttgctgttcacttcatggtgctgagtaaaagtggccctggtgacggtttcttcagttctgccttccaggcccggctttcagggaacaacctgcacaatgcttccatccctgaacacctggcctacggctctgtgatcactgtgaagaacctccggatggccatcggctatctgcactcccacaggcacctctaccccgagggcattggtgcccgtcagcagcaggtcaccacctatttgcacaaggactacaacaacctgtggattatcaagaaacataacacaaactcagatcccctagacccttccttcccagtggagtttgtaagacatggagacattattcgactagaacacaaagaaacttcccggaacttgcacagtcactatcatgaggcccccatgacccggaagcactatcaggtcaccggctatggcataaatggaacaggggactcaaatgatttctggcggattgaggtcgtaaacaggaaatttggaaaccggatcaaagtgctgagaagtcgaattcgcttcatccatttggtcacaggttgtgtcctgggctcctcgggaaaggttctgcccaagtggggctgggagcagttggaagttacttgcaccccatacctgaaagaaaccctcaactccatctggaatgtggaggaccatatcaatcccaagttgccaaacatcagcctggatgtgctacagcccagttttcctgagatcttgctggaatcccacatggtcatgatccgggggaacagtggcctcaaacccaaggacaatgagttcacgtccaaaccctggcactggcctatcaactatcagggcctacgcttctcaggggtcaatgacacagatttccgagtctatctgcttggcaacccggtggtttggtggctgaatctgttgagcatcgccctctacctcctctcagggagcatcattgctgtagccatgcagagaggggcacggctgccagcggaggttgcagggttgtcccaggtcctgcttcgaggaggcggccaggtcctgctcggctggacactccattacttcccgtttttcctgatgggccgggtcctctacttccaccactacttcccagccatgctcttctcaagcatgttgacaggcattctgtgggacaccctcctgcggctctgtgcctggggcttggcctcatggcccctggcgaggggcatacatgtggcgggaatcctgagcctgctcctgggaactgcctacagcttctacctcttccaccctctggcttacgggatggttggtcccctggcccaggacccccaaagtccaatggcaggactaaggtggctggactcatgggacttttgaggccactgcaaagattccagcctgggtccaggaacttcccaggagagccagctgggaagcagtactggaccatccggccatgaggaagctgcctaaggagcccgaagaattctgctgctcaccaggacccagctctgggagtgcagctggaatggaacccagcattggagagagccgggagagagccgcagctccgtccacagcaccacggagaggacagcgcctcttgggctgctccctcgtgcacagcgcaggggaggatgggtgccagagggtgggagtgggtgcgcgtgtgtgtatgtgagggcatgttgtccatatccctgtggaatacagaccgtgtaactggacagctgagtgtcataaactctaaaatagtccaggctatagtaatattttctggtatttttttctgttggatttctttggttttggtttgtaagatccatcaaaaattctcagacctctgagagggccttgagggcagagaatactgacctcaccttgggatgtcaccaaaggcagagcagatgggactgtcaaagttgtgctgccctccctcccacaaacaaatgaatccagcgtggaggaaggcgcgccgccccgagctggagggcctggctcccaccatgccccccagtggctgcaggtagctggacttcctgcctgtgacgcacagagagcagcggactccggagcgtcagcctgccttagcccttggttcctcgttttttgggattgtcacactgtgacactcgggaggaacgatgtcctatcctgggctgctcagtgttcccaggccctgtgtgccagaggccaggtctctccaagtgcatctagcctggcctggagggcaaggcagatgcattctcctggctgctgggagagcccatgggaaccttgcttagcgcccaaggtagatgagagacagggcagggaatctgcgtggtgctgggatgtggggactctggcctctccagactaatgttcctgtcacctgctgagctttcccagtgtcacttctgcagtcctcctctgctcacccctccctcactccgtgggcaattccctttctctctgtcactgcttcagcagtgaagacccatggcacctagaaatgcatgccagcttcctgcgtctaccactctgcagctcaaacaagaagctcagagctgccccttccacttcctccccaaaagggatgaagaaaaccctgtggtagaaccaaaccacccaaggccagcccttaagcctgcctccaccttcctggtgcatgacaaaatatttcttttgtctcagaggactttgatgcttcaatatttaatgatgaatccgccacactccattttccctcctctgaagctcccaacaactctgacagggtcagatctctttaaagcatcttcaggaggcggttgccacggagactggatattggtcccagggacaggctgtgctacctactgggtggtggggagggaagcttctggccatgcttgggcattcagaccaaccatcattaatgttaatagaggaaatgcagcaacgtcaaaagcaaggcaggttggttaattagatctggggcccgatgacctccctttcccactgctacagcccttttgacttcccccagcaggaagcgctgtctgtgcggctgagtctgggccacttgcttaattgcatttctggcagggaaggagaggagggatggagaagctctgctcgctgcttccacctcaccgtgtgtcctcccctcccctcccttcctctcctccccacaggcggaattgctttcttctgagccgggtgggctctcctgcagggagaatgcaggggtctgtgcttggctcttagcaaagcaggtggcccacagtgacctccaggaggtggctgattttcctttgtgccttcttatttctcagtaggaacttggaagggaagagctctgaaggagccagaggggcagccaccttgcatgagggtgaggaaggagaagcccagccagcctctacccatccctccctcccaattaggctgcactggggccgaacgcttccctgggctcccactgccttctaaggagccaaggagaattccctgcccactttctgttcctccatgcccaaactggcagatgcttctctgggagcaaggccacatgggctgatgcagctttgagtgctcaggttctgttttctggaagttgctggagaagggctgtcagggtgcttctatgaatatgggcttcagctgtagcacttggcagaaacgtgatgtgtcccacaaactgctggtggaggaagaagatgttcgtcagccaattcaacctccagccagcttcttgagcctatttggtttaaaaaaaaaaagtcttctaatcagaagccactgattttataataaataacacttgttttgaatgc

SEQ ID NO: 8479 - protein, 448 aa, Homo sapiens
MVLSKSGPGDGFFSSAFQARLSGNNLHNASIPEHLAYGSVITVKNLRMAIGYLHSHRHLYPEGIGARQQQVTTYLHKDYNNLWIIKKHNTNSDPLDPSFPVEFVRHGDIIRLEHKETSRNLHSHYHEAPMTRKHYQVTGYGINGTGDSNDFWRIEVVNRKFGNRIKVLRSRIRFIHLVTGCVLGSSGKVLPKWGWEQLEVTCTPYLKETLNSIWNVEDHINPKLPNISLDVLQPSFPEILLESHMVMIRGNSGLKPKDNEFTSKPWHWPINYQGLRFSGVNDTDFRVYLLGNPVVWWLNLLSIALYLLSGSIIAVAMQRGARLPAEVAGLSQVLLRGGGQVLLGWTLHYFPFFLMGRVLYFHHYFPAMLFSSMLTGILWDTLLRLCAWGLASWPLARGIHVAGILSLLLGTAYSFYLFHPLAYGMVGPLAQDPQSPMAGLRWLDSWDF

SEQ ID NO: 8480 - DNA, 5807 bp, Homo sapiens
cccgggccgcgaccacgctgcccgccccgccccgagcccggggccccgcgctccgctgcagtgaagggcgttgcatttcccggggtaccccgagctgccctcttgtgactccttggcggggcggctggtcagacaaagtgtgcctccgggccggagggcgacccagaggagggggaagatgccgccggccacgggcggaggcctggcagagtccgagctgcgtccccggaggggccgctgtggcccccaggctgctagggccgcaggccgggacgtggccgctgaggctgtggcgcgaagccccaaacggcctgcttggggctcacggcgcttcgaggcggtcggctggtgggccctgctggccttggtgacgctgctgtccttcgccacccgcttccaccgcttggacgagccgccgcacatctgttgggatgagactcactttggaaaaatgggaagttactatatcaaccgtacatttttctttgatgtgcacccgcccctgggaaagatgctgataggtcttgctggctacctgagtggatatgatggtacctttttgttccagaagcctggggataaatatgagcatcacagctacatgggaatgagaggattctgtgcattccttggctcctggctggtcccctttgcctacctcactgtactggatctgtccaagtccctctcggcagcactgctcacagctgccctcctcacctttgacacgggatgcctcactctgtcccagtacatcctccttgaccccatcctgatgttcttcatcatggctgccatgctgagcatggtcaagtacaactcttgcgccgacaggcccttctctgccccctggtggttctggctcagcctgactggcgttagtcttgctggtgctttaggggtcaagtttgttggcctctttatcatccttcaagtggggctgaacaccattgcagacctttggtacctgttcggagacctcagtctttcattggtgactgtgggaaaacacctgactgctcgtgtcctgtgcctcatagtgctgcccctggctctctatacagccacctttgctgttcacttcatggtgctgagtaaaagtggccctggtgacggtttcttcagttctgccttccaggcccggctttcagggaacaacctgcacaatgcttccatccctgaacacctggcctacggctctgtgatcactgtgaagaacctccggatggccatcggctatctgcactcccacaggcacctctaccccgagggcattggtgcccgtcagcagcaggtcaccacctatttgcacaaggactacaacaacctgtggattatcaagaaacataacacaaactcagatcccctagacccttccttcccagtggagtttgtaagacatggagacattattcgactagaacacaaagaaacttcccggaacttgcacagtcactatcatgaggcccccatgacccggaagcactatcaggtcaccggctatggcataaatggaacaggggactcaaatgatttctggcggattgaggtcgtaaacaggaaatttggaaaccggatcaaagtgctgagaagtcgaattcgcttcatccatttggtcacaggttgtgtcctgggctcctcgggaaaggttctgcccaagtggggctgggagcagttggaagttacttgcaccccatacctgaaagaaaccctcaactccatctggaatgtggaggaccatatcaatcccaagttgccaaacatcagcctggatgtgctacagcccagttttcctgagatcttgctggaatcccacatggtcatgatccgggggaacagtggcctcaaacccaaggacaatgagttcacgtccaaaccctggcactggcctatcaactatcagggcctacgcttctcaggggtcaatgacacagatttccgagtctatctgcttggcaacccggtggtttggtggctgaatctgttgagcatcgccctctacctcctctcagggagcatcattgctgtagccatgcagagaggggcacggctgccagcggaggttgcaggtcaggtcctctgggctctccctcccctgacctggcggcagcagggcacctgcacccctggggagggccggctgcctgctgatgggccatcctttgcgtttaccaccccacaccttcccttatcctttgcttttgaaaggtaacaacccccaagtacccagtgctgtgttaaacactttacttcctcccaacaacactagagcgttggctattatgacccccattttatggattaggaaaccaaggaaccatgagattaagaaacttgccccaggacatacagctagtaagtgatagagctgaggctcaaacccgtgcaatctgactccacagccctcacttttagccccatgctgtgtacagagctgcccatcttttctgccacctccttgttccatggccctgtcctctcatgggctagagaggagcctccagggttattgagttcccatcccagtgctgttcttggtaactttggctgccagaccatgggccacagcacctgagacagtcacacaggcccttttgcctctgcagctctctgtctgaacagtcatagtcccagacacctcctcactccatcctcacctgtaacctcaccttagcgcctgtctgccgctgcaaagatctgtgtggcagcaaagatgtgggaggtggaagtagggagtgaagctgtctgcaggcgcagaagggtttctttagaggctgggctgcctcctgctggtgcttggtgcacctgccattggtgcccaggcctcactaggctgggccctgaccagagctctcgagccccagctgctcctctccagtttctgtagcgtggtttgggttggtccaatgaggtgatatgacatattcaaggtcacacagcaaggaaggggcagagctggaccagagcctggaatctctgcccgctccttgtcttctgactgggctgtgctgcttgggcccagggttgtcccaggtcctgcttcgaggaggcggccaggtcctgctcggctggacactccattacttcccgtttttcctgatgggccgggtcctctacttccaccactacttcccagccatgctcttctcaagcatgttgacaggcattctgtgggacaccctcctgcggctctgtgcctggggcttggcctcatggcccctggcgaggggcatacatgtggcgggaatcctgagcctgctcctgggaactgcctacagcttctacctcttccaccctctggcttacgggatggttggtcccctggcccaggacccccaaagtccaatggcaggactaaggtggctggactcatgggacttttgaggccactgcaaagattccagcctgggtccaggaacttcccaggagagccagctgggaagcagtactggaccatccggccatgaggaagctgcctaaggagcccgaagaattctgctgctcaccaggacccagctctgggagtgcagctggaatggaacccagcattggagagagccgggagagagccgcagctccgtccacagcaccacggagaggacagcgcctcttgggctgctccctcgtgcacagcgcaggggaggatgggtgccagagggtgggagtgggtgcgcgtgtgtgtatgtgagggcatgttgtccatatccctgtggaatacagaccgtgtaactggacagctgagtgtcataaactctaaaatagtccaggctatagtaatattttctggtatttttttctgttggatttctttggttttggtttgtaagatccatcaaaaattctcagacctctgagagggccttgagggcagagaatactgacctcaccttgggatgtcaccaaaggcagagcagatgggactgtcaaagttgtgctgccctccctcccacaaacaaatgaatccagcgtggaggaaggcgcgccgccccgagctggagggcctggctcccaccatgccccccagtggctgcaggtagctggacttcctgcctgtgacgcacagagagcagcggactccggagcgtcagcctgccttagcccttggttcctcgttttttgggattgtcacactgtgacactcgggaggaacgatgtcctatcctgggctgctcagtgttcccaggccctgtgtgccagaggccaggtctctccaagtgcatctagcctggcctggagggcaaggcagatgcattctcctggctgctgggagagcccatgggaaccttgcttagcgcccaaggtagatgagagacagggcagggaatctgcgtggtgctgggatgtggggactctggcctctccagactaatgttcctgtcacctgctgagctttcccagtgtcacttctgcagtcctcctctgctcacccctccctcactccgtgggcaattccctttctctctgtcactgcttcagcagtgaagacccatggcacctagaaatgcatgccagcttcctgcgtctaccactctgcagctcaaacaagaagctcagagctgccccttccacttcctccccaaaagggatgaagaaaaccctgtggtagaaccaaaccacccaaggccagcccttaagcctgcctccaccttcctggtgcatgacaaaatatttcttttgtctcagaggactttgatgcttcaatatttaatgatgaatccgccacactccattttccctcctctgaagctcccaacaactctgacagggtcagatctctttaaagcatcttcaggaggcggttgccacggagactggatattggtcccagggacaggctgtgctacctactgggtggtggggagggaagcttctggccatgcttgggcattcagaccaaccatcattaatgttaatagaggaaatgcagcaacgtcaaaagcaaggcaggttggttaattagatctggggcccgatgacctccctttcccactgctacagcccttttgacttcccccagcaggaagcgctgtctgtgcggctgagtctgggccacttgcttaattgcatttctggcagggaaggagaggagggatggagaagctctgctcgctgcttccacctcaccgtgtgtcctcccctcccctcccttcctctcctccccacaggcggaattgctttcttctgagccgggtgggctctcctgcagggagaatgcaggggtctgtgcttggctcttagcaaagcaggtggcccacagtgacctccaggaggtggctgattttcctttgtgccttcttatttctcagtaggaacttggaagggaagagctctgaaggagccagaggggcagccaccttgcatgagggtgaggaaggagaagcccagccagcctctacccatccctccctcccaattaggctgcactggggccgaacgcttccctgggctcccactgccttctaaggagccaaggagaattccctgcccactttctgttcctccatgcccaaactggcagatgcttctctgggagcaaggccacatgggctgatgcagctttgagtgctcaggttctgttttctggaagttgctggagaagggctgtcagggtgcttctatgaatatgggcttcagctgtagcacttggcagaaacgtgatgtgtcccacaaactgctggtggaggaagaagatgttcgtcagccaattcaacctccagccagcttcttgagcctatttggtttaaaaaaaaaaagtcttctaatcagaagccactgattttataataaataacacttgttttgaatgc

SEQ ID NO: 8481 - protein, 677 aa, Homo sapiens
MPPATGGGLAESELRPRRGRCGPQAARAAGRDVAAEAVARSPKRPAWGSRRFEAVGWWALLALVTLLSFATRFHRLDEPPHICWDETHFGKMGSYYINRTFFFDVHPPLGKMLIGLAGYLSGYDGTFLFQKPGDKYEHHSYMGMRGFCAFLGSWLVPFAYLTVLDLSKSLSAALLTAALLTFDTGCLTLSQYILLDPILMFFIMAAMLSMVKYNSCADRPFSAPWWFWLSLTGVSLAGALGVKFVGLFIILQVGLNTIADLWYLFGDLSLSLVTVGKHLTARVLCLIVLPLALYTATFAVHFMVLSKSGPGDGFFSSAFQARLSGNNLHNASIPEHLAYGSVITVKNLRMAIGYLHSHRHLYPEGIGARQQQVTTYLHKDYNNLWIIKKHNTNSDPLDPSFPVEFVRHGDIIRLEHKETSRNLHSHYHEAPMTRKHYQVTGYGINGTGDSNDFWRIEVVNRKFGNRIKVLRSRIRFIHLVTGCVLGSSGKVLPKWGWEQLEVTCTPYLKETLNSIWNVEDHINPKLPNISLDVLQPSFPEILLESHMVMIRGNSGLKPKDNEFTSKPWHWPINYQGLRFSGVNDTDFRVYLLGNPVVWWLNLLSIALYLLSGSIIAVAMQRGARLPAEVAGQVLWALPPLTWRQQGTCTPGEGRLPADGPSFAFTTPHLPLSFAFER

SEQ ID NO: 8482 - DNA, 4869 bp, Homo sapiens
gccgcctcctagcggcccgggccgcgaccacgctgcccgccccgccccgagcccggggccccgcgctccgctgcagtgaagggcgttgcatttcccggggtaccccgagctgccctcttgtgactccttggcggggcggctggtcagacaaagtgtgcctccgggccggagggcgacccagaggagggggaagatgccgccggccacgggcggaggcctggcagagtccgagctgcgtccccggaggggccgctgtggcccccaggctgctagggccgcaggccgggacgtggccgctgaggctgtggcgcgaagccccaaacggcctgcttggggctcacggcgcttcgaggcggtcggctggtgggccctgctggccttggtgacgctgctgtccttcgccacccgcttccaccgcttggacgagccgccgcacatctgttgggatgagactcactttggaaaaatgggaagttactatatcaaccgtacatttttctttgatgtgcacccgcccctgggaaagatgctgataggtcttgctggctacctgagtggatatgatggtacctttttgttccagaagcctggggataaatatgagcatcacagctacatgggaatgagaggattctgtgcattccttggctcctggctggtcccctttgcctacctcactgtactggatctgtccaagtccctctcggcagcactgctcacagctgccctcctcacctttgacacgggatgcctcactctgtcccagtacatcctccttgaccccatcctgatgttcttcatcatggctgccatgctgagcatggtcaagtacaactcttgcgccgacaggcccttctctgccccctggtggttctggctcagcctgactggcgttagtcttgctggtgctttaggggtcaagtttgttggcctctttatcatccttcaagtggggctgaacaccattgcagacctttggtacctgttcggagacctcagtctttcattggtgactgtgggaaaacacctgactgctcgtgtcctgtgcctcatagtgctgcccctggctctctatacagccacctttgctgttcacttcatggtgctgagtaaaagtggccctggtgacggtttcttcagttctgccttccaggcccggctttcagggaacaacctgcacaatgcttccatccctgaacacctggcctacggctctgtgatcactgtgaagaacctccggatggccatcggctatctgcactcccacaggcacctctaccccgagggcattggtgcccgtcagcagcaggtcaccacctatttgcacaaggactacaacaacctgtggattatcaagaaacataacacaaactcagatcccctagacccttccttcccagtggagtttgtaagacatggagacattattcgactagaacacaaagaaacttcccggaacttgcacagtcactatcatgaggcccccatgacccggaagcactatcaggtcaccggctatggcataaatggaacaggggactcaaatgatttctggcggattgaggtcgtaaacaggaaatttggaaaccggatcaaagtgctgagaagtcgaattcgcttcatccatttggtcacaggttgtgtcctgggctcctcgggaaaggttctgcccaagtggggctgggagcagttggaagttacttgcaccccatacctgaaagaaaccctcaactccatctggaatgtggaggaccatatcaatcccaagttgccaaacatcagcctggatgtgctacagcccagttttcctgagatcttgctggaatcccacatggtcatgatccgggggaacagtggcctcaaacccaaggacaatgagttcacgtccaaaccctggcactggcctatcaactatcagggcctacgcttctcaggggtcaatgacacagatttccgagtctatctgcttggcaacccggtggtttggtggctgaatctgttgagcatcgccctctacctcctctcagggagcatcattgctgtagccatgcagagaggggcacggctgccagcggaggttgcagggttgtcccaggtcctgcttcgaggaggcggccaggtcctgctcggctggacactccattacttcccgtttttcctgatgggccgggtcctctacttccaccactacttcccagccatgctcttctcaagcatgttgacaggcattctgtgggacaccctcctgcggctctgtgcctggggcttggcctcatggcccctggcgaggggcatacatgtggcgggaatcctgagcctgctcctgggaactgcctacagcttctacctcttccaccctctggcttacgggatggttggtcccctggcccaggacccccaaagtccaatggcaggactaaggtggctggactcatgggacttttgaggccactgcaaagattccagcctgggtccaggaacttcccaggagagccagctgggaagcagtactggaccatccggccatgaggaagctgcctaaggagcccgaagaattctgctgctcaccaggacccagctctgggagtgcagctggaatggaacccagcattggagagagccgggagagagccgcagctccgtccacagcaccacggagaggacagcgcctcttgggctgctccctcgtgcacagcgcaggggaggatgggtgccagagggtgggagtgggtgcgcgtgtgtgtatgtgagggcatgttgtccatatccctgtggaatacagaccgtgtaactggacagctgagtgtcataaactctaaaatagtccaggctatagtaatattttctggtatttttttctgttggatttctttggttttggtttgtaagatccatcaaaaattctcagacctctgagagggccttgagggcagagaatactgacctcaccttgggatgtcaccaaaggcagagcagatgggactgtcaaagttgtgctgccctccctcccacaaacaaatgaatccagcgtggaggaaggcgcgccgccccgagctggagggcctggctcccaccatgccccccagtggctgcaggtagctggacttcctgcctgtgacgcacagagagcagcggactccggagcgtcagcctgccttagcccttggttcctcgttttttgggattgtcacactgtgacactcgggaggaacgatgtcctatcctgggctgctcagtgttcccaggccctgtgtgccagaggccaggtctctccaagtgcatctagcctggcctggagggcaaggcagatgcattctcctggctgctgggagagcccatgggaaccttgcttagcgcccaaggtagatgagagacagggcagggaatctgcgtggtgctgggatgtggggactctggcctctccagactaatgttcctgtcacctgctgagctttcccagtgtcacttctgcagtcctcctctgctcacccctccctcactccgtgggcaattccctttctctctgtcactgcttcagcagtgaagacccatggcacctagaaatgcatgccagcttcctgcgtctaccactctgcagctcaaacaagaagctcagagctgccccttccacttcctccccaaaagggatgaagaaaaccctgtggtagaaccaaaccacccaaggccagcccttaagcctgcctccaccttcctggtgcatgacaaaatatttcttttgtctcagaggactttgatgcttcaatatttaatgatgaatccgccacactccattttccctcctctgaagctcccaacaactctgacagggtcagatctctttaaagcatcttcaggaggcggttgccacggagactggatattggtcccagggacaggctgtgctacctactgggtggtggggagggaagcttctggccatgcttgggcattcagaccaaccatcattaatgttaatagaggaaatgcagcaacgtcaaaagcaaggcaggttggttaattagatctggggcccgatgacctccctttcccactgctacagcccttttgacttcccccagcaggaagcgctgtctgtgcggctgagtctgggccacttgcttaattgcatttctggcagggaaggagaggagggatggagaagctctgctcgctgcttccacctcaccgtgtgtcctcccctcccctcccttcctctcctccccacaggcggaattgctttcttctgagccgggtgggctctcctgcagggagaatgcaggggtctgtgcttggctcttagcaaagcaggtggcccacagtgacctccaggaggtggctgattttcctttgtgccttcttatttctcagtaggaacttggaagggaagagctctgaaggagccagaggggcagccaccttgcatgagggtgaggaaggagaagcccagccagcctctacccatccctccctcccaattaggctgcactggggccgaacgcttccctgggctcccactgccttctaaggagccaaggagaattccctgcccactttctgttcctccatgcccaaactggcagatgcttctctgggagcaaggccacatgggctgatgcagctttgagtgctcaggttctgttttctggaagttgctggagaagggctgtcagggtgcttctatgaatatgggcttcagctgtagcacttggcagaaacgtgatgtgtcccacaaactgctggtggaggaagaagatgttcgtcagccaattcaacctccagccagcttcttgagcctatttggtttaaaaaaaaaaagtcttctaatcagaagccactgattttataataaataacacttgttttgaatgc

SEQ ID NO: 8483 - protein, 750 aa, Homo sapiens; identical to SEQ ID NO: 962

SEQ ID NO: 8484 - DNA, 2822 bp, Homo sapiens
cccgggccgcgaccacgctgcccgccccgccccgagcccggggccccgcgctccgctgcagtgaagggcgttgcatttcccggggtaccccgagctgccctcttgtgactccttggcggggcggctggtcagacaaagtgtgcctccgggccggagggcgacccagaggagggggaagatgccgccggccacgggcggaggcctggcagagtccgagctgcgtccccggaggggccgctgtggcccccaggctgctagggccgcaggccgggacgtggccgctgaggctgtggcgcgaagccccaaacggcctgcttggggctcacggcgcttcgaggcggtcggctggtgggccctgctggccttggtgacgctgctgtccttcgccacccgcttccaccgcttggacgagccgccgcacatctgttgggatgagactcactttggaaaaatgggaagttactatatcaaccgtacatttttctttgatgtgcacccgcccctgggaaagatgctgataggtcttgctggctacctgagtggatatgatggtacctttttgttccagaagcctggggataaatatgagcatcacagctacatgggaatgagaggattctgtgcattccttggctcctggctggtcccctttgcctacctcactgtactggatctgtccaagtccctctcggcagcactgctcacagctgccctcctcacctttgacacgggatgcctcactctgtcccagtacatcctccttgaccccatcctgatgttcttcatcatggctgccatgctgagcatggtcaagtacaactcttgcgccgacaggcccttctctgccccctggtggttctggctcagcctgactggcgttagtcttgctggtgctttaggggtcaagtttgttggcctctttatcatccttcaagtggggctgaacaccattgcagacctttggtacctgttcggagacctcagtctttcattggtgactgtgggaaaacacctgactgctcgtgtcctgtgcctcatagtgctgcccctggctctctatacagccacctttgctgttcacttcatggtgctgagtaaaagtggccctggtgacggtttcttcagttctgccttccaggcccggctttcagggaacaacctgcacaatgcttccatccctgaacacctggcctacggctctgtgatcactgtgaagaacctccggatggccatcggctatctgcactcccacaggcacctctaccccgagggcattggtgcccgtcagcagcaggtcaccacctatttgcacaaggactacaacaacctgtggattatcaagaaacataacacaaactcagatcccctagacccttccttcccagtggagtttgtaagacatggagacattattcgactagaacacaaagaaacttcccggaacttgcacagtcactatcatgaggcccccatgacccggaagcactatcaggtcaccggctatggcataaatggaacaggggactcaaatgatttctggcggattgaggtcgtaaacaggaaatttggaaaccggatcaaagtgctgagaagtcgaattcgcttcatccatttggtcacaggttgtgtcctgggctcctcgggaaaggttctgcccaagtggggctgggagcagttggaagttacttgcaccccatacctgaaagaaaccctcaactccatctggaatgtggaggaccatatcaatcccaagttgccaaacatcagcctggatgtgctacagcccagttttcctgagatcttgctggaatcccacatggtcatgatccgggggaacagtggcctcaaacccaaggacaatgagttcacgtccaaaccctggcactggcctatcaactatcagggcctacgcttctcaggggtcaatgacacagatttccgagtctatctgcttggcaacccggtggtttggtggctgaatctgttgagcatcgccctctacctcctctcagggagcatcattgctgtagccatgcagagaggggcacggctgccagcggaggttgcagggttgtcccaggtcctgcttcgaggaggcggccaggtcctgctcggctggacactccattacttcccgtttttcctgatgggccgggtcctctacttccaccactacttcccagccatgctcttctcaagcatgttgacaggcattctgtgggacaccctcctgcggctctgtgcctggggcttggcctcatggcccctggcgaggggcatacatgtggcgggaatcctgagcctgctcctgggaactgcctacagcttctacctcttccaccctctggcttacgggatggttggtcccctggcccaggacccccaaagtccaatggcaggactaaggtggctggactcatgggacttttgaggccactgcaaagattccagcctgggtccaggaacttcccaggagagccagctgggaagcagtactggaccatccggccatgaggaagctgcctaaggagcccgaagaattctgctgctcaccaggacccagctctgggagtgcagctggaatggaacccagcattggagagagccgggagagagccgcagctccgtccacagcaccacggagaggacagcgcctcttgggctgctccctcgtgcacagcgcaggggaggatgggtgccagagggtgggagtgggtgcgcgtgtgtgtatgtgagggcatgttgtccatatccctgtggaatacagaccgtgtaactggacagctgagtgtcataaactctaaaatagtccaggctatagt

SEQ ID NO: 8485 - protein, 750 aa, Homo sapiens; identical to SEQ ID NO: 962

SEQ ID NO: 8486 - DNA, 556 bp, Homo sapiens
aggctgggccctgaccagagctctcgagccccagctgctcctctccagtttctgtagcgtggtttgggttggtccaatgaggtgatatgacatattcaaggtcacacagcaaggaaggggcagagctggaccagagcctggaatctctgcccgctccttgtcttctgactgggctgtgctgcttgggcccagggttgtcccaggtcctgcttcgaggaggcggccaggtcctgctcggctggacactccattacttcccgtttttcctgatgggccgggtcctctacttccaccactacttcccagccatgctcttctcaagcatgttgacaggcattctgtgggacaccctcctgcggctctgtgcctggggcttggcctcatggcccctggcgaggggcatacatgtggcgggaatcctgagcctgctcctgggaactgcctacaggtgagcatctctgcacctcacatgccctcccagtgtgggctcagcagtgcctcagccctgatgcattcgagaatcccctgcggtgcttttaacaccaccagtgcccat

SEQ ID NO: 8487 - protein, 121 aa, Homo sapiens [sequence omitted]

SEQ ID NO: 8488 - DNA, 724 bp, Homo sapiens
aatcaactaattcaacaactctttatcaagtatgccaggaaccacatggggccctgtggacatattggcgaggagacagacttggtccccatcccgacagcagctgctccaggcgtccagaatgatttattcctcattcccaggcccttcaaagggccacagtgactcgggggctgtgcagctgtcccttatgcctaataggagagcagcatttgagccagtaccacagtgaaaagcaatggtgctgggagctgttggagcaccaagcaggtgaaaccttgttgtctatttcctttgcatttcttagaatgcctgatgagttcttcatacagctaagtaaatgatcaagaattgggccaagctttcttctgtctcctcaacagttgtgaacttgtcagcaaggctgcatttggattctggtgggaatgtggacaccatggacagactgaggaaagaatgtatgacaaaggcttttctcctgcatttttttcccctagtgccaaacatcagcctggatgtgctacagcccagttttcctgagatcttgctggaatcccacatggtcatgatccgggggaacagtggcctcaaacccaaggacaatgagttcacgtccaaaccctggcactggcctatcaactatcaggtaggatccaaggctggggctcctcccaggaaatggagccaagaacaagagcagggagaccggtggaggcgggggtgg

SEQ ID NO: 8489 - protein, 127 aa, Homo sapiens
MIKNWAKLSSVSSTVVNLSARLHLDSGGNVDTMDRLRKECMTKAFLLHFFPLVPNISLDVLQPSFPEILLESHMVMIRGNSGLKPKDNEFTSKPWHWPINYQVGSKAGAPPRKWSQEQEQGDRWRRG

SEQ ID NO: 8490 - DNA, 1346 bp, Homo sapiens
ctgtcgcctaggctggagtgcagtggcgcgatctcggctcactgcaagctctgcctcccgggttcacgcctcagcctccctagtagctgggattacaggcacgtgccaccatgcctggctaattttttgtatttttagtagagacagggttttaccatgttagccaggatggtctccatctcctgacttcgtgatccgcctgcctcggcctcccaaagtgctgggattacaggtgtgagccaccgtacccggccagaagaaaactcttactacaaacctttccatattatgagaaaacatcttgtccttttaaaataaatagaaactcaagatacagattgggatgagactcactttggaaaaatgggaagttactatatcaaccgtacatttttctttgatgtgcacccgcccctgggaaagatgctgataggtcttgctggctacctgagtggatatgatggtacctttttgttccagaagcctggggataaatatgagcatcacagctacatgggaatgagaggagtaaggcttcctgacttgaaatggactgactgaaccctggggccacactaaaccagaaatgttatagttagcagccctggcgtggtggcaggtgcaaataaagggactttgggtggtgaggagaggggaggatgatcagaccctcccctgtggtgtagatactcagaactgaggtgaggaagaagggaagaggaggctgcaaataatacagagatgacatagatagaagcaggcacgcattgtcacctgctgccctgccccggtatactgtcagacctcaggttggagaacagcctggaacccgggcaatcaggagtctcctgcagccccagcagtgcctccatgcactggcacgctgcctgctcctcccctcacagccacagctgctggagtgttgcctacatctcagagccttttctgaagattttggcatccccacaccctgtcaccatgttcctgtgtctttccccatgaaggtttcaggcacacagaaagagttttccagccttatttgaagggaggccaaatgtctgctgcagtccctctgtgtcctgatttacagcaccagccttgatggaacatggcagggccttaacacccaactctttgggaaccttgaacgtgtggctgaatgaagccagcagaagctgacctccagtgtggacctctcagagaagtttgcatttacaagcccctttccttgaggatttcacagcatttaaataaatggctgtgtgcttatttggcctcatcgttagatgatttgcatggctatatcgtggtatattaaacaaggagtatatcctaccctcaagttc

SEQ ID NO: 8491 - protein, 65 aa, Homo sapiens
MGSYYINRTFFFDVHPPLGKMLIGLAGYLSGYDGTFLFQKPGDKYEHHSYMGMRGVRLPDLKWTD

SEQ ID NO: 8492 - DNA, 1230 bp, Homo sapiens
gcatgtcgggaccgggagggccggccggcccggggcgggggggactgggcaggaggggtcgggctcagggaactgcaactcccagcagcccccaggtacggggcgtggcgggagagctgggcgagccagaggcgaccggaaggatctttctagtccagcccctcgctttacccggacgaaagacacgggcctgattcgtcgagtctcactgagccttagtcgtcggcaggtcccaggcgcgaagtttctcggcctggaggagggggtcgcgcgaagtgccagatgcaggcggggaagcccatcctctattcctatttccgaagctcctgctcatggagagttcgaattgctctggccttgaaaggcatcgactacgagacggtgcccatcaatctcataaaggatgggggccaacagttttctaaggacttccaggcactgaatcctatgaagcaggtgccaaccctgaagattgatggaatcaccattcaccagtcactggccatcattgagtatctagaggagatgcgtcccactccgcgacttctgcctcaggacccaaagaagagggccagcgtgcgtatgatttctgacctcatcgctggtggcatccagcccctgcagaacctgtctgtcctgaagcaagtgggagaggagatgcagctgacctgggcccagaacgccatcacttgtggctttaacgccctggagcagatcctacagagcacagcgggcatatactgtgtaggagacgaggtgaccatggctgatctgtgcttggtgcctcaggtggcaaatgctgaaagattcaaggtggatctcaccccctaccctaccatcagctccatcaacaagaggctgctggtcttggaggccttccaggtgtctcacccctgccggcagccagatacacccactgagctgagggcctagctcccaaatcctgccccgttggcacagggccacaggagcagaagctgggtgggctgaagaggcctggaaacgagagtcttaattgaggagatgggagactcgaactctagccctggatctgccttcctgctgaaacttgttccacctcagtcccctcatctgtcacacgcatgtggggtggagtagggagatgcggggagcagggtgggcaggaatactgttatctatgtgacggggcagtcgtgaggctgagatgagaatgcggattaaaatgcctggcgtgctcaccgtaacacc

SEQ ID NO: 8493 - protein, 216 aa, Homo sapiens; identical to SEQ ID NO: 966

SEQ ID NO: 8494 - DNA, 1337 bp, Homo sapiens
gcatgtcgggaccgggagggccggccggcccggggcgggggggactgggcaggaggggtcgggctcagggaactgcaactcccagcagcccccaggtacggggcgtggcgggagagctgggcgagccagaggcgaccggaaggatctttctagtccagcccctcgctttacccggacgaaagacacgggcctgattcgtcgagtctcactgagccttagtcgtcggcaggtcccaggcgcgaagtttctcggcctggaggagggggtcgcgcgaagtgccagatgcaggcggggaagcccatcctctattcctatttccgaagctcctgctcatggagagttcgaattgctctggccttgaaaggcatcgactacgagacggtgcccatcaatctcataaaggatgggggccaacagttttctaaggacttccaggcactgaatcctatgaagcaggtgccaaccctgaagattgatggaatcaccattcaccagtcactggccatcattgagtatctagaggagatgcgtcccactccgcgacttctgcctcaggacccaaagaagagggccagcgtgcgtatgatttctgacctcatcgctggtggcatccagcccctgcagaacctgtctgtcctgaagcaagtgggagaggagatgcagctgacctgggcccagaacgccatcacttgtggctttaacgccctggagcagatcctacagagcacagcgggcatatactgtgtaggagacgaggtgaccatggctgatctgtgcttggtgcctcaggtggcaaatgctgaaagattcaaggtggatctcaccccctaccctaccatcagctccatcaacaagaggctgctggtcttggaggccttccaggtgtctcacccctgccggcagccagatacacccactgagctgagggcctagctcccaaatcctgccccgttggcacagggccacaggagcagaagctgggtgggctgaagaggcctggaaacgagagtcttaattgaggagatgggagactcgaactctagccctggatctgccttcctgctgaaacttgttccacctcagtcccctcatctgtcacacgcatgtggggtggagtagggagatgcggggagcagggtgggcaggaatactgttatctatgtgacggggcagtcgtgaggctgagatgagaatgcggattaaaatgcctggcgtgctcaccgtaacaccacggggaaggctgtgtgccttttctcatccgcttttgttgtgtgtgactccaaagaatgcccgcgctgaaatttggcgtgaattaaactgaagcccaggcctctacc

SEQ ID NO: 8495 - protein, 216 aa, Homo sapiens; identical to SEQ ID NO: 966

SEQ ID NO: 8496 - DNA, 1085 bp, Homo sapiens
gccagaggcgaccggaaggatctttctagtccagcccctcgctttacccggacgaaagacacgggcctgattcgtcgagtctcactgagccttagtcgtcggcaggtcccaggcgcgaagtttctcggcctggaggagggggtcgcgcgaagtgccagatgcaggcggggaagcccatcctctattcctatttccgaagctcctgctcatggagagttcgaattgctctggccttgaaaggcatcgactacgagacggtgcccatcaatctcataaaggatgggggccaacagttttctaaggacttccaggcactgaatcctatgaagcaggtgccaaccctgaagattgatggaatcaccattcaccagtcaaacctgtctgtcctgaagcaagtgggagaggagatgcagctgacctgggcccagaacgccatcacttgtggctttaacgccctggagcagatcctacagagcacagcgggcatatactgtgtaggagacgaggtgaccatggctgatctgtgcttggtgcctcaggtggcaaatgctgaaagattcaaggtggatctcaccccctaccctaccatcagctccatcaacaagaggctgctggtcttggaggccttccaggtgtctcacccctgccggcagccagatacacccactgagctgagggcctagctcccaaatcctgccccgttggcacagggccacaggagcagaagctgggtgggctgaagaggcctggaaacgagagtcttaattgaggagatgggagactcgaactctagccctggatctgccttcctgctgaaacttgttccacctcagtcccctcatctgtcacacgcatgtggggtggagtagggagatgcggggagcagggtgggcaggaatactgttatctatgtgacggggcagtcgtgaggctgagatgagaatgcggattaaaatgcctggcgtgctcaccgtaacaccacggggaaggctgtgtgccttttctcatccgcttttgttgtgtgtgactccaaagaatgcccgcgctgaaatttggcgtgaattaaactgaagcccaggcctcta

SEQ ID NO: 8497 - protein, 174 aa, Homo sapiens
MQAGKPILYSYFRSSCSWRVRIALALKGIDYETVPINLIKDGGQQFSKDFQALNPMKQVPTLKIDGITIHQSNLSVLKQVGEEMQLTWAQNAITCGFNALEQILQSTAGIYCVGDEVTMADLCLVPQVANAERFKVDLTPYPTISSINKRLLVLEAFQVSHPCRQPDTPTELRA

SEQ ID NO: 8498 - DNA, 966 bp, Homo sapiens
gaaggatctttctagtccagcccctcgctttacccggacgaaagacacgggcctgattcgtcgagtctcactgagccttagtcgtcggcaggtcccaggcgcgaagtttctcggcctggaggagggggtcgcgcgaagtgccagatgcaggcggggaagcccatcctctattcctatttccgaagctcctgctcatggagagttcgaattgctctggccttgaaaggcatcgactacgagacggtgcccatcaatctcataaaggatgggggccaacagttttctaaggacttccaggcactgaatcctatgaagcaggtgccaaccctgaagattgatggaatcaccattcaccagtcaaacctgtctgtcctgaagcaagtgggagaggagatgcagctgacctgggcccagaacgccatcacttgtggctttaacgccctggagcagatcctacagagcacagcgggcatatactgtgtaggagacgaggtgaccatggctgatctgtgcttggtgcctcaggtggcaaatgctgaaagattcaaggtggatctcaccccctaccctaccatcagctccatcaacaagaggctgctggtcttggaggccttccaggtgtctcacccctgccggcagccagatacacccactgagctgagggcctagctcccaaatcctgccccgttggcacagggccacaggagcagaagctgggtgggctgaagaggcctggaaacgagagtcttaattgaggagatgggagactcgaactctagccctggatctgccttcctgctgaaacttgttccacctcagtcccctcatctgtcacacgcatgtggggtggagtagggagatgcggggagcagggtgggcaggaatactgttatctatgtgacggggcagtcgtgaggctgagatgagaatgcggattaaaatgcctggcgtgctcaccgtaacacc

SEQ ID NO: 8499 - protein, 174 aa, Homo sapiens; identical to SEQ ID NO: 8497

SEQ ID NO: 8500 - DNA, 563 bp, Homo sapiens
ctttctagtccagcccctcgctttacccggacgaaagacacgggcctgattcgtcgagtctcactgagccttagtcgtcggcaggtcccaggcgcgaagtttctcggcctggaggagggggtcgcgcgaagtgccagatgcaggcggggaagcccatcctctattcctatttccgaagctcctgctcatggagagttcgaattggtaagagatgtgcctcctccaggatgagtgctggagtggggtggactggggcggataagcccgggtgcaaagctggcctgggatggaagggttgctctgtcagagaggacctcacccccagcaaccagcatcccccggctcctagaacccccatccctgcatggcatctccaccccggaaacacagggtgagggtgggaggaagggggttgttttttcccttgggactgacacttctcccaacactgctctccaaagccccttggcaaccatgtttaaagcagggtcacaaaatccacatgcccctggtaactggcaggggaacagctggcccttctcagttcttattttatttgaact

SEQ ID NO: 8501 - protein, 85 aa, Homo sapiens
MQAGKPILYSYFRSSCSWRVRIGKRCASSRMSAGVGWTGADKPGCKAGLGWKGCSVREDLTPSNQHPPAPRTPIPAWHLHPGNTG

SEQ ID NO: 8502 - DNA, 829 bp, Homo sapiens
ctagtccagcccctcgctttacccggacgaaagacacgggcctgattcgtcgagtctcactgagccttagtcgtcggcaggtcccaggcgcgaagtttctcggcctggaggagggggtcgcgcgaagtgccagatgcaggcggggaagcccatcctctattcctatttccgaagctcctgctcatggagagttcgaattgctctggccttgaaaggcatcgactacgagacggtgcccatcaatctcataaaggatgggggccaacagttttctaaggacttccaggcactgaatcctatgaagcaggtgccaaccctgaagattgatggaatcaccattcaccagtcactggccatcattgagtatctagaggagatgcgtcccactccgcgacttctgcctcaggacccaaagaagagggccagcgtgcgtatgatttctgacctcatcgctggtggcatccagcccctgcagaacctgtctgtcctgaagcaagtgggagaggagatgcagctgacctgggcccagaacgccatcacttgtggctttaacggtgagtcctcacctctgtgagctgccccacagtggcctcttagaggtatggccctcgcacacaggggcctgggtatctgaaccagcctcccaggctgctttgggcctgacagttgcatggatgagggcaggactggggaggcaatgggctgggtgggcatccagaccttagctccagcacttctgggaacctcggtccctgagcccacagcccttcatagctggatggcccaacttcagcttcactgcctactccagctgggaaaccaaggccag

SEQ ID NO: 8503 - protein, 146 aa, Homo sapiens
MQAGKPILYSYFRSSCSWRVRIALALKGIDYETVPINLIKDGGQQFSKDFQALNPMKQVPTLKIDGITIHQSLAIIEYLEEMRPTPRLLPQDPKKRASVRMISDLIAGGIQPLQNLSVLKQVGEEMQLTWAQNAITCGFNGESSPL

SEQ ID NO: 8504 - DNA, 1039 bp, Homo sapiens
ctagtccagcccctcgctttacccggacgaaagacacgggcctgattcgtcgagtctcactgagccttagtcgtcggcaggtcccaggcgcgaagtttctcggcctggaggagggggtcgcgcgaagtgccagatgcaggcggggaagcccatcctctattcctatttccgaagctcctgctcatggagagttcgaattgctctggccttgaaaggcatcgactacgagacggtgcccatcaatctcataaaggatgggggccaacagttttctaaggacttccaggcactgaatcctatgaagcagctggccatcattgagtatctagaggagatgcgtcccactccgcgacttctgcctcaggacccaaagaagagggccagcgtgcgtatgatttctgacctcatcgctggtggcatccagcccctgcagaacctgtctgtcctgaagcaagtgggagaggagatgcagctgacctgggcccagaacgccatcacttgtggctttaacgccctggagcagatcctacagagcacagcgggcatatactgtgtaggagacgaggtgaccatggctgatctgtgcttggtgcctcaggtggcaaatgctgaaagattcaaggtggatctcaccccctaccctaccatcagctccatcaacaagaggctgctggtcttggaggccttccaggtgtctcacccctgccggcagccagatacacccactgagctgagggcctagctcccaaatcctgccccgttggcacagggccacaggagcagaagctgggtgggctgaagaggcctggaaacgagagtcttaattgaggagatgggagactcgaactctagccctggatctgccttcctgctgaaacttgttccacctcagtcccctcatctgtcacacgcatgtggggtggagtagggagatgcggggagcagggtgggcaggaatactgttatctatgtgacggggcagtcgtgaggctgagatgagaatgcggattaaaatgcctggcgtgctcaccgtaacacc

SEQ ID NO: 8505 - protein, 202 aa, Homo sapiens
MQAGKPILYSYFRSSCSWRVRIALALKGIDYETVPINLIKDGGQQFSKDFQALNPMKQLAIIEYLEEMRPTPRLLPQDPKKRASVRMISDLIAGGIQPLQNLSVLKQVGEEMQLTWAQNAITCGFNALEQILQSTAGIYCVGDEVTMADLCLVPQVANAERFKVDLTPYPTISSINKRLLVLEAFQVSHPCRQPDTPTELRA

SEQ ID NO: 8506 - DNA, 1144 bp, Homo sapiens
ctagtccagcccctcgctttacccggacgaaagacacgggcctgattcgtcgagtctcactgagccttagtcgtcggcaggtcccaggcgcgaagtttctcggcctggaggagggggtcgcgcgaagtgccagatgcaggcggggaagcccatcctctattcctatttccgaagctcctgctcatggagagttcgaattgctctggccttgaaaggcatcgactacgagacggtgcccatcaatctcataaaggatgggggccaacagttttctaaggacttccaggcactgaatcctatgaagcagctggccatcattgagtatctagaggagatgcgtcccactccgcgacttctgcctcaggacccaaagaagagggccagcgtgcgtatgatttctgacctcatcgctggtggcatccagcccctgcagaacctgtctgtcctgaagcaagtgggagaggagatgcagctgacctgggcccagaacgccatcacttgtggctttaacgccctggagcagatcctacagagcacagcgggcatatactgtgtaggagacgaggtgaccatggctgatctgtgcttggtgcctcaggtggcaaatgctgaaagattcaaggtggatctcaccccctaccctaccatcagctccatcaacaagaggctgctggtcttggaggccttccaggtgtctcacccctgccggcagccagatacacccactgagctgagggcctagctcccaaatcctgccccgttggcacagggccacaggagcagaagctgggtgggctgaagaggcctggaaacgagagtcttaattgaggagatgggagactcgaactctagccctggatctgccttcctgctgaaacttgttccacctcagtcccctcatctgtcacacgcatgtggggtggagtagggagatgcggggagcagggtgggcaggaatactgttatctatgtgacggggcagtcgtgaggctgagatgagaatgcggattaaaatgcctggcgtgctcaccgtaacaccacggggaaggctgtgtgccttttctcatccgcttttgttgtgtgtgactccaaagaatgcccgcgctgaaatttggcgtgaattaaactgaagcccaggcctcta

SEQ ID NO: 8507 - protein, 202 aa, Homo sapiens; identical to SEQ ID NO: 8505

SEQ ID NO: 8508 - DNA, 998 bp, Homo sapiens
agtccagcccctcgctttacccggacgaaagacacgggcctgattcgtcgagtctcactgagccttagtcgtcggcaggtcccaggcgcgaagtttctcggcctggaggagggggtcgcgcgaagtgccagatgcaggcggggaagcccatcctctattcctatttccgaagctcctgctcatggagagttcgaattgctctggccttgaaaggcatcgactacgagacggtgcccatcaatctcataaaggatgggggccaacagctggccatcattgagtatctagaggagatgcgtcccactccgcgacttctgcctcaggacccaaagaagagggccagcgtgcgtatgatttctgacctcatcgctggtggcatccagcccctgcagaacctgtctgtcctgaagcaagtgggagaggagatgcagctgacctgggcccagaacgccatcacttgtggctttaacgccctggagcagatcctacagagcacagcgggcatatactgtgtaggagacgaggtgaccatggctgatctgtgcttggtgcctcaggtggcaaatgctgaaagattcaaggtggatctcaccccctaccctaccatcagctccatcaacaagaggctgctggtcttggaggccttccaggtgtctcacccctgccggcagccagatacacccactgagctgagggcctagctcccaaatcctgccccgttggcacagggccacaggagcagaagctgggtgggctgaagaggcctggaaacgagagtcttaattgaggagatgggagactcgaactctagccctggatctgccttcctgctgaaacttgttccacctcagtcccctcatctgtcacacgcatgtggggtggagtagggagatgcggggagcagggtgggcaggaatactgttatctatgtgacggggcagtcgtgaggctgagatgagaatgcggattaaaatgcctggcgtgctcaccgtaacacc

SEQ ID NO: 8509 - protein, 189 aa, Homo sapiens
MQAGKPILYSYFRSSCSWRVRIALALKGIDYETVPINLIKDGGQQLAIIEYLEEMRPTPRLLPQDPKKRASVRMISDLIAGGIQPLQNLSVLKQVGEEMQLTWAQNAITCGFNALEQILQSTAGIYCVGDEVTMADLCLVPQVANAERFKVDLTPYPTISSINKRLLVLEAFQVSHPCRQPDTPTELRA

SEQ ID NO: 8510 - DNA, 1027 bp, Homo sapiens
agtccagcccctcgctttacccggacgaaagacacgggcctgattcgtcgagtctcactgagccttagtcgtcggcaggtcccaggcgcgaagtttctcggcctggaggagggggtcgcgcgaagtgccagatgcaggcggggaagctctggccttgaaaggcatcgactacgagacggtgcccatcaatctcataaaggatgggggccaacagttttctaaggacttccaggcactgaatcctatgaagcaggtgccaaccctgaagattgatggaatcaccattcaccagtcactggccatcattgagtatctagaggagatgcgtcccactccgcgacttctgcctcaggacccaaagaagagggccagcgtgcgtatgatttctgacctcatcgctggtggcatccagcccctgcagaacctgtctgtcctgaagcaagtgggagaggagatgcagctgacctgggcccagaacgccatcacttgtggctttaacgccctggagcagatcctacagagcacagcgggcatatactgtgtaggagacgaggtgaccatggctgatctgtgcttggtgcctcaggtggcaaatgctgaaagattcaaggtggatctcaccccctaccctaccatcagctccatcaacaagaggctgctggtcttggaggccttccaggtgtctcacccctgccggcagccagatacacccactgagctgagggcctagctcccaaatcctgccccgttggcacagggccacaggagcagaagctgggtgggctgaagaggcctggaaacgagagtcttaattgaggagatgggagactcgaactctagccctggatctgccttcctgctgaaacttgttccacctcagtcccctcatctgtcacacgcatgtggggtggagtagggagatgcggggagcagggtgggcaggaatactgttatctatgtgacggggcagtcgtgaggctgagatgagaatgcggattaaaatgcctggcgtgctcaccgtaacacc

SEQ ID NO: 8511 - protein, 161 aa, Homo sapiens; identical to SEQ ID NO: 964

SEQ ID NO: 8512 - DNA, 1103 bp, Homo sapiens
agtccagcccctcgctttacccggacgaaagacacgggcctgattcgtcgagtctcactgagccttagtcgtcggcaggtcccaggcgcgaagtttctcggcctggaggagggggtcgcgcgaagtgccagatgcaggcggggaagcccatcctctattcctatttccgaagctcctgctcatggagagttcgaattgctctggccttgaaaggcatcgactacgagacggtgcccatcaatctcataaaggatgggggccaacagctggccatcattgagtatctagaggagatgcgtcccactccgcgacttctgcctcaggacccaaagaagagggccagcgtgcgtatgatttctgacctcatcgctggtggcatccagcccctgcagaacctgtctgtcctgaagcaagtgggagaggagatgcagctgacctgggcccagaacgccatcacttgtggctttaacgccctggagcagatcctacagagcacagcgggcatatactgtgtaggagacgaggtgaccatggctgatctgtgcttggtgcctcaggtggcaaatgctgaaagattcaaggtggatctcaccccctaccctaccatcagctccatcaacaagaggctgctggtcttggaggccttccaggtgtctcacccctgccggcagccagatacacccactgagctgagggcctagctcccaaatcctgccccgttggcacagggccacaggagcagaagctgggtgggctgaagaggcctggaaacgagagtcttaattgaggagatgggagactcgaactctagccctggatctgccttcctgctgaaacttgttccacctcagtcccctcatctgtcacacgcatgtggggtggagtagggagatgcggggagcagggtgggcaggaatactgttatctatgtgacggggcagtcgtgaggctgagatgagaatgcggattaaaatgcctggcgtgctcaccgtaacaccacggggaaggctgtgtgccttttctcatccgcttttgttgtgtgtgactccaaagaatgcccgcgctgaaatttggcgtgaattaaactgaagcccaggcctcta

SEQ ID NO: 8513 - protein, 189 aa, Homo sapiens; identical to SEQ ID NO: 8509

SEQ ID NO: 8514 - DNA, 1132 bp, Homo sapiens
agtccagcccctcgctttacccggacgaaagacacgggcctgattcgtcgagtctcactgagccttagtcgtcggcaggtcccaggcgcgaagtttctcggcctggaggagggggtcgcgcgaagtgccagatgcaggcggggaagctctggccttgaaaggcatcgactacgagacggtgcccatcaatctcataaaggatgggggccaacagttttctaaggacttccaggcactgaatcctatgaagcaggtgccaaccctgaagattgatggaatcaccattcaccagtcactggccatcattgagtatctagaggagatgcgtcccactccgcgacttctgcctcaggacccaaagaagagggccagcgtgcgtatgatttctgacctcatcgctggtggcatccagcccctgcagaacctgtctgtcctgaagcaagtgggagaggagatgcagctgacctgggcccagaacgccatcacttgtggctttaacgccctggagcagatcctacagagcacagcgggcatatactgtgtaggagacgaggtgaccatggctgatctgtgcttggtgcctcaggtggcaaatgctgaaagattcaaggtggatctcaccccctaccctaccatcagctccatcaacaagaggctgctggtcttggaggccttccaggtgtctcacccctgccggcagccagatacacccactgagctgagggcctagctcccaaatcctgccccgttggcacagggccacaggagcagaagctgggtgggctgaagaggcctggaaacgagagtcttaattgaggagatgggagactcgaactctagccctggatctgccttcctgctgaaacttgttccacctcagtcccctcatctgtcacacgcatgtggggtggagtagggagatgcggggagcagggtgggcaggaatactgttatctatgtgacggggcagtcgtgaggctgagatgagaatgcggattaaaatgcctggcgtgctcaccgtaacaccacggggaaggctgtgtgccttttctcatccgcttttgttgtgtgtgactccaaagaatgcccgcgctgaaatttggcgtgaattaaactgaagcccaggcctcta

SEQ ID NO: 8515 - protein, 161 aa, Homo sapiens; identical to SEQ ID NO: 964

SEQ ID NO: 8516 - DNA, 861 bp, Homo sapiens
tgattcgtcgagtctcactgagccttagtcgtcggcaggtcccaggcgcgaagtttctcggcctggaggagggggtcgcgcgaagtgccagatgcaggcggggaagctctggccttgaaaggcatcgactacgagacggtgcccatcaatctcataaaggatgggggccaacagttttctaaggacttccaggcactgaatcctatgaagcaggtgccaaccctgaagattgatggaatcaccattcaccagtcaaacctgtctgtcctgaagcaagtgggagaggagatgcagctgacctgggcccagaacgccatcacttgtggctttaacgccctggagcagatcctacagagcacagcgggcatatactgtgtaggagacgaggtgaccatggctgatctgtgcttggtgcctcaggtggcaaatgctgaaagattcaaggtggatctcaccccctaccctaccatcagctccatcaacaagaggctgctggtcttggaggccttccaggtgtctcacccctgccggcagccagatacacccactgagctgagggcctagctcccaaatcctgccccgttggcacagggccacaggagcagaagctgggtgggctgaagaggcctggaaacgagagtcttaattgaggagatgggagactcgaactctagccctggatctgccttcctgctgaaacttgttccacctcagtcccctcatctgtcacacgcatgtggggtggagtagggagatgcggggagcagggtgggcaggaatactgttatctatgtgacggggcagtcgtgaggctgagatgagaatgcggattaaaatgcctggcgtgctcaccgtaacacc

SEQ ID NO: 8517 - protein, 119 aa, Homo sapiens
MKQVPTLKIDGITIHQSNLSVLKQVGEEMQLTWAQNAITCGFNALEQILQSTAGIYCVGDEVTMADLCLVPQVANAERFKVDLTPYPTISSINKRLLVLEAFQVSHPCRQPDTPTELRA

SEQ ID NO: 8518 - DNA, 966 bp, Homo sapiens
tgattcgtcgagtctcactgagccttagtcgtcggcaggtcccaggcgcgaagtttctcggcctggaggagggggtcgcgcgaagtgccagatgcaggcggggaagctctggccttgaaaggcatcgactacgagacggtgcccatcaatctcataaaggatgggggccaacagttttctaaggacttccaggcactgaatcctatgaagcaggtgccaaccctgaagattgatggaatcaccattcaccagtcaaacctgtctgtcctgaagcaagtgggagaggagatgcagctgacctgggcccagaacgccatcacttgtggctttaacgccctggagcagatcctacagagcacagcgggcatatactgtgtaggagacgaggtgaccatggctgatctgtgcttggtgcctcaggtggcaaatgctgaaagattcaaggtggatctcaccccctaccctaccatcagctccatcaacaagaggctgctggtcttggaggccttccaggtgtctcacccctgccggcagccagatacacccactgagctgagggcctagctcccaaatcctgccccgttggcacagggccacaggagcagaagctgggtgggctgaagaggcctggaaacgagagtcttaattgaggagatgggagactcgaactctagccctggatctgccttcctgctgaaacttgttccacctcagtcccctcatctgtcacacgcatgtggggtggagtagggagatgcggggagcagggtgggcaggaatactgttatctatgtgacggggcagtcgtgaggctgagatgagaatgcggattaaaatgcctggcgtgctcaccgtaacaccacggggaaggctgtgtgccttttctcatccgcttttgttgtgtgtgactccaaagaatgcccgcgctgaaatttggcgtgaattaaactgaagcccaggcctcta

SEQ ID NO: 8519 - protein, 119 aa, Homo sapiens; identical to SEQ ID NO: 8517

SEQ ID NO: 8520 - DNA, 551 bp, Homo sapiens
actgagccttagtcgtcggcaggtcccaggcgcgaagtttctcggcctggaggagggggtcgcgcgaagtgccagatgcaggcggggaagcccatcctctattcctatttccgaagctcctgctcatggagagttcgaattgctctggccttgaaaggcatcgactacgagacggtgcccatcaatctcataaaggatgggggccaacaggtaagaaggctgtgcccagaccacaatgtgggaattggaggccttgaacaggcaccaggcaggggaaaaaggggaggctctgccccagagaagtgaacctgtgtcttgtggactatcactgcaggaggctgctggctctcccttgtgggacaaggtggcaaggtgtgcagtagcaggaggcctgggaagggcccaggtccagactgtgtaccctagcctgggctctccagtgcctgaccctgggagggtgggtggctagtgggtccccaccccatactgggccctctggatggctgactagggtaggagctgccttggtggccacggtgtgagatgcaggg

SEQ ID NO: 8521 - protein, 76 aa, Homo sapiens
MQAGKPILYSYFRSSCSWRVRIALALKGIDYETVPINLIKDGGQQVRRLCPDHNVGIGGLEQAPGRGKRGGSAPEK

SEQ ID NO: 8522 - DNA, 1425 bp, Homo sapiens
ccgggagggttgggccagaggaggcggtcctggtagggagtgcgtagcagggtggagtcgctgtccggtcgcgcttcacttctgctccgccctccctgctccccataacagacccctccctccactaaggcttccaaacgtcgccccaagcctcccaatttctcgcagcccttcatgctcttctcttggccctagcaggagtggtcaccagcagtccctgtcccttggcaccaggagtccctgtagcctggctaggtaaggaaagggagttgcatctccaaataaggaagatccagttgtggccacccaattcctcctcttcgaaagacactttctgcccatcacctgctttctgtgccaggaccatctttactttctccacaaaagcccatcctctattcctatttccgaagctcctgctcatggagagttcgaattgctctggccttgaaaggcatcgactacgagacggtgcccatcaatctcataaaggatgggggccaacagttttctaaggacttccaggcactgaatcctatgaagcaggtgccaaccctgaagattgatggaatcaccattcaccagtcactggccatcattgagtatctagaggagatgcgtcccactccgcgacttctgcctcaggacccaaagaagagggccagcgtgcgtatgatttctgacctcatcgctggtggcatccagcccctgcagaacctgtctgtcctgaagcaagtgggagaggagatgcagctgacctgggcccagaacgccatcacttgtggctttaacgccctggagcagatcctacagagcacagcgggcatatactgtgtaggagacgaggtgaccatggctgatctgtgcttggtgcctcaggtggcaaatgctgaaagattcaaggtggatctcaccccctaccctaccatcagctccatcaacaagaggctgctggtcttggaggccttccaggtgtctcacccctgccggcagccagatacacccactgagctgagggcctagctcccaaatcctgccccgttggcacagggccacaggagcagaagctgggtgggctgaagaggcctggaaacgagagtcttaattgaggagatgggagactcgaactctagccctggatctgccttcctgctgaaacttgttccacctcagtcccctcatctgtcacacgcatgtggggtggagtagggagatgcggggagcagggtgggcaggaatactgttatctatgtgacggggcagtcgtgaggctgagatgagaatgcggattaaaatgcctggcgtgctcaccgtaacaccacggggaaggctgtgtgccttttctcatccgcttttgttgtgtgtgactccaaagaatgcccgcgctgaaatttggcgtgaattaaactgaagcccaggcctcta

SEQ ID NO: 8523 - protein, 161 aa, Homo sapiens; identical to SEQ ID NO: 964

SEQ ID NO: 8524 - DNA, 5536 bp, Homo sapiens
tctagtggtcaccagcagtccctgtcccttggcaccaggagtccctgtagcctggctaggtaaggaaagggagttgcatctccaaataaggaagatccagttgtggccacccaattcctcctcttcgaaagacactttctgcccatcacctgctttctgtgccaggaccatctttactttctccacaaaaggtaccttcaggacaggctgggactgctgggcttgggaaccatcttggaagggcctaggttcccacttacacccttgccatctagcagactgagttggtagtacagggatggcaatagcaagttcagagagcagcttaatatgctaggggtggcagaggggagagggagctttggtgaaatgtctatagtcagaggggtagtaaacagggcatctgagaagttctttcaagttctcccctatccatagggatacacatgttttggtgggaagattcatgagtgctaatcactggcgagtctttcctgggttccactttgaaatgctggctcccgaagaagtaccagagaaattaactttgagccccttaaaccttggagtagagatcgcacacccagctgcccccaagggcccaaaggtaacaaaaatgagaaaagtgggccagatatgggccatggcagacctgagagcgcatacgctggttgatgggggccattagtctgttcccatcaattgctgctatttaggaacccaaatctgtctccagatttttttaaagaaaaaaaacaaacaggtgttgtatataaaatatcatgatttttatttttattttattttattatttatttattttgagatggagtcttgctctgtcccccaggctggagggcagtgacacgatcttggctcactgtatcctccgcctcctgggttcaagcaattctcatacctcagcctcccaagtaggtgtgattacagatgcacaccaccacacctggctaatttttgtttagccatgttgtttcgccatgttggccaggctggtctcgaactcctgacctcaggtgatctgctggcctcagcctcccaaagtgctgggattacaggcatgacccaccatactagaatgaaatgtcctgatttttaaacattggcaactacttgaaacattttaaactactgtgttgagcaaacagaaattctgagggccagatagggccccagtgagctgccagcttttgacctcacctttggggtgagtgagcatatctgccagctgtttttatggggacagccgagagcccggaggactgctgggaggtggggttgaaggagatatgtaccaaagcgtcaaaaaattagaattccttgtcttgctgcattgctagaggatgccctgccatcattttagggcaacctttgttttacaaatgagggagccgaagatttaaaaaggcagaggtttgtccaaggtcatgcagagctggttcctgcaccaggtccagactccagatgccagctcccagcccgctccaccactcaaaatactgcatcaaaaccaggccacgctctgttggggggacaccaaacctggccccagcaggagcgtaagaaacttcctgcgagttggaaaaaaatgccttttttttttttttttttttgagacgcagtctcgctctggagtgcagtggtgcgatctcggcccactgtgacctccacctctcaggttcaagctattctcttacctcaacctcctgagtagctgagattacaggcacccactaccacacctggctgatttttttttgtattttcagtagagacagggtttcaccatgttggccaggctggtctcaaactcctcacctcaaatgatccacccaccttggctcccgaagtgctgggattacaggcgtgagccactgtgcctggccagaaatgccctttctgaccagagtcaaagttcccccaatgcctgggtagcccagcttccccattggctcctgaaatccacccctttaggtttcctttccctgctcagaagctgtgccagaggggacatttcctgggaggctgagggtcaccacgataccatgacagagtctggcaaggtatggaaggcactctcaggctagctgcccctttgggggcctcttggacctcaggagctcaaaccagcataattttggagccaagggacctcatgagcctctcagagagcttggagtctgccctgatttgcacagatgcaggcctgagagaggaggcctggcaggacaggaagaaatggttgactcctcccaagctggagcccacccagcatgggttaacacgcgccttcatcctctctctcctcagcccatcctctattcctatttccgaagctcctgctcatggagagttcgaattggtaagagatgtgcctcctccaggatgagtgctggagtggggtggactggggcggataagcccgggtgcaaagctggcctgggatggaagggttgctctgtcagagaggacctcacccccagcaaccagcatcccccggctcctagaacccccatccctgcatggcatctccaccccggaaacacagggtgagggtgggaggaagggggttgttttttcccttgggactgacacttctcccaacactgctctccaaagccccttggcaaccatgtttaaagcagggtcacaaaatccacatgcccctggtaactggcaggggaacagctggcccttctcagttcttattttatttgaactggcaaagcaaacagaacgggccagcatcagcctcggaggcttcagaaaagcagaaacaagggccctgtggctagtccttgtttgacccttccctcccttggcttaacacagcctttggcaaaggtcataaccaaagcagcctgtactgaggaaaagctctgtgctgagtgcttttgtgtgcctgattccatttaaacctcagcaaccctaggagggaggtactattattactgtccccattgtatagaggaggaagctgaggcacaaaaaacaggcaacattcagtaacttgcccaagatctttcagttactaagaggcagaactggaatttgaaccaggtagtctggctccagaggcccattaagttacttgcccagggccacacagttagcaaatgactgtgatgaaatttgaacccaagaagcttgcctccagagtgtggaggcaaagccatcctccgtgacccctcctccatcccatagtcacttggtatttgctgggatcagtaagcaagagcactgggtgccaggagaaactttcctccaagaagatgaacccatccctgggcgccagtacctctgccctggctgagccagaagccggagcaatataggtgctgtctgtacggcctgtgtgctttggccttccctcctccaggtgtctcctccagccccaaacactgtcactccccagactggagctgaccaacactaggaggagcctggtattgcccaggctctccacaccatgacatgtctggtcctcctcccctcattcctttgcccttccctgagattggccatcaccatacttgaatgcccaagtgtgtgtaatacacacatgcatgcacacgcacgcagtcttctccactagtgttgacccacccaagttttttttaccctcagcttgccaggggaaattatcaaaagggatggagaggaaatctggtgactggagtcacggcaaatgctctgaggccaccaaagagcctgatgcctgtctagaatctctagtaaacagccctgagaacagagagaatagattggaagagattcttctccaacagaacaagagtgccatctgtctgtgtgtgctgtgtgtggccacctgagctccttcccttggcccttagttgccttcttgagggagtaattgcatgtcttcaaccaagacactggtcaccactgtttaaggccctgggggggcagagttaaacacaacacagccttgctgaactccaggagcccacagagtgccagggcatacacctttatcaccatccagggggcatgagggccccattgggggggtccagatcttgaggtctctaagagttcaggggtgagtgaggcagagcatcgtgcatctggggtagggagcacgtggtgacaaggaaagctgagagaaggggatagtgccacggtgagccttgaccacccagaagtgttagagaagcctccccctctttggccttaatgtcaccttagaagggctctttcctttaagagtacggcgagaggctgttctttgactccgctatgtgcggtctctcctagctctggccttgaaaggcatcgactacgagacggtgcccatcaatctcataaaggatgggggccaacagttttctaaggacttccaggcactgaatcctatgaagcaggtgccaaccctgaagattgatggaatcaccattcaccagtcagtgagtgcagggcctgggggagggccctcatgagagcagtgccctgaatgagagcgcctgacatctcttcctcgcctgtgtacagtcaaggtgcctagcacataggagaggctcaatacaagactcgtggggagggtgcgaggttatttaggaaaataagggaagattcaagcacatggagaaccaagttctgcatgataaggtccaaaaaggcttatagggcttgagctgagcagaagcaggggggaagaggtgtagtgatggtgctggaagaggagaaggaggagtttgctggccctgtcccctctggtccaggggtcctgggccctctccctgcctcactgctcccctctggacagctggccatcattgagtatctagaggagatgcgtcccactccgcgacttctgcctcaggacccaaagaagagggccagcgtgcgtatgatttctgacctcatcgctggtggcatccagcccctgcagaacctgtctgtcctgaagcaagtgggagaggagatgcagctgacctgggcccagaacgccatcacttgtggctttaacgccctggagcagatcctacagagcacagcgggcatatactgtgtaggagacgaggtgaccatggctgatctgtgcttggtgcctcaggtggcaaatgctgaaagattcaaggtggatctcaccccctaccctaccatcagctccatcaacaagaggctgctggtcttggaggccttccaggtgtctcacccctgccggcagccagatacacccactgagctgagggcctagctcccaaatcctgccccgttggcacagggccacaggagcagaagctgggtgggctgaagaggcctggaaacgagagtcttaattgaggagatgggagactcgaactctagccctggatctgccttcctgctgaaacttgttccacctcagtcccctcatctgtcacacgcatgtggggtggagtagggagatgcggggagcagggtgggcaggaatactgttatctatgtgacggggcagtcgtgaggctgagatgagaatgcggattaaaatgcctggcgtgctcaccgtaacacc

SEQ ID NO: 8525 - protein, 177 aa, Homo sapiens
MVLEEEKEEFAGPVPSGPGVLGPLPASLLPSGQLAIIEYLEEMRPTPRLLPQDPKKRASVRMISDLIAGGIQPLQNLSVLKQVGEEMQLTWAQNAITCGFNALEQILQSTAGIYCVGDEVTMADLCLVPQVANAERFKVDLTPYPTISSINKRLLVLEAFQVSHPCRQPDTPTELRA

SEQ ID NO: 8526 - DNA, 5641 bp, Homo sapiens
tctagtggtcaccagcagtccctgtcccttggcaccaggagtccctgtagcctggctaggtaaggaaagggagttgcatctccaaataaggaagatccagttgtggccacccaattcctcctcttcgaaagacactttctgcccatcacctgctttctgtgccaggaccatctttactttctccacaaaaggtaccttcaggacaggctgggactgctgggcttgggaaccatcttggaagggcctaggttcccacttacacccttgccatctagcagactgagttggtagtacagggatggcaatagcaagttcagagagcagcttaatatgctaggggtggcagaggggagagggagctttggtgaaatgtctatagtcagaggggtagtaaacagggcatctgagaagttctttcaagttctcccctatccatagggatacacatgttttggtgggaagattcatgagtgctaatcactggcgagtctttcctgggttccactttgaaatgctggctcccgaagaagtaccagagaaattaactttgagccccttaaaccttggagtagagatcgcacacccagctgcccccaagggcccaaaggtaacaaaaatgagaaaagtgggccagatatgggccatggcagacctgagagcgcatacgctggttgatgggggccattagtctgttcccatcaattgctgctatttaggaacccaaatctgtctccagatttttttaaagaaaaaaaacaaacaggtgttgtatataaaatatcatgatttttatttttattttattttattatttatttattttgagatggagtcttgctctgtcccccaggctggagggcagtgacacgatcttggctcactgtatcctccgcctcctgggttcaagcaattctcatacctcagcctcccaagtaggtgtgattacagatgcacaccaccacacctggctaatttttgtttagccatgttgtttcgccatgttggccaggctggtctcgaactcctgacctcaggtgatctgctggcctcagcctcccaaagtgctgggattacaggcatgacccaccatactagaatgaaatgtcctgatttttaaacattggcaactacttgaaacattttaaactactgtgttgagcaaacagaaattctgagggccagatagggccccagtgagctgccagcttttgacctcacctttggggtgagtgagcatatctgccagctgtttttatggggacagccgagagcccggaggactgctgggaggtggggttgaaggagatatgtaccaaagcgtcaaaaaattagaattccttgtcttgctgcattgctagaggatgccctgccatcattttagggcaacctttgttttacaaatgagggagccgaagatttaaaaaggcagaggtttgtccaaggtcatgcagagctggttcctgcaccaggtccagactccagatgccagctcccagcccgctccaccactcaaaatactgcatcaaaaccaggccacgctctgttggggggacaccaaacctggccccagcaggagcgtaagaaacttcctgcgagttggaaaaaaatgccttttttttttttttttttttgagacgcagtctcgctctggagtgcagtggtgcgatctcggcccactgtgacctccacctctcaggttcaagctattctcttacctcaacctcctgagtagctgagattacaggcacccactaccacacctggctgatttttttttgtattttcagtagagacagggtttcaccatgttggccaggctggtctcaaactcctcacctcaaatgatccacccaccttggctcccgaagtgctgggattacaggcgtgagccactgtgcctggccagaaatgccctttctgaccagagtcaaagttcccccaatgcctgggtagcccagcttccccattggctcctgaaatccacccctttaggtttcctttccctgctcagaagctgtgccagaggggacatttcctgggaggctgagggtcaccacgataccatgacagagtctggcaaggtatggaaggcactctcaggctagctgcccctttgggggcctcttggacctcaggagctcaaaccagcataattttggagccaagggacctcatgagcctctcagagagcttggagtctgccctgatttgcacagatgcaggcctgagagaggaggcctggcaggacaggaagaaatggttgactcctcccaagctggagcccacccagcatgggttaacacgcgccttcatcctctctctcctcagcccatcctctattcctatttccgaagctcctgctcatggagagttcgaattggtaagagatgtgcctcctccaggatgagtgctggagtggggtggactggggcggataagcccgggtgcaaagctggcctgggatggaagggttgctctgtcagagaggacctcacccccagcaaccagcatcccccggctcctagaacccccatccctgcatggcatctccaccccggaaacacagggtgagggtgggaggaagggggttgttttttcccttgggactgacacttctcccaacactgctctccaaagccccttggcaaccatgtttaaagcagggtcacaaaatccacatgcccctggtaactggcaggggaacagctggcccttctcagttcttattttatttgaactggcaaagcaaacagaacgggccagcatcagcctcggaggcttcagaaaagcagaaacaagggccctgtggctagtccttgtttgacccttccctcccttggcttaacacagcctttggcaaaggtcataaccaaagcagcctgtactgaggaaaagctctgtgctgagtgcttttgtgtgcctgattccatttaaacctcagcaaccctaggagggaggtactattattactgtccccattgtatagaggaggaagctgaggcacaaaaaacaggcaacattcagtaacttgcccaagatctttcagttactaagaggcagaactggaatttgaaccaggtagtctggctccagaggcccattaagttacttgcccagggccacacagttagcaaatgactgtgatgaaatttgaacccaagaagcttgcctccagagtgtggaggcaaagccatcctccgtgacccctcctccatcccatagtcacttggtatttgctgggatcagtaagcaagagcactgggtgccaggagaaactttcctccaagaagatgaacccatccctgggcgccagtacctctgccctggctgagccagaagccggagcaatataggtgctgtctgtacggcctgtgtgctttggccttccctcctccaggtgtctcctccagccccaaacactgtcactccccagactggagctgaccaacactaggaggagcctggtattgcccaggctctccacaccatgacatgtctggtcctcctcccctcattcctttgcccttccctgagattggccatcaccatacttgaatgcccaagtgtgtgtaatacacacatgcatgcacacgcacgcagtcttctccactagtgttgacccacccaagttttttttaccctcagcttgccaggggaaattatcaaaagggatggagaggaaatctggtgactggagtcacggcaaatgctctgaggccaccaaagagcctgatgcctgtctagaatctctagtaaacagccctgagaacagagagaatagattggaagagattcttctccaacagaacaagagtgccatctgtctgtgtgtgctgtgtgtggccacctgagctccttcccttggcccttagttgccttcttgagggagtaattgcatgtcttcaaccaagacactggtcaccactgtttaaggccctgggggggcagagttaaacacaacacagccttgctgaactccaggagcccacagagtgccagggcatacacctttatcaccatccagggggcatgagggccccattgggggggtccagatcttgaggtctctaagagttcaggggtgagtgaggcagagcatcgtgcatctggggtagggagcacgtggtgacaaggaaagctgagagaaggggatagtgccacggtgagccttgaccacccagaagtgttagagaagcctccccctctttggccttaatgtcaccttagaagggctctttcctttaagagtacggcgagaggctgttctttgactccgctatgtgcggtctctcctagctctggccttgaaaggcatcgactacgagacggtgcccatcaatctcataaaggatgggggccaacagttttctaaggacttccaggcactgaatcctatgaagcaggtgccaaccctgaagattgatggaatcaccattcaccagtcagtgagtgcagggcctgggggagggccctcatgagagcagtgccctgaatgagagcgcctgacatctcttcctcgcctgtgtacagtcaaggtgcctagcacataggagaggctcaatacaagactcgtggggagggtgcgaggttatttaggaaaataagggaagattcaagcacatggagaaccaagttctgcatgataaggtccaaaaaggcttatagggcttgagctgagcagaagcaggggggaagaggtgtagtgatggtgctggaagaggagaaggaggagtttgctggccctgtcccctctggtccaggggtcctgggccctctccctgcctcactgctcccctctggacagctggccatcattgagtatctagaggagatgcgtcccactccgcgacttctgcctcaggacccaaagaagagggccagcgtgcgtatgatttctgacctcatcgctggtggcatccagcccctgcagaacctgtctgtcctgaagcaagtgggagaggagatgcagctgacctgggcccagaacgccatcacttgtggctttaacgccctggagcagatcctacagagcacagcgggcatatactgtgtaggagacgaggtgaccatggctgatctgtgcttggtgcctcaggtggcaaatgctgaaagattcaaggtggatctcaccccctaccctaccatcagctccatcaacaagaggctgctggtcttggaggccttccaggtgtctcacccctgccggcagccagatacacccactgagctgagggcctagctcccaaatcctgccccgttggcacagggccacaggagcagaagctgggtgggctgaagaggcctggaaacgagagtcttaattgaggagatgggagactcgaactctagccctggatctgccttcctgctgaaacttgttccacctcagtcccctcatctgtcacacgcatgtggggtggagtagggagatgcggggagcagggtgggcaggaatactgttatctatgtgacggggcagtcgtgaggctgagatgagaatgcggattaaaatgcctggcgtgctcaccgtaacaccacggggaaggctgtgtgccttttctcatccgcttttgttgtgtgtgactccaaagaatgcccgcgctgaaatttggcgtgaattaaactgaagcccaggcctcta

SEQ ID NO: 8527 - protein, 177 aa, Homo sapiens; identical to SEQ ID NO: 8525

SEQ ID NO: 8528 - DNA, 2344 bp, Homo sapiens
acaactaagtattaaaaacagttcatctgtgccagcttctactctgaatgaggaaatagccccagaaaggtggagtgacttaggagtcccacaggtaggtcataacaaagtggggactaagtcagaatccctgcatgcctatgccctctacccgcatgtcgctttaacaaaggatgttggagcagacagacatctccattttataatgaggaaacagagggaaaatggctccaggggtgccaagatggagccaggctggaaatctctggaagccggtcttgtggacctccctcatcccagccccaccctctttcacactccctctcctcacaagggaccatgcaagggagaagtgagggagacaggcctcgagttgtgggcacacctgccacagccatggccgcgtcctgtgtcacatgaatagggattcttgcacatctctgacagaatcacgtggctttttgaggccactggggcagcctgcaaaggtggctgctgggatggctacctccctccaacctcagggcccttggttgaaggaaggggctcatggagcctgggggagaagggatagacatccagccaggggcagatgggaagtgaacttccctgagggggtttggcgaaggggtagcccccacccagctgtcagcgcaatcacagattttctttgggctgcacagaacctgtctgtcctgaagcaagtgggagaggagatgcagctgacctgggcccagaacgccatcacttgtggctttaacggtgagtcctcacctctgtgagctgccccacagtggcctcttagaggtatggccctcgcacacaggggcctgggtatctgaaccagcctcccaggctgctttgggcctgacagttgcatggatgagggcaggactggggaggcaatgggctgggtgggcatccagaccttagctccagcacttctgggaacctcggtccctgagcccacagcccttcatagctggatggcccaacttcagcttcactgcctactccagctgggaaaccaaggccagcacagcgccagccatcagagtgagagctgtcaccgtggccagtggcagggcttgtccactcgagtggggaaatggtgattgtctgtgcggagcctcaggaaacagcagctcatccctaacagctctctcgagacctggctgccacattctcaccagcagccatgcccagtctgtcactcagttgggcgcccatttcataactatggaggccaaggcccagaaagctttgtgtcccctccctgcgcccagaataagatgtttatgtggcctccccacagccctggagcagatcctacagagcacagcgggcatatactgtgtaggagacgaggtaagctgtccccagacctccccaggcccagccacagtggctgcctccctcatgctgacctccctcaagctcagagcttcctgagaaggcgtctgcagggggatctctgtgccatggggcactcctcagctcactcccactaaaccgtcttaagagggagttactcaaggtagaagactggctgtgagaggatgaggcgggccagcatcagttgagggattgtgctagatgatgtctgcgcagtcaaggcaatccatcttctctggccctctcaacccacagagttggttgtcagggcaactggagcatggcctgggagggcacttcagctccgggggacagactcatgcaggcctagggcagacaagaattggaggtgggatgggtgaaagagccgaagcagattgttggtacccccagtagagtcgcagtggacacacccagtccagccactgactctggggtatgcaccctgatgggaacccaccgggacctctttcaggtgaccatggctgatctgtgcttggtgcctcaggtggcaaatgctgaaagattcaaggtggatctcaccccctaccctaccatcagctccatcaacaagaggctgctggtcttggaggccttccaggtgtctcacccctgccggcagccagatacacccactgagctgagggcctagctcccaaatcctgccccgttggcacagggccacaggagcagaagctgggtgggctgaagaggcctggaaacgagagtcttaattgaggagatgggagactcgaactctagccctggatctgccttcctgctgaaacttgttccacctcagtcccctcatctgtcacacgcatgtggggtggagtagggagatgcggggagcagggtgggcaggaatactgttatctatgtgacggggcagtcgtgaggctgagatgagaatgcggattaaaatgcctggcgtgctcaccgtaacacc

SEQ ID NO: 8529 - protein, 67 aa, Homo sapiens
MGTHRDLFQVTMADLCLVPQVANAERFKVDLTPYPTISSINKRLLVLEAFQVSHPCRQPDTPTELRA

SEQ ID NO: 8530 - DNA, 2449 bp, Homo sapiens
acaactaagtattaaaaacagttcatctgtgccagcttctactctgaatgaggaaatagccccagaaaggtggagtgacttaggagtcccacaggtaggtcataacaaagtggggactaagtcagaatccctgcatgcctatgccctctacccgcatgtcgctttaacaaaggatgttggagcagacagacatctccattttataatgaggaaacagagggaaaatggctccaggggtgccaagatggagccaggctggaaatctctggaagccggtcttgtggacctccctcatcccagccccaccctctttcacactccctctcctcacaagggaccatgcaagggagaagtgagggagacaggcctcgagttgtgggcacacctgccacagccatggccgcgtcctgtgtcacatgaatagggattcttgcacatctctgacagaatcacgtggctttttgaggccactggggcagcctgcaaaggtggctgctgggatggctacctccctccaacctcagggcccttggttgaaggaaggggctcatggagcctgggggagaagggatagacatccagccaggggcagatgggaagtgaacttccctgagggggtttggcgaaggggtagcccccacccagctgtcagcgcaatcacagattttctttgggctgcacagaacctgtctgtcctgaagcaagtgggagaggagatgcagctgacctgggcccagaacgccatcacttgtggctttaacggtgagtcctcacctctgtgagctgccccacagtggcctcttagaggtatggccctcgcacacaggggcctgggtatctgaaccagcctcccaggctgctttgggcctgacagttgcatggatgagggcaggactggggaggcaatgggctgggtgggcatccagaccttagctccagcacttctgggaacctcggtccctgagcccacagcccttcatagctggatggcccaacttcagcttcactgcctactccagctgggaaaccaaggccagcacagcgccagccatcagagtgagagctgtcaccgtggccagtggcagggcttgtccactcgagtggggaaatggtgattgtctgtgcggagcctcaggaaacagcagctcatccctaacagctctctcgagacctggctgccacattctcaccagcagccatgcccagtctgtcactcagttgggcgcccatttcataactatggaggccaaggcccagaaagctttgtgtcccctccctgcgcccagaataagatgtttatgtggcctccccacagccctggagcagatcctacagagcacagcgggcatatactgtgtaggagacgaggtaagctgtccccagacctccccaggcccagccacagtggctgcctccctcatgctgacctccctcaagctcagagcttcctgagaaggcgtctgcagggggatctctgtgccatggggcactcctcagctcactcccactaaaccgtcttaagagggagttactcaaggtagaagactggctgtgagaggatgaggcgggccagcatcagttgagggattgtgctagatgatgtctgcgcagtcaaggcaatccatcttctctggccctctcaacccacagagttggttgtcagggcaactggagcatggcctgggagggcacttcagctccgggggacagactcatgcaggcctagggcagacaagaattggaggtgggatgggtgaaagagccgaagcagattgttggtacccccagtagagtcgcagtggacacacccagtccagccactgactctggggtatgcaccctgatgggaacccaccgggacctctttcaggtgaccatggctgatctgtgcttggtgcctcaggtggcaaatgctgaaagattcaaggtggatctcaccccctaccctaccatcagctccatcaacaagaggctgctggtcttggaggccttccaggtgtctcacccctgccggcagccagatacacccactgagctgagggcctagctcccaaatcctgccccgttggcacagggccacaggagcagaagctgggtgggctgaagaggcctggaaacgagagtcttaattgaggagatgggagactcgaactctagccctggatctgccttcctgctgaaacttgttccacctcagtcccctcatctgtcacacgcatgtggggtggagtagggagatgcggggagcagggtgggcaggaatactgttatctatgtgacggggcagtcgtgaggctgagatgagaatgcggattaaaatgcctggcgtgctcaccgtaacaccacggggaaggctgtgtgccttttctcatccgcttttgttgtgtgtgactccaaagaatgcccgcgctgaaatttggcgtgaattaaactgaagcccaggcctcta

SEQ ID NO: 8531 - protein, 67 aa, Homo sapiens; identical to SEQ ID NO: 8529

SEQ ID NO: 8532 - DNA, 3099 bp, Homo sapiens
gcttctctagggagtgtcaggcgcacacagggttaagttagttccctccctggtaggagggagaggaggaggaggggaaaagcagcatactgtctcaggctgggtaccttgtagttagttgtacgttcgaaacctgtcgccgtcacttgcgcgtttggcattatccattgtcaccgcggaggaacgagcgctcgagatatcatcagtgcccgcaaatctccgcgccaaggcgctgagctactcctttccgaggtgcgcctctggtcctccgtccctggtgcccagcagcggcgaggcggcatctccgctcccgccgccgtgtccaccgagccctgggatcagggtggcagttctcaacgatgggcaggagggacctcggcggcgacccctaaaacaataccatgccccgggatccccgctgctgccgcgccagcgtcttccctttccacctccctgaccctgtcggattcggatgagcccattgcaaggagaagacgcagccgtcagattgcagattgagcttaaccaagaagttcgtaggctaatcaaggctggcttgacctacaaaagaagaagagagttctgcctgcccacttgggcttgtgttgacacggctgataacttgccatcacctgttgccagtgtggaaaaattctccctgttgaattttttgcacatggaggacagcagcaaagagggcaacacaggctgataagaccagagacagcagggagattattttaccatacgccctcaggacgttccctctagctggagttctggacttcaacagaaccccatccagtcattttgattttgctgtttattttttttttctttttctttttcccaccacattgtattttatttccgtacttcagaaatgggcctacagaccacaaagtggcccagccatggggcttttttcctgaagtcttggcttatcatttccctggggctctactcacaggtgtccaaactcctggcctgccctagtgtgtgccgctgcgacaggaactttgtctactgtaatgagcgaagcttgacctcagtgcctcttgggatcccggagggcgtaactgtactctacctccacaacaaccaaattaataatgctggatttcctgcagaactgcacaatgtacagtcggtgcacacggtctacctgtatggcaaccaactggacgaattccccatgaaccttcccaagaatgtcagagttctccatttgcaggaaaacaatattcagaccatttcacgggctgctcttgcccagctcttgaagcttgaagagctgcacctggatgacaactccatatccacagtgggggtggaagacggggccttccgggaggctattagcctcaaattgttgtttttgtctaagaatcacctgagcagtgtgcctgttgggcttcctgtggacttgcaagagctgagagtggatgaaaatcgaattgctgtcatatccgacatggccttccagaatctcacgagcttggagcgtcttattgtggacgggaacctcctgaccaacaagggtatcgccgagggcaccttcagccatctcaccaagctcaaggaattttcaattgtacgtaattcgctgtcccaccctcctcccgatctcccaggtacgcatctgatcaggctctatttgcaggacaaccagataaaccacattcctttgacagccttctcaaatctgcgtaagctggaacggctggatatatccaacaaccaactgcggatgctgactcaaggggtttttgataatctctccaacctgaagcagctcactgctcggaataacccttggttttgtgactgcagtattaaatgggtcacagaatggctcaaatatatcccttcatctctcaacgtgcggggtttcatgtgccaaggtcctgaacaagtccgggggatggccgtcagggaattaaatatgaatcttttgtcctgtcccaccacgacccccggcctgcctctcttcaccccagccccaagtacagcttctccgaccactcagcctcccaccctctctattccaaaccctagcagaagctacacgcctccaactcctaccacatcgaaacttcccacgattcctgactgggatggcagagaaagagtgaccccacctatttctgaacggatccagctctctatccattttgtgaatgatacttccattcaagtcagctggctctctctcttcaccgtgatggcatacaaactcacatgggtgaaaatgggccacagtttagtagggggcatcgttcaggagcgcatagtcagcggtgagaagcaacacctgagcctggttaacttagagccccgatccacctatcggatttgtttagtgccactggatgcttttaactaccgcgcggtagaagacaccatttgttcagaggccaccacccatgcctcctatctgaacaacggcagcaacacagcgtccagccatgagcagacgacgtcccacagcatgggctccccctttctgctggcgggcttgatcgggggcgcggtgatatttgtgctggtggtcttgctcagcgtcttttgctggcatatgcacaaaaaggggcgctacacctcccagaagtggaaatacaaccggggccggcggaaagatgattattgcgaggcaggcaccaagaaggacaactccatcctggagatgacagaaaccagttttcagatcgtctccttaaataacgatcaactccttaaaggagatttcagactgcagcccatttacaccccaaatgggggcattaattacacagactgccatatccccaacaacatgcgatactgcaacagcagcgtgccagacctggagcactgccatacgtgacagccagaggcccagcgttatcaaggcggacaattagactcttgagaacacactcgtgtgtgcacataaagacacgcagattacatttgataaatgttacacagatgcatttgtgcatttgaatactctgtaatttatacggtgtactatataatgggatttaaaaaaagtgctatcttttctatttcaagttaattacaaacagttttgtaactctttgctttttaaatctt

SEQ ID NO: 8533 - protein, 79 aa, Homo sapiens
MSPLQGEDAAVRLQIELNQEVRRLIKAGLTYKRRREFCLPTWACVDTADNLPSPVASVEKFSLLNFLHMEDSSKEGNTG

SEQ ID NO: 8534 - DNA, 7294 bp, Homo sapiens
gcttctctagggagtgtcaggcgcacacagggttaagttagttccctccctggtaggagggagaggaggaggaggggaaaagcagcatactgtctcaggctgggtaccttgtagttagttgtacgttcgaaacctgtcgccgtcacttgcgcgtttggcattatccattgtcaccgcggaggaacgagcgctcgagatatcatcagtgcccgcaaatctccgcgccaaggcgctgagctactcctttccgaggtgcgcctctggtcctccgtccctggtgcccagcagcggcgaggcggcatctccgctcccgccgccgtgtccaccgagccctgggatcagggtggcagttctcaacgatgggcaggagggacctcggcggcgacccctaaaacaataccatgccccgggatccccgctgctgccgcgccagcgtcttccctttccacctccctgaccctgtcggattcggatgagcccattgcaaggagaagacgcagccgtcagattgcagattgagcttaaccaagaagttcgtaggctaatcaaggctggcttgacctacaaaagaagaagagagttctgcctgcccacttgggcttgtgttgacacggctgataacttgccatcacctgttgccagtgtggaaaaattctccctgttgaattttttgcacatggaggacagcagcaaagagggcaacacaggctgataagaccagagacagcagggagattattttaccatacgccctcaggacgttccctctagctggagttctggacttcaacagaaccccatccagtcattttgattttgctgtttattttttttttctttttctttttcccaccacattgtattttatttccgtacttcagaaatgggcctacagaccacaaagtggcccagccatggggcttttttcctgaagtcttggcttatcatttccctggggctctactcacaggtgtccaaactcctggcctgccctagtgtgtgccgctgcgacaggaactttgtctactgtaatgagcgaagcttgacctcagtgcctcttgggatcccggagggcgtaactgtactctacctccacaacaaccaaattaataatgctggatttcctgcagaactgcacaatgtacagtcggtgcacacggtctacctgtatggcaaccaactggacgaattccccatgaaccttcccaagaatgtcagagttctccatttgcaggaaaacaatattcagaccatttcacgggctgctcttgcccagctcttgaagcttgaagagctgcacctggatgacaactccatatccacagtgggggtggaagacggggccttccgggaggctattagcctcaaattgttgtttttgtctaagaatcacctgagcagtgtgcctgttgggcttcctgtggacttgcaagagctgagagtggatgaaaatcgaattgctgtcatatccgacatggccttccagaatctcacgagcttggagcgtcttattgtggacgggaacctcctgaccaacaagggtatcgccgagggcaccttcagccatctcaccaagctcaaggaattttcaattgtacgtaattcgctgtcccaccctcctcccgatctcccaggtacgcatctgatcaggctctatttgcaggacaaccagataaaccacattcctttgacagccttctcaaatctgcgtaagctggaacggctggatatatccaacaaccaactgcggatgctgactcaaggggtttttgataatctctccaacctgaagcagctcactgctcggaataacccttggttttgtgactgcagtattaaatgggtcacagaatggctcaaatatatcccttcatctctcaacgtgcggggtttcatgtgccaaggtcctgaacaagtccgggggatggccgtcagggaattaaatatgaatcttttgtcctgtcccaccacgacccccggcctgcctctcttcaccccagccccaagtacagcttctccgaccactcagcctcccaccctctctattccaaaccctagcagaagctacacgcctccaactcctaccacatcgaaacttcccacgattcctgactgggatggcagagaaagagtgaccccacctatttctgaacggatccagctctctatccattttgtgaatgatacttccattcaagtcagctggctctctctcttcaccgtgatggcatacaaactcacatgggtgaaaatgggccacagtttagtagggggcatcgttcaggagcgcatagtcagcggtgagaagcaacacctgagcctggttaacttagagccccgatccacctatcggatttgtttagtgccactggatgcttttaactaccgcgcggtagaagacaccatttgttcagaggccaccacccatgcctcctatctgaacaacggcagcaacacagcgtccagccatgagcagacgacgtcccacagcatgggctccccctttctgctggcgggcttgatcgggggcgcggtgatatttgtgctggtggtcttgctcagcgtcttttgctggcatatgcacaaaaaggggcgctacacctcccagaagtggaaatacaaccggggccggcggaaagatgattattgcgaggcaggcaccaagaaggacaactccatcctggagatgacagaaaccagttttcagatcgtctccttaaataacgatcaactccttaaaggagatttcagactgcagcccatttacaccccaaatgggggcattaattacacagactgccatatccccaacaacatgcgatactgcaacagcagcgtgccagacctggagcactgccatacgtgacagccagaggcccagcgttatcaaggcggacaattagactcttgagaacacactcgtgtgtgcacataaagacacgcagattacatttgataaatgttacacagatgcatttgtgcatttgaatactctgtaatttatacggtgtactatataatgggatttaaaaaaagtgctatcttttctatttcaagttaattacaaacagttttgtaactctttgctttttaaatcttaaaaaaaaaaaagttgctgaagtactgtacagggttgtacaatgagaacccaatgccaaggcaaaaagaacgagtgatttttccttaggatacacatcaaccactttgctgttgaagctgtcagaataaattcctggtggtcagatgaaagggcagattaaatggactcatcagggtaagaggaataatatgggtaaaacaagaaatggcccgatagtttcacactattcctatacctccaggtccggaagacaggtaaaaaattctataatgtaagaatggaggtagttaccctgatttgaccctgtgtgggaaatgctgaaagcaccaggaggaagccggttcccgtgagataagttaacccggcctgacagaatcaagaaaattgagatgagatttgaaaggacccgaaaatgcaggggttggctttctgactgggaacttaaaaatcactcttcatgcttccctggtcctatgtgataacagagttagagacttgagtctgatttcagtcatcttcagggaccagtctgatgttgtagcaagaagactccctttaaaagtgttactgttcaaatcatatatcaggttgaatcacattcaacagagatatattctagaatacttttttagaagaggctaataaagggaagaattatattgaatggaattatttttgataatgagaattatttgggtagattcactgaggctatgtcaacatgatatttagaccaacaggtgatcaatgtttggaaaatacaacaatgacttatttaaaaattacccttcctgctatttagacaaaaacaactgatcagtggttctgttatgtcagctgactttgttagtatcatgttgaaatagcttgaagtaatatcttttatccccttgcaaattcttgtcttccaatcatctcccatatattttcataattagttgtttatgacacctttgtttttctccctctgttcagtatttcaaggaaaattatggatgccagtcttggctgcacaagatatccattacgtacttatacattttaaaatgagtactaattttcactgctaataattctgtaaggacacatcaaagctggccaaaataatgaattttttttaaaaagcaatacctggtttccaccttggactgactttgatcctgttccacttttgaaattttatttgttccttttccatcgtggatgttcctctactttggcaattgtggagggctaatcaatcttatgttagcaggacaacccatgaaaaacaagtcagagagtgaaggctttttcccctaatcctggcagagcagggcgtagaaaagagaggatgtccgtgcttaattctagatacttttgagacaacaccttcagaaaacacataatttaatctttgccatccttagatagagaagggctatagatcacatacgttatcaaaaactactcccttggaaaaaatatctttcgaaaatcaaatttaaacatttcactctgtgctgcatatttcttttaccattgaccattattatagggacccatgaagtaaatgtcacaatcatcttactagctctctctctctcagcaaaataaaactgtgatgtgtcttctttgtaaaagtttaggtataaaatgctatgcaactttttctttatagtaagagctttattttctttaataatatagcccaacttatatgttttaatctcccttgtccctcagaataagcagaaaatataactgcagctgtatgtcgtagacacaagaattgaaactgtgcagtcagtagagctgaacttagctatgaattaatttaaattaattctaaagtgactctggtttccattttagtctattagctagagggttttggctgttgctttttttaaagttaggtccacacagtgaagggaaaagagtctgtgaaggtgatcagtgtagcagtaagacatctaaaatcaagacaatgacatgggggctttgtgtacttagctggataattcccttctactgtcctcttccccttggctgtgtagataaaattgtgcattcaaatgatggtactttgacttttgagggtttttatttctgttattcacaaaatactcattctcatttatgtatattgtatgtttaacccccagtgggatttctggctgctgaaaccactttgggccaggaagaacaaggatgaagaggttcctgtcatttcttatggggttcacagaattatttggggcttaaatggtacaatggagacagtcatgtgcaatgcttaagatggtctgacagggtcccttttgctggaggtgttcctgaagagattgaacctagtaacaggctttattttcaccttgtgtacaacatggcaaagactgctaagattaaaatccgtctcccatttgttacagcctcacctgcaccaggatagaaagcacgtgatggaatctgtgatgtctaatgtgtcttatgaaaattgccaaacaactgtccctggggattctgctttgattggcatttttagtcatgggaatgtatatttgctgatatatctgctctgtgtttgggcctctcttgctgtcattatgatgtattttgagatgattagtcaagagtcaaggttgcgagtacaggccaagaccatgggaaaaaaagccatgctcactggccaataaagagcttgatgctgcctggccaaatgaggtgactcagatagaatctgatcccattcagagcttggtaaatgtcactgtacagaagacattgaaaaggaagaggcatagtcatgatcaaaaggatatattgacagttatctatagccagggtagttgttaatacctgcttgtttggggagatatgtttgattatagagagactctgggccaccctcaaacaccgtcagatgcattagcagcccactgcatgggacaatcgcaggcagatacgaggaatgtatcccctgcctattttccttgtgtaacaaatggaaaacattctcccctgtgagaaataatgcaatttctaattatctggatgttcgttgaaaatatattagacattctccctgaggttaaaaacaaaaagtacgtgaccagtctggtaagaagtattaatgaagtagctaatattacagcttcattttctactagcacctatcataatggtcttagtcatttcacacaaatcagaacttccttccccaccagggaggacaacatcttcatgctgtgattgaagcatccattcagaacacgaggcaatattgcagtccacagggaatggatgcttcacttgatctccggaccttggctgcagaggccatcgcagcttttgaaaagtgaaggggttaattcccattggtgtctttgcttatagcatttttctctaacctataacaaggagacattacattttactttagaacatgagaatagcagttttgctcatgacttaccattccagctgcatgggaaagcaaagcagaaaacagtgccccaaatggaaaaaagatactcacacagaacaaaacagttcttggtcttgttcttggtcttgtcaaaccttgcctgatgctctttctaaagtcaaaatatgaatgctaagaaggcataacctacatccttctctgatttcttcagcagggtcaaaagacagttactagcaatggggaatgcttgtcactgtggagaaagagttttgtatatgtctgataccgttgttataacaaaacaaatttttttactatagttttttgttttctacctgcacacccaccagaagagcacaaagcaaggccattgcaacaggcatttaaaaattattatcaaacatgcacatgcttgtacacacacacacacacacacacaaacaggggcatttgtaaaggtgtccctggaatgtaagatttataatgtttaaggcaaggtgaaggcattgccaagtgtgtgtcgctcataggactagtgtatattcactgaaagttaacctgatgatttgttattgtttgaaccatatgctgatttgcttctggtttctgtttagtgtgttctctctgataaggggctgaaagattctgcatcacacatcctctgagacctaccatgtcgcacactttgttaatgacaaacttcactctacactatacagtaccttgttgatatattcagtaaagtcttattttaaaagaaaacc

SEQ ID NO: 8535 - protein, 79 aa, Homo sapiens; identical to SEQ ID NO: 8533

SEQ ID NO: 8536 - DNA, 7412 bp, Homo sapiens
gcttctctagggagtgtcaggcgcacacagggttaagttagttccctccctggtaggagggagaggaggaggaggggaaaagcagcatactgtctcaggctgggtaccttgtagttagttgtacgttcgaaacctgtcgccgtcacttgcgcgtttggcattatccattgtcaccgcggaggaacgagcgctcgagatatcatcagtgcccgcaaatctccgcgccaaggcgctgagctactcctttccgaggtgcgcctctggtcctccgtccctggtgcccagcagcggcgaggcggcatctccgctcccgccgccgtgtccaccgagccctgggatcagggtggcagttctcaacgatgggcaggagggacctcggcggcgacccctaaaacaataccatgccccgggatccccgctgctgccgcgccagcgtcttccctttccacctccctgaccctgtcggattcggatgagcccattgcaaggagaagacgcagccgtcagattgcagattgagcttaaccaagaagttcgtaggctaatcaaggctggcttgacctacaaaagaagaagagagttctgcctgcccacttgggcttgtgttgacacggctgataacttgccatcacctgttgccagtgtggaaaaattctccctgttgaattttttgcacatggaggacagcagcaaagagggcaacacaggctgataagaccagagacagcagggagattattttaccatacgccctcaggacgttccctctagctggagttctggacttcaacagaaccccatccagtcattttgattttgctgtttattttttttttctttttctttttcccaccacattgtattttatttccgtacttcagaaatgggcctacagaccacaaagtggcccagccatggggcttttttcctgaagtcttggcttatcatttccctggggctctactcacaggtgtccaaactcctggcctgccctagtgtgtgccgctgcgacaggaactttgtctactgtaatgagcgaagcttgacctcagtgcctcttgggatcccggagggcgtaactgtactctacctccacaacaaccaaattaataatgctggatttcctgcagaactgcacaatgtacagtcggtgcacacggtctacctgtatggcaaccaactggacgaattccccatgaaccttcccaagaatgtcagagttctccatttgcaggaaaacaatattcagaccatttcacgggctgctcttgcccagctcttgaagcttgaagagctgcacctggatgacaactccatatccacagtgggggtggaagacggggccttccgggaggctattagcctcaaattgttgtttttgtctaagaatcacctgagcagtgtgcctgttgggcttcctgtggacttgcaagagctgagagtggatgaaaatcgaattgctgtcatatccgacatggccttccagaatctcacgagcttggagcgtcttattgtggacgggaacctcctgaccaacaagggtatcgccgagggcaccttcagccatctcaccaagctcaaggaattttcaattgtacgtaattcgctgtcccaccctcctcccgatctcccaggtacgcatctgatcaggctctatttgcaggacaaccagataaaccacattcctttgacagccttctcaaatctgcgtaagctggaacggctggatatatccaacaaccaactgcggatgctgactcaaggggtttttgataatctctccaacctgaagcagctcactgctcggaataacccttggttttgtgactgcagtattaaatgggtcacagaatggctcaaatatatcccttcatctctcaacgtgcggggtttcatgtgccaaggtcctgaacaagtccgggggatggccgtcagggaattaaatatgaatcttttgtcctgtcccaccacgacccccggcctgcctctcttcaccccagccccaagtacagcttctccgaccactcagcctcccaccctctctattccaaaccctagcagaagctacacgcctccaactcctaccacatcgaaacttcccacgattcctgactgggatggcagagaaagagtgaccccacctatttctgaacggatccagctctctatccattttgtgaatgatacttccattcaagtcagctggctctctctcttcaccgtgatggcatacaaactcacatgggtgaaaatgggccacagtttagtagggggcatcgttcaggagcgcatagtcagcggtgagaagcaacacctgagcctggttaacttagagccccgatccacctatcggatttgtttagtgccactggatgcttttaactaccgcgcggtagaagacaccatttgttcagaggccaccacccatgcctcctatctgaacaacggcagcaacacagcgtccagccatgagcagacgacgtcccacagcatgggctccccctttctgctggcgggcttgatcgggggcgcggtgatatttgtgctggtggtcttgctcagcgtcttttgctggcatatgcacaaaaaggggcgctacacctcccagaagtggaaatacaaccggggccggcggaaagatgattattgcgaggcaggcaccaagaaggacaactccatcctggagatgacagaaaccagttttcagatcgtctccttaaataacgatcaactccttaaaggagatttcagactgcagcccatttacaccccaaatgggggcattaattacacagactgccatatccccaacaacatgcgatactgcaacagcagcgtgccagacctggagcactgccatacgtgacagccagaggcccagcgttatcaaggcggacaattagactcttgagaacacactcgtgtgtgcacataaagacacgcagattacatttgataaatgttacacagatgcatttgtgcatttgaatactctgtaatttatacggtgtactatataatgggatttaaaaaaagtgctatcttttctatttcaagttaattacaaacagttttgtaactctttgctttttaaatcttaaaaaaaaaaaagttgctgaagtactgtacagggttgtacaatgagaacccaatgccaaggcaaaaagaacgagtgatttttccttaggatacacatcaaccactttgctgttgaagctgtcagaataaattcctggtggtcagatgaaagggcagattaaatggactcatcagggtaagaggaataatatgggtaaaacaagaaatggcccgatagtttcacactattcctatacctccaggtccggaagacaggtaaaaaattctataatgtaagaatggaggtagttaccctgatttgaccctgtgtgggaaatgctgaaagcaccaggaggaagccggttcccgtgagataagttaacccggcctgacagaatcaagaaaattgagatgagatttgaaaggacccgaaaatgcaggggttggctttctgactgggaacttaaaaatcactcttcatgcttccctggtcctatgtgataacagagttagagacttgagtctgatttcagtcatcttcagggaccagtctgatgttgtagcaagaagactccctttaaaagtgttactgttcaaatcatatatcaggttgaatcacattcaacagagatatattctagaatacttttttagaagaggctaataaagggaagaattatattgaatggaattatttttgataatgagaattatttgggtagattcactgaggctatgtcaacatgatatttagaccaacaggtgatcaatgtttggaaaatacaacaatgacttatttaaaaattacccttcctgctatttagacaaaaacaactgatcagtggttctgttatgtcagctgactttgttagtatcatgttgaaatagcttgaagtaatatcttttatccccttgcaaattcttgtcttccaatcatctcccatatattttcataattagttgtttatgacacctttgtttttctccctctgttcagtatttcaaggaaaattatggatgccagtcttggctgcacaagatatccattacgtacttatacattttaaaatgagtactaattttcactgctaataattctgtaaggacacatcaaagctggccaaaataatgaattttttttaaaaagcaatacctggtttccaccttggactgactttgatcctgttccacttttgaaattttatttgttccttttccatcgtggatgttcctctactttggcaattgtggagggctaatcaatcttatgttagcaggacaacccatgaaaaacaagtcagagagtgaaggctttttcccctaatcctggcagagcagggcgtagaaaagagaggatgtccgtgcttaattctagatacttttgagacaacaccttcagaaaacacataatttaatctttgccatccttagatagagaagggctatagatcacatacgttatcaaaaactactcccttggaaaaaatatctttcgaaaatcaaatttaaacatttcactctgtgctgcatatttcttttaccattgaccattattatagggacccatgaagtaaatgtcacaatcatcttactagctctctctctctcagcaaaataaaactgtgatgtgtcttctttgtaaaagtttaggtataaaatgctatgcaactttttctttatagtaagagctttattttctttaataatatagcccaacttatatgttttaatctcccttgtccctcagaataagcagaaaatataactgcagctgtatgtcgtagacacaagaattgaaactgtgcagtcagtagagctgaacttagctatgaattaatttaaattaattctaaagtgactctggtttccattttagtctattagctagagggttttggctgttgctttttttaaagttaggtccacacagtgaagggaaaagagtctgtgaaggtgatcagtgtagcagtaagacatctaaaatcaagacaatgacatgggggctttgtgtacttagctggataattcccttctactgtcctcttccccttggctgtgtagataaaattgtgcattcaaatgatggtactttgacttttgagggtttttatttctgttattcacaaaatactcattctcatttatgtatattgtatgtttaacccccagtgggatttctggctgctgaaaccactttgggccaggaagaacaaggatgaagaggttcctgtcatttcttatggggttcacagaattatttggggcttaaatggtacaatggagacagtcatgtgcaatgcttaagatggtctgacagggtcccttttgctggaggtgttcctgaagagattgaacctagtaacaggctttattttcaccttgtgtacaacatggcaaagactgctaagattaaaatccgtctcccatttgttacagcctcacctgcaccaggatagaaagcacgtgatggaatctgtgatgtctaatgtgtcttatgaaaattgccaaacaactgtccctggggattctgctttgattggcatttttagtcatgggaatgtatatttgctgatatatctgctctgtgtttgggcctctcttgctgtcattatgatgtattttgagatgattagtcaagagtcaaggttgcgagtacaggccaagaccatgggaaaaaaagccatgctcactggccaataaagagcttgatgctgcctggccaaatgaggtgactcagatagaatctgatcccattcagagcttggtaaatgtcactgtacagaagacattgaaaaggaagaggcatagtcatgatcaaaaggatatattgacagttatctatagccagggtagttgttaatacctgcttgtttggggagatatgtttgattatagagagactctgggccaccctcaaacaccgtcagatgcattagcagcccactgcatgggacaatcgcaggcagatacgaggaatgtatcccctgcctattttccttgtgtaacaaatggaaaacattctcccctgtgagaaataatgcaatttctaattatctggatgttcgttgaaaatatattagacattctccctgaggttaaaaacaaaaagtacgtgaccagtctggtaagaagtattaatgaagtagctaatattacagcttcattttctactagcacctatcataatggtcttagtcatttcacacaaatcagaacttccttccccaccagggaggacaacatcttcatgctgtgattgaagcatccattcagaacacgaggcaatattgcagtccacagggaatggatgcttcacttgatctccggaccttggctgcagaggccatcgcagcttttgaaaagtgaaggggttaattcccattggtgtctttgcttatagcatttttctctaacctataacaaggagacattacattttactttagaacatgagaatagcagttttgctcatgacttaccattccagctgcatgggaaagcaaagcagaaaacagtgccccaaatggaaaaaagatactcacacagaacaaaacagttcttggtcttgttcttggtcttgtcaaaccttgcctgatgctctttctaaagtcaaaatatgaatgctaagaaggcataacctacatccttctctgatttcttcagcagggtcaaaagacagttactagcaatggggaatgcttgtcactgtggagaaagagttttgtatatgtctgataccgttgttataacaaaacaaatttttttactatagttttttgttttctacctgcacacccaccagaagagcacaaagcaaggccattgcaacaggcatttaaaaattattatcaaacatgcacatgcttgtacacacacacacacacacacacaaacaggggcatttgtaaaggtgtccctggaatgtaagatttataatgtttaaggcaaggtgaaggcattgccaagtgtgtgtcgctcataggactagtgtatattcactgaaagttaacctgatgatttgttattgtttgaaccatatgctgatttgcttctggtttctgtttagtgtgttctctctgataaggggctgaaagattctgcatcacacatcctctgagacctaccatgtcgcacactttgttaatgacaaacttcactctacactatacagtaccttgttgatatattcagtaaagtcttattttaaaagaaaaccacattgtgtttatctgagtaagttcattgggatacagtcaatacttgtgctgttaatgtagaagaaatgacgcaggagggcaggaataaaagaggtaataggactttcgtattctcct

SEQ ID NO: 8537 - protein, 79 aa, Homo sapiens; identical to SEQ ID NO: 8533

SEQ ID NO: 8538 - DNA, 701 bp, Homo sapiens
gtcgccgtcacttgcgcgtttggcattatccattgtcaccgcggaggaacgagcgctcgagatatcatcagtgcccgcaaatctccgcgccaaggcgctgagctactcctttccgagattgcagattgagcttaaccaagaagttcgtaggctaatcaaggctggcttgacctacaaaagaagaagagagttctgcctgcccacttgggcttgtgttgacacggctgataacttgccatcacctgttgccagtgtggaaaaattctccctgttgaattttttgcacatggaggacagcagcaaagagggcaacacaggctgataagaccagagacagcagggagattattttaccatacgccctcaggacgttccctctagctggagttctggacttcaacagaaccccatccagtcattttgattttgctgtttattttttttttctttttctttttcccaccacattgtattttatttccgtacttcagaaatgggcctacagaccacaaagtggcccagccatggggcttttttcctgaagtcttggcttatcatttccctggggctctactcacaggtgtccaaactcctggcctgccctagtgtgtgccgctgcgacaggaactttgtctactgtaatgagcgaagcttgacctcagtgcctcttgggatcccggagggcgtaactgtactctacc

SEQ ID NO: 8539 - protein, 68 aa, Homo sapiens
MGLQTTKWPSHGAFFLKSWLIISLGLYSQVSKLLACPSVCRCDRNFVYCNERSLTSVPLGIPEGVTVL

SEQ ID NO: 8540 - DNA, 634 bp, Homo sapiens
agagcgcgagggacggagggagaggaggagcgcgggagctgcggaggcgatcccgcgaattcattactattgcagattgagcttaaccaagaagttcgtaggctaatcaaggctggcttgacctacaaaagaagaagagagttctgcctgcccacttgggcttgtgttgacacggctgataacttgccatcacctgttgccagtgtggaaaaattctccctgttgaattttttgcacatggaggacagcagcaaagagggcaacacaggctgataagaccagagacagcagggagattattttaccatacgccctcaggacgttccctctagctggagttctggacttcaacagaaccccatccagtcattttgattttgctgtttattttttttttctttttctttttcccaccacattgtattttatttccgtacttcagaaatgggcctacagaccacaaagtggcccagccatggggcttttttcctgaagtcttggcttatcatttccctggggctctactcacaggtgtccaaactcctggcctgccctagtgtgtgccgctgcgacaggaactttgtctactgtaatgagcgaagcttgacctcagtgcctcttgggatcccggagg

SEQ ID NO: 8541 - protein, 62 aa, Homo sapiens
MGLQTTKWPSHGAFFLKSWLIISLGLYSQVSKLLACPSVCRCDRNFVYCNERSLTSVPLGIP

SEQ ID NO: 8542 - DNA, 1771 bp, Homo sapiens
aggaactttgtctactgtaatgagcgaagcttgacctcaaattgttgtttttgtctaagaatcacctgagcagtgtgcctgttgggcttcctgtggacttgcaagagctgagagtggatgaaaatcgaattgctgtcatatccgacatggccttccagaatctcacgagcttggagcgtcttattgtggacgggaacctcctgaccaacaagggtatcgccgagggcaccttcagccatctcaccaagctcaaggaattttcaattgtacgtaattcgctgtcccaccctcctcccgatctcccaggtacgcatctgatcaggctctatttgcaggacaaccagataaaccacattcctttgacagccttctcaaatctgcgtaagctggaacggctggatatatccaacaaccaactgcggatgctgactcaaggggtttttgataatctctccaacctgaagcagctcactgctcggaataacccttggttttgtgactgcagtattaaatgggtcacagaatggctcaaatatatcccttcatctctcaacgtgcggggtttcatgtgccaaggtcctgaacaagtccgggggatggccgtcagggaattaaatatgaatcttttgtcctgtcccaccacgacccccggcctgcctctcttcaccccagccccaagtacagcttctccgaccactcagcctcccaccctctctattccaaaccctagcagaagctacacgcctccaactcctaccacatcgaaacttcccacgattcctgactgggatggcagagaaagagtgaccccacctatttctgaacggatccagctctctatccattttgtgaatgatacttccattcaagtcagctggctctctctcttcaccgtgatggcatacaaactcacatgggtgaaaatgggccacagtttagtagggggcatcgttcaggagcgcatagtcagcggtgagaagcaacacctgagcctggttaacttagagccccgatccacctatcggatttgtttagtgccactggatgcttttaactaccgcgcggtagaagacaccatttgttcagaggccaccacccatgcctcctatctgaacaacggcagcaacacagcgtccagccatgagcagacgacgtcccacagcatgggctccccctttctgctggcgggcttgatcgggggcgcggtgatatttgtgctggtggtcttgctcagcgtcttttgctggcatatgcacaaaaaggggcgctacacctcccagaagtggaaatacaaccggggccggcggaaagatgattattgcgaggcaggcaccaagaaggacaactccatcctggagatgacagaaaccagttttcagatcgtctccttaaataacgatcaactccttaaaggagatttcagactgcagcccatttacaccccaaatgggggcattaattacacagactgccatatccccaacaacatgcgatactgcaacagcagcgtgccagacctggagcactgccatacgtgacagccagaggcccagcgttatcaaggcggacaattagactcttgagaacacactcgtgtgtgcacataaagacacgcagattacatttgataaatgttacacagatgcatttgtgcatttgaatactctgtaatttatacggtgtactatataatgggatttaaaaaaagtgctatcttttctatttcaagttaattacaaacagttttgtaactctttgctttttaaatctt

SEQ ID NO: 8543 - protein, 463 aa, Homo sapiens [sequence omitted]

SEQ ID NO: 8544 - DNA, 5966 bp, Homo sapiens
aggaactttgtctactgtaatgagcgaagcttgacctcaaattgttgtttttgtctaagaatcacctgagcagtgtgcctgttgggcttcctgtggacttgcaagagctgagagtggatgaaaatcgaattgctgtcatatccgacatggccttccagaatctcacgagcttggagcgtcttattgtggacgggaacctcctgaccaacaagggtatcgccgagggcaccttcagccatctcaccaagctcaaggaattttcaattgtacgtaattcgctgtcccaccctcctcccgatctcccaggtacgcatctgatcaggctctatttgcaggacaaccagataaaccacattcctttgacagccttctcaaatctgcgtaagctggaacggctggatatatccaacaaccaactgcggatgctgactcaaggggtttttgataatctctccaacctgaagcagctcactgctcggaataacccttggttttgtgactgcagtattaaatgggtcacagaatggctcaaatatatcccttcatctctcaacgtgcggggtttcatgtgccaaggtcctgaacaagtccgggggatggccgtcagggaattaaatatgaatcttttgtcctgtcccaccacgacccccggcctgcctctcttcaccccagccccaagtacagcttctccgaccactcagcctcccaccctctctattccaaaccctagcagaagctacacgcctccaactcctaccacatcgaaacttcccacgattcctgactgggatggcagagaaagagtgaccccacctatttctgaacggatccagctctctatccattttgtgaatgatacttccattcaagtcagctggctctctctcttcaccgtgatggcatacaaactcacatgggtgaaaatgggccacagtttagtagggggcatcgttcaggagcgcatagtcagcggtgagaagcaacacctgagcctggttaacttagagccccgatccacctatcggatttgtttagtgccactggatgcttttaactaccgcgcggtagaagacaccatttgttcagaggccaccacccatgcctcctatctgaacaacggcagcaacacagcgtccagccatgagcagacgacgtcccacagcatgggctccccctttctgctggcgggcttgatcgggggcgcggtgatatttgtgctggtggtcttgctcagcgtcttttgctggcatatgcacaaaaaggggcgctacacctcccagaagtggaaatacaaccggggccggcggaaagatgattattgcgaggcaggcaccaagaaggacaactccatcctggagatgacagaaaccagttttcagatcgtctccttaaataacgatcaactccttaaaggagatttcagactgcagcccatttacaccccaaatgggggcattaattacacagactgccatatccccaacaacatgcgatactgcaacagcagcgtgccagacctggagcactgccatacgtgacagccagaggcccagcgttatcaaggcggacaattagactcttgagaacacactcgtgtgtgcacataaagacacgcagattacatttgataaatgttacacagatgcatttgtgcatttgaatactctgtaatttatacggtgtactatataatgggatttaaaaaaagtgctatcttttctatttcaagttaattacaaacagttttgtaactctttgctttttaaatcttaaaaaaaaaaaagttgctgaagtactgtacagggttgtacaatgagaacccaatgccaaggcaaaaagaacgagtgatttttccttaggatacacatcaaccactttgctgttgaagctgtcagaataaattcctggtggtcagatgaaagggcagattaaatggactcatcagggtaagaggaataatatgggtaaaacaagaaatggcccgatagtttcacactattcctatacctccaggtccggaagacaggtaaaaaattctataatgtaagaatggaggtagttaccctgatttgaccctgtgtgggaaatgctgaaagcaccaggaggaagccggttcccgtgagataagttaacccggcctgacagaatcaagaaaattgagatgagatttgaaaggacccgaaaatgcaggggttggctttctgactgggaacttaaaaatcactcttcatgcttccctggtcctatgtgataacagagttagagacttgagtctgatttcagtcatcttcagggaccagtctgatgttgtagcaagaagactccctttaaaagtgttactgttcaaatcatatatcaggttgaatcacattcaacagagatatattctagaatacttttttagaagaggctaataaagggaagaattatattgaatggaattatttttgataatgagaattatttgggtagattcactgaggctatgtcaacatgatatttagaccaacaggtgatcaatgtttggaaaatacaacaatgacttatttaaaaattacccttcctgctatttagacaaaaacaactgatcagtggttctgttatgtcagctgactttgttagtatcatgttgaaatagcttgaagtaatatcttttatccccttgcaaattcttgtcttccaatcatctcccatatattttcataattagttgtttatgacacctttgtttttctccctctgttcagtatttcaaggaaaattatggatgccagtcttggctgcacaagatatccattacgtacttatacattttaaaatgagtactaattttcactgctaataattctgtaaggacacatcaaagctggccaaaataatgaattttttttaaaaagcaatacctggtttccaccttggactgactttgatcctgttccacttttgaaattttatttgttccttttccatcgtggatgttcctctactttggcaattgtggagggctaatcaatcttatgttagcaggacaacccatgaaaaacaagtcagagagtgaaggctttttcccctaatcctggcagagcagggcgtagaaaagagaggatgtccgtgcttaattctagatacttttgagacaacaccttcagaaaacacataatttaatctttgccatccttagatagagaagggctatagatcacatacgttatcaaaaactactcccttggaaaaaatatctttcgaaaatcaaatttaaacatttcactctgtgctgcatatttcttttaccattgaccattattatagggacccatgaagtaaatgtcacaatcatcttactagctctctctctctcagcaaaataaaactgtgatgtgtcttctttgtaaaagtttaggtataaaatgctatgcaactttttctttatagtaagagctttattttctttaataatatagcccaacttatatgttttaatctcccttgtccctcagaataagcagaaaatataactgcagctgtatgtcgtagacacaagaattgaaactgtgcagtcagtagagctgaacttagctatgaattaatttaaattaattctaaagtgactctggtttccattttagtctattagctagagggttttggctgttgctttttttaaagttaggtccacacagtgaagggaaaagagtctgtgaaggtgatcagtgtagcagtaagacatctaaaatcaagacaatgacatgggggctttgtgtacttagctggataattcccttctactgtcctcttccccttggctgtgtagataaaattgtgcattcaaatgatggtactttgacttttgagggtttttatttctgttattcacaaaatactcattctcatttatgtatattgtatgtttaacccccagtgggatttctggctgctgaaaccactttgggccaggaagaacaaggatgaagaggttcctgtcatttcttatggggttcacagaattatttggggcttaaatggtacaatggagacagtcatgtgcaatgcttaagatggtctgacagggtcccttttgctggaggtgttcctgaagagattgaacctagtaacaggctttattttcaccttgtgtacaacatggcaaagactgctaagattaaaatccgtctcccatttgttacagcctcacctgcaccaggatagaaagcacgtgatggaatctgtgatgtctaatgtgtcttatgaaaattgccaaacaactgtccctggggattctgctttgattggcatttttagtcatgggaatgtatatttgctgatatatctgctctgtgtttgggcctctcttgctgtcattatgatgtattttgagatgattagtcaagagtcaaggttgcgagtacaggccaagaccatgggaaaaaaagccatgctcactggccaataaagagcttgatgctgcctggccaaatgaggtgactcagatagaatctgatcccattcagagcttggtaaatgtcactgtacagaagacattgaaaaggaagaggcatagtcatgatcaaaaggatatattgacagttatctatagccagggtagttgttaatacctgcttgtttggggagatatgtttgattatagagagactctgggccaccctcaaacaccgtcagatgcattagcagcccactgcatgggacaatcgcaggcagatacgaggaatgtatcccctgcctattttccttgtgtaacaaatggaaaacattctcccctgtgagaaataatgcaatttctaattatctggatgttcgttgaaaatatattagacattctccctgaggttaaaaacaaaaagtacgtgaccagtctggtaagaagtattaatgaagtagctaatattacagcttcattttctactagcacctatcataatggtcttagtcatttcacacaaatcagaacttccttccccaccagggaggacaacatcttcatgctgtgattgaagcatccattcagaacacgaggcaatattgcagtccacagggaatggatgcttcacttgatctccggaccttggctgcagaggccatcgcagcttttgaaaagtgaaggggttaattcccattggtgtctttgcttatagcatttttctctaacctataacaaggagacattacattttactttagaacatgagaatagcagttttgctcatgacttaccattccagctgcatgggaaagcaaagcagaaaacagtgccccaaatggaaaaaagatactcacacagaacaaaacagttcttggtcttgttcttggtcttgtcaaaccttgcctgatgctctttctaaagtcaaaatatgaatgctaagaaggcataacctacatccttctctgatttcttcagcagggtcaaaagacagttactagcaatggggaatgcttgtcactgtggagaaagagttttgtatatgtctgataccgttgttataacaaaacaaatttttttactatagttttttgttttctacctgcacacccaccagaagagcacaaagcaaggccattgcaacaggcatttaaaaattattatcaaacatgcacatgcttgtacacacacacacacacacacacaaacaggggcatttgtaaaggtgtccctggaatgtaagatttataatgtttaaggcaaggtgaaggcattgccaagtgtgtgtcgctcataggactagtgtatattcactgaaagttaacctgatgatttgttattgtttgaaccatatgctgatttgcttctggtttctgtttagtgtgttctctctgataaggggctgaaagattctgcatcacacatcctctgagacctaccatgtcgcacactttgttaatgacaaacttcactctacactatacagtaccttgttgatatattcagtaaagtcttattttaaaagaaaacc

SEQ ID NO: 8545 - protein, 463 aa, Homo sapiens [sequence omitted]

SEQ ID NO: 8546 - DNA, 6084 bp, Homo sapiens
aggaactttgtctactgtaatgagcgaagcttgacctcaaattgttgtttttgtctaagaatcacctgagcagtgtgcctgttgggcttcctgtggacttgcaagagctgagagtggatgaaaatcgaattgctgtcatatccgacatggccttccagaatctcacgagcttggagcgtcttattgtggacgggaacctcctgaccaacaagggtatcgccgagggcaccttcagccatctcaccaagctcaaggaattttcaattgtacgtaattcgctgtcccaccctcctcccgatctcccaggtacgcatctgatcaggctctatttgcaggacaaccagataaaccacattcctttgacagccttctcaaatctgcgtaagctggaacggctggatatatccaacaaccaactgcggatgctgactcaaggggtttttgataatctctccaacctgaagcagctcactgctcggaataacccttggttttgtgactgcagtattaaatgggtcacagaatggctcaaatatatcccttcatctctcaacgtgcggggtttcatgtgccaaggtcctgaacaagtccgggggatggccgtcagggaattaaatatgaatcttttgtcctgtcccaccacgacccccggcctgcctctcttcaccccagccccaagtacagcttctccgaccactcagcctcccaccctctctattccaaaccctagcagaagctacacgcctccaactcctaccacatcgaaacttcccacgattcctgactgggatggcagagaaagagtgaccccacctatttctgaacggatccagctctctatccattttgtgaatgatacttccattcaagtcagctggctctctctcttcaccgtgatggcatacaaactcacatgggtgaaaatgggccacagtttagtagggggcatcgttcaggagcgcatagtcagcggtgagaagcaacacctgagcctggttaacttagagccccgatccacctatcggatttgtttagtgccactggatgcttttaactaccgcgcggtagaagacaccatttgttcagaggccaccacccatgcctcctatctgaacaacggcagcaacacagcgtccagccatgagcagacgacgtcccacagcatgggctccccctttctgctggcgggcttgatcgggggcgcggtgatatttgtgctggtggtcttgctcagcgtcttttgctggcatatgcacaaaaaggggcgctacacctcccagaagtggaaatacaaccggggccggcggaaagatgattattgcgaggcaggcaccaagaaggacaactccatcctggagatgacagaaaccagttttcagatcgtctccttaaataacgatcaactccttaaaggagatttcagactgcagcccatttacaccccaaatgggggcattaattacacagactgccatatccccaacaacatgcgatactgcaacagcagcgtgccagacctggagcactgccatacgtgacagccagaggcccagcgttatcaaggcggacaattagactcttgagaacacactcgtgtgtgcacataaagacacgcagattacatttgataaatgttacacagatgcatttgtgcatttgaatactctgtaatttatacggtgtactatataatgggatttaaaaaaagtgctatcttttctatttcaagttaattacaaacagttttgtaactctttgctttttaaatcttaaaaaaaaaaaagttgctgaagtactgtacagggttgtacaatgagaacccaatgccaaggcaaaaagaacgagtgatttttccttaggatacacatcaaccactttgctgttgaagctgtcagaataaattcctggtggtcagatgaaagggcagattaaatggactcatcagggtaagaggaataatatgggtaaaacaagaaatggcccgatagtttcacactattcctatacctccaggtccggaagacaggtaaaaaattctataatgtaagaatggaggtagttaccctgatttgaccctgtgtgggaaatgctgaaagcaccaggaggaagccggttcccgtgagataagttaacccggcctgacagaatcaagaaaattgagatgagatttgaaaggacccgaaaatgcaggggttggctttctgactgggaacttaaaaatcactcttcatgcttccctggtcctatgtgataacagagttagagacttgagtctgatttcagtcatcttcagggaccagtctgatgttgtagcaagaagactccctttaaaagtgttactgttcaaatcatatatcaggttgaatcacattcaacagagatatattctagaatacttttttagaagaggctaataaagggaagaattatattgaatggaattatttttgataatgagaattatttgggtagattcactgaggctatgtcaacatgatatttagaccaacaggtgatcaatgtttggaaaatacaacaatgacttatttaaaaattacccttcctgctatttagacaaaaacaactgatcagtggttctgttatgtcagctgactttgttagtatcatgttgaaatagcttgaagtaatatcttttatccccttgcaaattcttgtcttccaatcatctcccatatattttcataattagttgtttatgacacctttgtttttctccctctgttcagtatttcaaggaaaattatggatgccagtcttggctgcacaagatatccattacgtacttatacattttaaaatgagtactaattttcactgctaataattctgtaaggacacatcaaagctggccaaaataatgaattttttttaaaaagcaatacctggtttccaccttggactgactttgatcctgttccacttttgaaattttatttgttccttttccatcgtggatgttcctctactttggcaattgtggagggctaatcaatcttatgttagcaggacaacccatgaaaaacaagtcagagagtgaaggctttttcccctaatcctggcagagcagggcgtagaaaagagaggatgtccgtgcttaattctagatacttttgagacaacaccttcagaaaacacataatttaatctttgccatccttagatagagaagggctatagatcacatacgttatcaaaaactactcccttggaaaaaatatctttcgaaaatcaaatttaaacatttcactctgtgctgcatatttcttttaccattgaccattattatagggacccatgaagtaaatgtcacaatcatcttactagctctctctctctcagcaaaataaaactgtgatgtgtcttctttgtaaaagtttaggtataaaatgctatgcaactttttctttatagtaagagctttattttctttaataatatagcccaacttatatgttttaatctcccttgtccctcagaataagcagaaaatataactgcagctgtatgtcgtagacacaagaattgaaactgtgcagtcagtagagctgaacttagctatgaattaatttaaattaattctaaagtgactctggtttccattttagtctattagctagagggttttggctgttgctttttttaaagttaggtccacacagtgaagggaaaagagtctgtgaaggtgatcagtgtagcagtaagacatctaaaatcaagacaatgacatgggggctttgtgtacttagctggataattcccttctactgtcctcttccccttggctgtgtagataaaattgtgcattcaaatgatggtactttgacttttgagggtttttatttctgttattcacaaaatactcattctcatttatgtatattgtatgtttaacccccagtgggatttctggctgctgaaaccactttgggccaggaagaacaaggatgaagaggttcctgtcatttcttatggggttcacagaattatttggggcttaaatggtacaatggagacagtcatgtgcaatgcttaagatggtctgacagggtcccttttgctggaggtgttcctgaagagattgaacctagtaacaggctttattttcaccttgtgtacaacatggcaaagactgctaagattaaaatccgtctcccatttgttacagcctcacctgcaccaggatagaaagcacgtgatggaatctgtgatgtctaatgtgtcttatgaaaattgccaaacaactgtccctggggattctgctttgattggcatttttagtcatgggaatgtatatttgctgatatatctgctctgtgtttgggcctctcttgctgtcattatgatgtattttgagatgattagtcaagagtcaaggttgcgagtacaggccaagaccatgggaaaaaaagccatgctcactggccaataaagagcttgatgctgcctggccaaatgaggtgactcagatagaatctgatcccattcagagcttggtaaatgtcactgtacagaagacattgaaaaggaagaggcatagtcatgatcaaaaggatatattgacagttatctatagccagggtagttgttaatacctgcttgtttggggagatatgtttgattatagagagactctgggccaccctcaaacaccgtcagatgcattagcagcccactgcatgggacaatcgcaggcagatacgaggaatgtatcccctgcctattttccttgtgtaacaaatggaaaacattctcccctgtgagaaataatgcaatttctaattatctggatgttcgttgaaaatatattagacattctccctgaggttaaaaacaaaaagtacgtgaccagtctggtaagaagtattaatgaagtagctaatattacagcttcattttctactagcacctatcataatggtcttagtcatttcacacaaatcagaacttccttccccaccagggaggacaacatcttcatgctgtgattgaagcatccattcagaacacgaggcaatattgcagtccacagggaatggatgcttcacttgatctccggaccttggctgcagaggccatcgcagcttttgaaaagtgaaggggttaattcccattggtgtctttgcttatagcatttttctctaacctataacaaggagacattacattttactttagaacatgagaatagcagttttgctcatgacttaccattccagctgcatgggaaagcaaagcagaaaacagtgccccaaatggaaaaaagatactcacacagaacaaaacagttcttggtcttgttcttggtcttgtcaaaccttgcctgatgctctttctaaagtcaaaatatgaatgctaagaaggcataacctacatccttctctgatttcttcagcagggtcaaaagacagttactagcaatggggaatgcttgtcactgtggagaaagagttttgtatatgtctgataccgttgttataacaaaacaaatttttttactatagttttttgttttctacctgcacacccaccagaagagcacaaagcaaggccattgcaacaggcatttaaaaattattatcaaacatgcacatgcttgtacacacacacacacacacacacaaacaggggcatttgtaaaggtgtccctggaatgtaagatttataatgtttaaggcaaggtgaaggcattgccaagtgtgtgtcgctcataggactagtgtatattcactgaaagttaacctgatgatttgttattgtttgaaccatatgctgatttgcttctggtttctgtttagtgtgttctctctgataaggggctgaaagattctgcatcacacatcctctgagacctaccatgtcgcacactttgttaatgacaaacttcactctacactatacagtaccttgttgatatattcagtaaagtcttattttaaaagaaaaccacattgtgtttatctgagtaagttcattgggatacagtcaatacttgtgctgttaatgtagaagaaatgacgcaggagggcaggaataaaagaggtaataggactttcgtattctcct

SEQ ID NO: 8547 - protein, 463 aa, Homo sapiens [sequence omitted]

SEQ ID NO: 8548 - DNA, 2877 bp, Homo sapiens
acggcagcaacacagcgtccagccatgagcagacgacgtcccacagcatgggctccccctttctgctggcgggcttgatcgggggcgcggtgatatttgtgctggtggtcttgctcagcgtcttttgctggcatatgcacaaaaaggggcgctacacctcccagaagtggaaatacaaccggggccggcggaaagatgattattgcgaggcaggcaccaagaaggacaactccatcctggagatgacagaaaccagttttcagatcgtctccttaaataacgatcaactccttaaaggagatttcagactgcagcccatttacaccccaaatgggggcattaattacacagactgccatatccccaacaacatgcgatactgcaacagcagcgtgccagacctggagcactgccatacgtgacagccagaggcccagcgttatcaaggcggacaattagactcttgagaacacactcgtgtgtgcacataaagacacgcagattacatttgataaatgttacacagatgcatttgtgcatttgaatactctgtaatttatacggtgtactatataatgggatttaaaaaaagtgctatcttttctatttcaagttaattacaaacagttttgtaactctttgctttttaaatcttaaaaaaaaaaaagttgctgaagtactgtacagggttgtacaatgagaacccaatgccaaggcaaaaagaacgagtgatttttccttaggatacacatcaaccactttgctgttgaagctgtcagaataaattcctggtggtcagatgaaagggcagattaaatggactcatcaggtgggatttctggctgctgaaaccactttgggccaggaagaacaaggatgaagaggttcctgtcatttcttatggggttcacagaattatttggggcttaaatggtacaatggagacagtcatgtgcaatgcttaagatggtctgacagggtcccttttgctggaggtgttcctgaagagattgaacctagtaacaggctttattttcaccttgtgtacaacatggcaaagactgctaagattaaaatccgtctcccatttgttacagcctcacctgcaccaggatagaaagcacgtgatggaatctgtgatgtctaatgtgtcttatgaaaattgccaaacaactgtccctggggattctgctttgattggcatttttagtcatgggaatgtatatttgctgatatatctgctctgtgtttgggcctctcttgctgtcattatgatgtattttgagatgattagtcaagagtcaaggttgcgagtacaggccaagaccatgggaaaaaaagccatgctcactggccaataaagagcttgatgctgcctggccaaatgaggtgactcagatagaatctgatcccattcagagcttggtaaatgtcactgtacagaagacattgaaaaggaagaggcatagtcatgatcaaaaggatatattgacagttatctatagccagggtagttgttaatacctgcttgtttggggagatatgtttgattatagagagactctgggccaccctcaaacaccgtcagatgcattagcagcccactgcatgggacaatcgcaggcagatacgaggaatgtatcccctgcctattttccttgtgtaacaaatggaaaacattctcccctgtgagaaataatgcaatttctaattatctggatgttcgttgaaaatatattagacattctccctgaggttaaaaacaaaaagtacgtgaccagtctggtaagaagtattaatgaagtagctaatattacagcttcattttctactagcacctatcataatggtcttagtcatttcacacaaatcagaacttccttccccaccagggaggacaacatcttcatgctgtgattgaagcatccattcagaacacgaggcaatattgcagtccacagggaatggatgcttcacttgatctccggaccttggctgcagaggccatcgcagcttttgaaaagtgaaggggttaattcccattggtgtctttgcttatagcatttttctctaacctataacaaggagacattacattttactttagaacatgagaatagcagttttgctcatgacttaccattccagctgcatgggaaagcaaagcagaaaacagtgccccaaatggaaaaaagatactcacacagaacaaaacagttcttggtcttgttcttggtcttgtcaaaccttgcctgatgctctttctaaagtcaaaatatgaatgctaagaaggcataacctacatccttctctgatttcttcagcagggtcaaaagacagttactagcaatggggaatgcttgtcactgtggagaaagagttttgtatatgtctgataccgttgttataacaaaacaaatttttttactatagttttttgttttctacctgcacacccaccagaagagcacaaagcaaggccattgcaacaggcatttaaaaattattatcaaacatgcacatgcttgtacacacacacacacacacacacaaacaggggcatttgtaaaggtgtccctggaatgtaagatttataatgtttaaggcaaggtgaaggcattgccaagtgtgtgtcgctcataggactagtgtatattcactgaaagttaacctgatgatttgttattgtttgaaccatatgctgatttgcttctggtttctgtttagtgtgttctctctgataaggggctgaaagattctgcatcacacatcctctgagacctaccatgtcgcacactttgttaatgacaaacttcactctacactatacagtaccttgttgatatattcagtaaagtcttattttaaaagaaaacc

SEQ ID NO: 8549 - protein, 124 aa, Homo sapiens [sequence omitted]

SEQ ID NO: 8550 - DNA, 2995 bp, Homo sapiens
acggcagcaacacagcgtccagccatgagcagacgacgtcccacagcatgggctccccctttctgctggcgggcttgatcgggggcgcggtgatatttgtgctggtggtcttgctcagcgtcttttgctggcatatgcacaaaaaggggcgctacacctcccagaagtggaaatacaaccggggccggcggaaagatgattattgcgaggcaggcaccaagaaggacaactccatcctggagatgacagaaaccagttttcagatcgtctccttaaataacgatcaactccttaaaggagatttcagactgcagcccatttacaccccaaatgggggcattaattacacagactgccatatccccaacaacatgcgatactgcaacagcagcgtgccagacctggagcactgccatacgtgacagccagaggcccagcgttatcaaggcggacaattagactcttgagaacacactcgtgtgtgcacataaagacacgcagattacatttgataaatgttacacagatgcatttgtgcatttgaatactctgtaatttatacggtgtactatataatgggatttaaaaaaagtgctatcttttctatttcaagttaattacaaacagttttgtaactctttgctttttaaatcttaaaaaaaaaaaagttgctgaagtactgtacagggttgtacaatgagaacccaatgccaaggcaaaaagaacgagtgatttttccttaggatacacatcaaccactttgctgttgaagctgtcagaataaattcctggtggtcagatgaaagggcagattaaatggactcatcaggtgggatttctggctgctgaaaccactttgggccaggaagaacaaggatgaagaggttcctgtcatttcttatggggttcacagaattatttggggcttaaatggtacaatggagacagtcatgtgcaatgcttaagatggtctgacagggtcccttttgctggaggtgttcctgaagagattgaacctagtaacaggctttattttcaccttgtgtacaacatggcaaagactgctaagattaaaatccgtctcccatttgttacagcctcacctgcaccaggatagaaagcacgtgatggaatctgtgatgtctaatgtgtcttatgaaaattgccaaacaactgtccctggggattctgctttgattggcatttttagtcatgggaatgtatatttgctgatatatctgctctgtgtttgggcctctcttgctgtcattatgatgtattttgagatgattagtcaagagtcaaggttgcgagtacaggccaagaccatgggaaaaaaagccatgctcactggccaataaagagcttgatgctgcctggccaaatgaggtgactcagatagaatctgatcccattcagagcttggtaaatgtcactgtacagaagacattgaaaaggaagaggcatagtcatgatcaaaaggatatattgacagttatctatagccagggtagttgttaatacctgcttgtttggggagatatgtttgattatagagagactctgggccaccctcaaacaccgtcagatgcattagcagcccactgcatgggacaatcgcaggcagatacgaggaatgtatcccctgcctattttccttgtgtaacaaatggaaaacattctcccctgtgagaaataatgcaatttctaattatctggatgttcgttgaaaatatattagacattctccctgaggttaaaaacaaaaagtacgtgaccagtctggtaagaagtattaatgaagtagctaatattacagcttcattttctactagcacctatcataatggtcttagtcatttcacacaaatcagaacttccttccccaccagggaggacaacatcttcatgctgtgattgaagcatccattcagaacacgaggcaatattgcagtccacagggaatggatgcttcacttgatctccggaccttggctgcagaggccatcgcagcttttgaaaagtgaaggggttaattcccattggtgtctttgcttatagcatttttctctaacctataacaaggagacattacattttactttagaacatgagaatagcagttttgctcatgacttaccattccagctgcatgggaaagcaaagcagaaaacagtgccccaaatggaaaaaagatactcacacagaacaaaacagttcttggtcttgttcttggtcttgtcaaaccttgcctgatgctctttctaaagtcaaaatatgaatgctaagaaggcataacctacatccttctctgatttcttcagcagggtcaaaagacagttactagcaatggggaatgcttgtcactgtggagaaagagttttgtatatgtctgataccgttgttataacaaaacaaatttttttactatagttttttgttttctacctgcacacccaccagaagagcacaaagcaaggccattgcaacaggcatttaaaaattattatcaaacatgcacatgcttgtacacacacacacacacacacacaaacaggggcatttgtaaaggtgtccctggaatgtaagatttataatgtttaaggcaaggtgaaggcattgccaagtgtgtgtcgctcataggactagtgtatattcactgaaagttaacctgatgatttgttattgtttgaaccatatgctgatttgcttctggtttctgtttagtgtgttctctctgataaggggctgaaagattctgcatcacacatcctctgagacctaccatgtcgcacactttgttaatgacaaacttcactctacactatacagtaccttgttgatatattcagtaaagtcttattttaaaagaaaaccacattgtgtttatctgagtaagttcattgggatacagtcaatacttgtgctgttaatgtagaagaaatgacgcaggagggcaggaataaaagaggtaataggactttcgtattctcct

SEQ ID NO: 8551 - protein, 124 aa, Homo sapiens [sequence omitted]

SEQ ID NO: 8552 - DNA, 568 bp, Homo sapiens
agttcttggattgagggtcagtttcctgaggaaggaactcaaagcaatgcaagaatggactaatacgtctactgaaggacatcttggttggtcccagattttggcaattatgaaaaatctgctatagatgtatgcaggttttctgtggacgtacgttttccactcctgctggccagacaacacatctacagggtgcagatgacctatgggcagccacactgtgatgcctgtgtgagggcctaaacttcagggaggaagaaagtgaggtcagatcctgagggagcacttgctctcctgcagcaggcatgggggagcacctgactgctgaggatggcttcggaacatttgtgtgaagagggataacagatgctgcatgccagagggatggtggccataggccgcaagattcggttcttctggccgcagaagaccctgacttcacctttcaggcctctgtttccttatcaacgaaataagagcatgtgattaattctgcaggtgcttccagcttggacttttttgcaaatattttcattcaactcactttagaaacctgcagggagtctct

SEQ ID NO: 8553 - protein, 30 aa, Homo sapiens
MQVFCGRTFSTPAGQTTHLQGADDLWAATL

SEQ ID NO: 8554 - DNA, 1469 bp, Homo sapiens
gtgggtagaggtgatgcagtgctgaagacctgggcccctgctcagtgcctttgctctagaatgggtccagcttggctttggctactgggaacagggatcctggcctctgtccactgtcagccccttcttgcccatggagataaaagtctgcaggggcctcaaccccccaggcatcagctctcagagccagcccccgcctaccacagaatcacacccaccattaccaattttgctttgcgtttgtataaagagctggcagcagacgcccccggaaacatcttcttctcgccagtgagcatctccaccaccctggccctgctctctcttggggcccaagctaacacctcagctctgatcctggagggcctgggattcaacctcacagaaacccctgaagccgacatccaccagggcttccggagcctcctccacacccttgccctgcccagccccaaactcgaactaaaagtaggaaactccctgttcctagacaagcgactaaagcctcggcagcactatttggacagcatcaaggagctttatggagcttttgctttttctgccaacttcacagattctgttacaactgggaggcagattaatgactatttgagaaggcaaacatacgggcaagtcgtggactgcctcccggagttcagccaggacacgttcatggttcttgccaattacatcttcttcaaagccaagtggaagcaccctttcagtcgctaccagacccagaagcaggaaagtttctttgtggatgagaggacttctctccaggtccccatgatgcaccaaaaggaaatgcacagattcctctatgaccaggatttggcttgcaccgtcctccagatagaatacagaggaaatgccttggcgctgctggtcctccctgacccggggaaaatgaagcaggtggaggctgctctgcagccacagaccctgagaaaatggggccaattgctcctgcccagtctgttggatttgcacttgccaaggttttcaatttctggaacatataacctggaagacatacttccccaaattggtctcaccaacatactcaacttagaagctgacttctcaggagtcactgggcagctcaacaaaaccatctccaaggtgtcacacaaggcgatggtggacatgagtgagaaggggaccgaggccggggctgcttcaggcctcctctcccagcccccatctctgaacaccatgtcagacccacatgcccacttcaacaggcctttcctcttgctcctttgggaggtcaccacccagagcttactcttcctgggaaaagttgtcaacccagttgcagggtaaccatggtgggaggccaggagttatcttatctcatcctggaccaaacagataggccagaaccagcctgcatcctggggctgctatgtggttcagttaatcagtgtgccaagattctaataaagttgaccttgggttctgtg

SEQ ID NO: 8555 - protein, 422 aa, Homo sapiens
MGPAWLWLLGTGILASVHCQPLLAHGDKSLQGPQPPRHQLSEPAPAYHRITPTITNFALRLYKELAADAPGNIFFSPVSISTTLALLSLGAQANTSALILEGLGFNLTETPEADIHQGFRSLLHTLALPSPKLELKVGNSLFLDKRLKPRQHYLDSIKELYGAFAFSANFTDSVTTGRQINDYLRRQTYGQVVDCLPEFSQDTFMVLANYIFFKAKWKHPFSRYQTQKQESFFVDERTSLQVPMMHQKEMHRFLYDQDLACTVLQIEYRGNALALLVLPDPGKMKQVEAALQPQTLRKWGQLLLPSLLDLHLPRFSISGTYNLEDILPQIGLTNILNLEADFSGVTGQLNKTISKVSHKAMVDMSEKGTEAGAASGLLSQPPSLNTMSDPHAHFNRPFLLLLWEVTTQSLLFLGKVVNPVAG

SEQ ID NO: 8556 - DNA, 1513 bp, Homo sapiens
aagcaagtgtcagggctcaccaaccatgcaaggacagggcaggagaagaggaacctgcaaaggctggttttggagaccccgagtcagaacatcttcttctcccctgtgagtgtctccacttccctggccatgctctcccttggggcccactcagtcaccaagacccagattctccagggcctgggcttcaacctcacacacacaccagagtctgccatccaccagggcttccagcacctggttcactcactgactgttcccagcaaagacctgaccttgaagatgggaagtgccctcttcgtcaagaaggagctgcagctgcaggcaaatttcttgggcaatgtcaagaggctgtatgaagcagaagtcttttctacagatttctccaacccctccattgcccaggcgaggatcaacagccatgtgaaaaagaagacccaagggaaggttgtagacataatccaaggccttgaccttctgacggccatggttctggtgaaccacattttctttaaagccaagtgggagaagccctttcaccctgaatatacaagaaagaacttcccattcctggtgggcgagcaggtcactgtgcatgtccccatgatgcaccagaaagagcagttcgcttttggggtggatacagagctgaactgctttgtgctgcagatggattacaagggagatgccgtggccttctttgtcctccctagcaagggcaagatgaggcaactggaacaggccttgtcagccagaacactgagaaagtggagccactcactccagaaaaggtggatagaggtgttcatccccagattttccatttctgcctcctacaatctggaaaccatcctcccgaagatgggcatccaaaatgtctttgacaaaaatgctgatttttctggaattgcaaagagagactccctgcaggtttctaaagcaacccacaaggctgtgctggatgtcagtgaagagggcactgaggccacagcagctaccaccaccaagttcatagtccgatcgaaggatggcccctcttacttcactgtctccttcaataggaccttcctgatgatgattacaaataaagccacagacggtattctctttctagggaaagtggaaaatcccactaaatcctaggtgggaaatggcctgttaactgatggcacattgctaatgcacaagaaataacaaaccacatccctctttctgttctgagggtgcatttgaccccagtggagctggattcgctggcagggatgccacttccaaggctcaatcaccaaaccatcaacagggaccccagtcacaagccaacacccattaaccccagtcagtgcccttttccacaaattctcccaggtaactagcttcatgggatgttgctgggttaccatatttccattccttggggctcccaggaatggaaatacgccaacccaggttaggcacctctattgcagaattacaataacacattcaataaaactaaaatatgaattcatctgtc

SEQ ID NO: 8557 - protein, 337 aa, Homo sapiens
MLSLGAHSVTKTQILQGLGFNLTHTPESAIHQGFQHLVHSLTVPSKDLTLKMGSALFVKKELQLQANFLGNVKRLYEAEVFSTDFSNPSIAQARINSHVKKKTQGKVVDIIQGLDLLTAMVLVNHIFFKAKWEKPFHPEYTRKNFPFLVGEQVTVHVPMMHQKEQFAFGVDTELNCFVLQMDYKGDAVAFFVLPSKGKMRQLEQALSARTLRKWSHSLQKRWIEVFIPRFSISASYNLETILPKMGIQNVFDKNADFSGIAKRDSLQVSKATHKAVLDVSEEGTEATAATTTKFIVRSKDGPSYFTVSFNRTFLMMITNKATDGILFLGKVENPTKS

SEQ ID NO: 8558 - DNA, 1416 bp, Homo sapiens
gctacaaccaagtaagcaagtgtcagggctcaccaaccatgcaaggacagggcaggagaagaggaacctgcaaagacatattttgttccaaaatggcatcttacctttatggagtactctttgctgttggcctctgtgctccaatctactgtgtgtccccggccaatgcccccagtgcatacccccgcccttcctccacaaagagcacccctgcctcacaggtgtattccctcaacaccgactttgccttccgcctataccgcaggctggttttggagaccccgagtcagaacatcttcttctcccctgcgaggatcaacagccatgtgaaaaagaagacccaagggaaggttgtagacataatccaaggccttgaccttctgacggccatggttctggtgaaccacattttctttaaagccaagtgggagaagccctttcaccctgaatatacaagaaagaacttcccattcctggtgggcgagcaggtcactgtgcatgtccccatgatgcaccagaaagagcagttcgcttttggggtggatacagagctgaactgctttgtgctgcagatggattacaagggagatgccgtggccttctttgtcctccctagcaagggcaagatgaggcaactggaacaggccttgtcagccagaacactgagaaagtggagccactcactccagaaaaggtggatagaggtgttcatccccagattttccatttctgcctcctacaatctggaaaccatcctcccgaagatgggcatccaaaatgtctttgacaaaaatgctgatttttctggaattgcaaagagagactccctgcaggtttctaaagcaacccacaaggctgtgctggatgtcagtgaagagggcactgaggccacagcagctaccaccaccaagttcatagtccgatcgaaggatggcccctcttacttcactgtctccttcaataggaccttcctgatgatgattacaaataaagccacagacggtattctctttctagggaaagtggaaaatcccactaaatcctaggtgggaaatggcctgttaactgatggcacattgctaatgcacaagaaataacaaaccacatccctctttctgttctgagggtgcatttgaccccagtggagctggattcgctggcagggatgccacttccaaggctcaatcaccaaaccatcaacagggaccccagtcacaagccaacacccattaaccccagtcagtgcccttttccacaaattctcccaggtaactagcttcatgggatgttgctgggttaccatatttccattccttggggctcccaggaatggaaatacgccaacccaggttaggcacctctattgcagaattacaataacacattcaataaaactaaaatatgaattcatctgtc

SEQ ID NO: 8559 - protein, 335 aa, Homo sapiens
MQGQGRRRGTCKDIFCSKMASYLYGVLFAVGLCAPIYCVSPANAPSAYPRPSSTKSTPASQVYSLNTDFAFRLYRRLVLETPSQNIFFSPARINSHVKKKTQGKVVDIIQGLDLLTAMVLVNHIFFKAKWEKPFHPEYTRKNFPFLVGEQVTVHVPMMHQKEQFAFGVDTELNCFVLQMDYKGDAVAFFVLPSKGKMRQLEQALSARTLRKWSHSLQKRWIEVFIPRFSISASYNLETILPKMGIQNVFDKNADFSGIAKRDSLQVSKATHKAVLDVSEEGTEATAATTTKFIVRSKDGPSYFTVSFNRTFLMMITNKATDGILFLGKVENPTKS

SEQ ID NO: 8560 - DNA, 1455 bp, Homo sapiens
ggagggagaggagagattaaagtgaggagagagctacaaccaagtaagcaagtgtcagggctcaccaaccatgcaaggacagggcaggagaagaggaacctgcaaagtccatgaagcagaaacatcaaaaagcatgggatttggaatttgagacctgactttgaagcccacacagaacacagacaagtcaaccatgctatttgggcaaagacctgaccttgaagatgggaagtgccctcttcgtcaagaaggagctgcagctgcaggcaaatttcttgggcaatgtcaagaggctgtatgaagcagaagtcttttctacagatttctccaacccctccattgcccaggcgaggatcaacagccatgtgaaaaagaagacccaagggaaggttgtagacataatccaaggccttgaccttctgacggccatggttctggtgaaccacattttctttaaagccaagtgggagaagccctttcaccctgaatatacaagaaagaacttcccattcctggtgggcgagcaggtcactgtgcatgtccccatgatgcaccagaaagagcagttcgcttttggggtggatacagagctgaactgctttgtgctgcagatggattacaagggagatgccgtggccttctttgtcctccctagcaagggcaagatgaggcaactggaacaggccttgtcagccagaacactgagaaagtggagccactcactccagaaaaggtggatagaggtgttcatccccagattttccatttctgcctcctacaatctggaaaccatcctcccgaagatgggcatccaaaatgtctttgacaaaaatgctgatttttctggaattgcaaagagagactccctgcaggtttctaaagcaacccacaaggctgtgctggatgtcagtgaagagggcactgaggccacagcagctaccaccaccaagttcatagtccgatcgaaggatggcccctcttacttcactgtctccttcaataggaccttcctgatgatgattacaaataaagccacagacggtattctctttctagggaaagtggaaaatcccactaaatcctaggtgggaaatggcctgttaactgatggcacattgctaatgcacaagaaataacaaaccacatccctctttctgttctgagggtgcatttgaccccagtggagctggattcgctggcagggatgccacttccaaggctcaatcaccaaaccatcaacagggaccccagtcacaagccaacacccattaaccccagtcagtgcccttttccacaaattctcccaggtaactagcttcatgggatgttgctgggttaccatatttccattccttggggctcccaggaatggaaatacgccaacccaggttaggcacctctattgcagaattacaataacacattcaataaaactaaaatatgaattcatctgtc

SEQ ID NO: 8561 - protein, 286 aa, Homo sapiens
MGSALFVKKELQLQANFLGNVKRLYEAEVFSTDFSNPSIAQARINSHVKKKTQGKVVDIIQGLDLLTAMVLVNHIFFKAKWEKPFHPEYTRKNFPFLVGEQVTVHVPMMHQKEQFAFGVDTELNCFVLQMDYKGDAVAFFVLPSKGKMRQLEQALSARTLRKWSHSLQKRWIEVFIPRFSISASYNLETILPKMGIQNVFDKNADFSGIAKRDSLQVSKATHKAVLDVSEEGTEATAATTTKFIVRSKDGPSYFTVSFNRTFLMMITNKATDGILFLGKVENPTKS

SEQ ID NO: 8562 - DNA, 1752 bp, Homo sapiens
agctggagggagaggagagattaaagtgaggagagagctacaaccaagtaagcaagtgtcagggctcaccaaccatgcaaggacagggcaggagaagaggaacctgcaaagacatattttgttccaaaatggcatcttacctttatggagtactctttgctgttggcctctgtgctccaatctactgtgtgtccccggccaatgcccccagtgcatacccccgcccttcctccacaaagagcacccctgcctcacaggtgtattccctcaacaccgactttgccttccgcctataccgcaggctggttttggagaccccgagtcagaacatcttcttctcccctgtgagtgtctccacttccctggccatgctctcccttggggcccactcagtcaccaagacccagattctccagggcctgggcttcaacctcacacacacaccagagtctgccatccaccagggcttccagcacctggttcactcactgactgttcccagcaaagacctgaccttgaagatgggaagtgccctcttcgtcaagaaggagctgcagctgcaggcaaatttcttgggcaatgtcaagaggctgtatgaagcagaagtcttttctacagatttctccaacccctccattgcccaggcgaggatcaacagccatgtgaaaaagaagacccaagggaaggttgtagacataatccaaggccttgaccttctgacggccatggttctggtgaaccacattttctttaaagccaagtgggagaagccctttcaccctgaatatacaagaaagaacttcccattcctggtgggcgagcaggtcactgtgcatgtccccatgatgcaccagaaagagcagttcgcttttggggtggatacagagctgaactgctttgtgctgcagatggattacaagggagatgccgtggccttctttgtcctccctagcaagggcaagatgaggcaactggaacaggccttgtcagccagaacactgagaaagtggagccactcactccagaaaaggtggatagaggtgttcatccccagattttccatttctgcctcctacaatctggaaaccatcctcccgaagatgggcatccaaaatgtctttgacaaaaatgctgatttttctggaattgcaaagagagactccctgcaggtttctaaagcaacccacaaggctgtgctggatgtcagtgaagagggcactgaggccacagcagctaccaccaccaagttcatagtccgatcgaaggatggcccctcttacttcactgtctccttcaataggaccttcctgatgatgattacaaataaagccacagacggtattctctttctagggaaagtggaaaatcccactaaatcctaggtgggaaatggcctgttaactgatggcacattgctaatgcacaagaaataacaaaccacatccctctttctgttctgagggtgcatttgaccccagtggagctggattcgctggcagggatgccacttccaaggctcaatcaccaaaccatcaacagggaccccagtcacaagccaacacccattaaccccagtcagtgcccttttccacaaattctcccaggtaactagcttcatgggatgttgctgggttaccatatttccattccttggggctcccaggaatggaaatacgccaacccaggttaggcacctctattgcagaattacaataacacattcaataaaactaaaatatgaattcatctgtc

SEQ ID NO: 8563 - protein, 435 aa, Homo sapiens; identical to SEQ ID NO: 972

SEQ ID NO: 8564 - DNA, 1346 bp, Homo sapiens
atcatttgcatgtctagctggagaataaaaataatatatcatttgcatgtcttagtaatgaagtcatgggtgtcgtggcatgagatcagctggagggagaggagagattaaagtgaggagagagctacaaccaagtaagcaagtgtcagggctcaccaaccatgcaaggacagggcaggagaagaggaacctgcaaagacatattttgttccaaaatggcatcttacctttatggagtactctttgctgttggcctctgtgctccaatctactgtgtgtccccggccaatgcccccagtgcatacccccgcccttcctccacaaagagcacccctgcctcacaggtgtattccctcaacaccgactttgccttccgcctataccgcaggctggttttggagaccccgagtcagaacatcttcttctcccctgtgagtgtctccacttccctggccatgctctcccttggggcccactcagtcaccaagacccagattctccagggcctgggcttcaacctcacacacacaccagagtctgccatccaccagggcttccagcacctggttcactcactgactgttcccagcaaagacctgaccttgaagatgggaagtgccctcttcgtcaagaaggagctgcagctgcaggcaaatttcttgggcaatgtcaagaggctgtatgaagcagaagtcttttctacagatttctccaacccctccattgcccaggcgaggatcaacagccatgtgaaaaagaagacccaagggaaggttgtagacataatccaaggccttgaccttctgacggccatggttctggtgaaccacattttctttaaagccaagtgggagaagccctttcaccctgaatatacaagaaagaacttcccattcctggtgggcgagcaggtcactgtgcatgtccccatgatgcaccagaaagagcagttcgcttttggggtggatacagagctgaactgctttgtgctgcagatggattacaagggagatgccgtggccttctttgtcctccctagcaagggcaagatgaggcaactggaacaggccttgtcagccagaacactgagaaagtggagccactcactccagaaaaggtggatagaggtgttcatccccagattttccatttctgcctcctacaatctggaaaccatcctcccgaagatgggcatccaaaatgtctttgacaaaaatgctgatttttctggaattgcaaagagagactccctgcaggtttctaaagtgagttgaatgaaaatatttgcaaaaaagtccaagctggaagcacctgcagaattaatcacatgctcttatttcgttgat

SEQ ID NO: 8565 - protein, 370 aa, Homo sapiens
MQGQGRRRGTCKDIFCSKMASYLYGVLFAVGLCAPIYCVSPANAPSAYPRPSSTKSTPASQVYSLNTDFAFRLYRRLVLETPSQNIFFSPVSVSTSLAMLSLGAHSVTKTQILQGLGFNLTHTPESAIHQGFQHLVHSLTVPSKDLTLKMGSALFVKKELQLQANFLGNVKRLYEAEVFSTDFSNPSIAQARINSHVKKKTQGKVVDIIQGLDLLTAMVLVNHIFFKAKWEKPFHPEYTRKNFPFLVGEQVTVHVPMMHQKEQFAFGVDTELNCFVLQMDYKGDAVAFFVLPSKGKMRQLEQALSARTLRKWSHSLQKRWIEVFIPRFSISASYNLETILPKMGIQNVFDKNADFSGIAKRDSLQVSKVS

SEQ ID NO: 8566 - DNA, 1156 bp, Homo sapiens
atcatttgcatgtctagctggagaataaaaataatatatcatttgcatgtcttagtaatgaagtcatgggtgtcgtggcatgagatcagctggagggagaggagagattaaagtgaggagagagctacaaccaagtaagcaagtgtcagggctcaccaaccatgcaaggacagggcaggagaagaggaacctgcaaaggctggttttggagaccccgagtcagaacatcttcttctcccctgtgagtgtctccacttccctggccatgctctcccttggggcccactcagtcaccaagacccagattctccagggcctgggcttcaacctcacacacacaccagagtctgccatccaccagggcttccagcacctggttcactcactgactgttcccagcaaagacctgaccttgaagatgggaagtgccctcttcgtcaagaaggagctgcagctgcaggcaaatttcttgggcaatgtcaagaggctgtatgaagcagaagtcttttctacagatttctccaacccctccattgcccaggcgaggatcaacagccatgtgaaaaagaagacccaagggaaggttgtagacataatccaaggccttgaccttctgacggccatggttctggtgaaccacattttctttaaagccaagtgggagaagccctttcaccctgaatatacaagaaagaacttcccattcctggtgggcgagcaggtcactgtgcatgtccccatgatgcaccagaaagagcagttcgcttttggggtggatacagagctgaactgctttgtgctgcagatggattacaagggagatgccgtggccttctttgtcctccctagcaagggcaagatgaggcaactggaacaggccttgtcagccagaacactgagaaagtggagccactcactccagaaaaggtggatagaggtgttcatccccagattttccatttctgcctcctacaatctggaaaccatcctcccgaagatgggcatccaaaatgtctttgacaaaaatgctgatttttctggaattgcaaagagagactccctgcaggtttctaaagtgagttgaatgaaaatatttgcaaaaaagtccaagctggaagcacctgcagaattaatcacatgctcttatttcgttgat

SEQ ID NO: 8567 - protein, 334 aa, Homo sapiens
MRSAGGRGEIKVRRELQPSKQVSGLTNHARTGQEKRNLQRLVLETPSQNIFFSPVSVSTSLAMLSLGAHSVTKTQILQGLGFNLTHTPESAIHQGFQHLVHSLTVPSKDLTLKMGSALFVKKELQLQANFLGNVKRLYEAEVFSTDFSNPSIAQARINSHVKKKTQGKVVDIIQGLDLLTAMVLVNHIFFKAKWEKPFHPEYTRKNFPFLVGEQVTVHVPMMHQKEQFAFGVDTELNCFVLQMDYKGDAVAFFVLPSKGKMRQLEQALSARTLRKWSHSLQKRWIEVFIPRFSISASYNLETILPKMGIQNVFDKNADFSGIAKRDSLQVSKVS

SEQ ID NO: 8568 - DNA, 908 bp, Homo sapiens
atagtatgagtatctccaataaaccagaagtggagcagaagcataagaatgtgtgaggcaggcaagagatcctgtagccagagtcctaagaggatcccagaaaggcctggacatagcaggagaggctccatggaggagtatggacttgggagaaggctccatcttgatgggcccatggggatctactcctggctggttgctactccagcaggcttggttttatgaatttggggagaaatgggtctttactttcaaggtggccctgaggccccaggaactgaggacctcagagctagaggaaaccctgaagagcttctctctggggcaaggacagaaggtggggtgaagggtaggaagaggaagcacacagccctccccactctcaagtcttctcatctttccctggaaaatctgattaggtagttctgcatgggacctggaaatttgcattttaatgagagcccaattacgcttgacatattttgttccaaaatggcatcttacctttatggagtactctttgctgttggcctctgtgctccaatctactgtgtgtccccggccaatgcccccagtgcatacccccgcccttcctccacaaagagcacccctgcctcacaggtgtattccctcaacaccgactttgccttccgcctataccgcaggctggttttggagaccccgagtcagaacatcttcttctcccctgtgagtgtctccacttccctggccatgctctcccttggggcccactcagtcaccaagacccagattctccagggcctgggcttcaacctcacacacacaccagagtctgccatccaccagggcttccagcacctggttcactcactgactgttcccagcaaagacctgaccttgaagatgggaagtgccctcttcgtcaa

SEQ ID NO: 8569 - protein, 158 aa, Homo sapiens
MGPGNLHFNESPITLDIFCSKMASYLYGVLFAVGLCAPIYCVSPANAPSAYPRPSSTKSTPASQVYSLNTDFAFRLYRRLVLETPSQNIFFSPVSVSTSLAMLSLGAHSVTKTQILQGLGFNLTHTPESAIHQGFQHLVHSLTVPSKDLTLKMGSALF

SEQ ID NO: 8570 - DNA, 1497 bp, Homo sapiens
ggccttactcttccaagaggccatggaagtataaataataaagcaagaaaggcagatgcatttggctggctcagtggacttctgaatgtactgtgagtatgagaccttcccttccaaaagatccggtgcttcttgtctattccacacgaagcttgcttcagatcgagggaggatgtagcactgtccacaggtctactactcaacaggatattcttcaaggaaaatgaaccccacactaggcctggccatttttctggctgttctcctcacggtgaaaggtcttctaaagccgagcttctcaccaaggaattataaagctttgagcgaggtccaaggatggaagcaaaggatggcagccaaggagcttgcaaggcagaacatggacttaggctttaagctgctcaagaagctggccttttacaaccctggcaggaacatcttcctatcccccttgagcatctctacagctttctccatgctgtgcctgggtgcccaggacagcaccctggacgagatcaagcaggggttcaacttcagaaagatgccagaaaaagatcttcatgagggcttccattacatcatccacgagctgacccagaagacccaggacctcaaactgagcattgggaacacgctgttcattgaccagaggctgcagccacagcgtaagtttttggaagatgccaagaacttttacagtgccgaaaccatccttaccaactttcagaatttggaaatggctcagaagcagatcaatgactttatcagtcaaaaaacccatgggaaaattaacaacctgatcgagaatatagaccccggcactgtgatgcttcttgcaaattatattttctttcgagccaggtggaaacatgagtttgatccaaatgtaactaaagaggaagatttctttctggagaaaaacagttcagtcaaggtgcccatgatgttccgtagtggcatataccaagttggctatgacgataagctctcttgcaccatcctggaaataccctaccagaaaaatatcacagccatcttcatccttcctgatgagggcaagctgaagcacttggagaagggattgcaggtggacactttctccagatggaaaacattactgtcacgcagggtcgtagacgtgtctgtacccagactccacatgacgggcaccttcgacctgaagaagactctctcctacataggtgtctccaaaatctttgaggaacatggtgatctcaccaagatcgcccctcatcgcagcctgaaagtgggcgaggctgtgcacaaggctgagctgaagatggatgagaggggtacggaaggggccgctggcaccggagcacagactctgcccatggagacaccactcgtcgtcaagatagacaaaccctatctgctgctgatttacagcgagaaaataccttccgtgctcttcctgggaaagattgttaaccctattggaaaataaaggagaattcctgcttgccacagaccccg

SEQ ID NO: 8571 - protein, 414 aa, Homo sapiens; identical to SEQ ID NO: 974

SEQ ID NO: 8572 - DNA, 2070 bp, Homo sapiens
ctcccaggtgcctggcagagagtcctcaccagccccctgccggatgtctggctggcatctgaggggactgaacatggcaagaagcaaaacagcagcacaagaaaccagtttcttcatctgaaaccgagcaggctctactccagaacagaacccacagtcccaggcgctgggccttcttcttaagttgggaaatcactcatccccaggagaaaaaaagagcaaaagcttccagtactggggatgtggggagaggttttttaaaaatatcagcccaacatatgggaaaatatgggatgcaggcatccccaggtgtcaagcgtccagatccgtagacacactgggacgatggtgatcagtatcactccctctgactcatcggccctacagggaagacaccatgctggtgcacagtcggtgccaaacccgcgtttgtaaatgaataagtgttgctgccctggtggaagcccagctcatgtggaggaagccagcttgcagagagagcaagaacagagccagcacacacattggagcaaaggcaagggcagatggaaagttctggcggcatcatgccaaggctcccatccgaggcctccctgaaccccactctctcggcgccaccttggatgctgcgggctggtacattccccacttgcaaaactctgtggggctgggttcctctcttttctttccaaatatcccaggaagtggatggttttatccaaattcagcagacgagtaaaaagagtcttcgggaggtgcaatagctttctaggaatgaggatattcttcaaggaaaatgaaccccacactaggcctggccatttttctggctgttctcctcacggtgaaaggtcttctaaagccgagcttctcaccaaggaattataaagctttgagcgaggtccaaggatggaagcaaaggatggcagccaaggagcttgcaaggcagaacatggacttaggctttaagctgctcaagaagctggccttttacaaccctggcaggaacatcttcctatcccccttgagcatctctacagctttctccatgctgtgcctgggtgcccaggacagcaccctggacgagatcaagcaggggttcaacttcagaaagatgccagaaaaagatcttcatgagggcttccattacatcatccacgagctgacccagaagacccaggacctcaaactgagcattgggaacacgctgttcattgaccagaggctgcagccacagcgtaagtttttggaagatgccaagaacttttacagtgccgaaaccatccttaccaactttcagaatttggaaatggctcagaagcagatcaatgactttatcagtcaaaaaacccatgggaaaattaacaacctgatcgagaatatagaccccggcactgtgatgcttcttgcaaattatattttctttcgagccaggtggaaacatgagtttgatccaaatgtaactaaagaggaagatttctttctggagaaaaacagttcagtcaaggtgcccatgatgttccgtagtggcatataccaagttggctatgacgataagctctcttgcaccatcctggaaataccctaccagaaaaatatcacagccatcttcatccttcctgatgagggcaagctgaagcacttggagaagggattgcaggtggacactttctccagatggaaaacattactgtcacgcagggtcgtagacgtgtctgtacccagactccacatgacgggcaccttcgacctgaagaagactctctcctacataggtgtctccaaaatctttgaggaacatggtgatctcaccaagatcgcccctcatcgcagcctgaaagtgggcgaggctgtgcacaaggctgagctgaagatggatgagaggggtacggaaggggccgctggcaccggagcacagactctgcccatggagacaccactcgtcgtcaagatagacaaaccctatctgctgctgatttacagcgagaaaataccttccgtgctcttcctgggaaagattgttaaccctattggaaaataaaggagaattcctgcttgccacagaccccg

SEQ ID NO: 8573 - protein, 414 aa, Homo sapiens; identical to SEQ ID NO: 974

SEQ ID NO: 8574 - DNA, 1528 bp, Homo sapiens
aagtgagtcggcggaagtgggagcgcggcaagcggatggagccagcgagaaacacatagccagggttctgtcgcatgacccccgacggcacctgctccccatcagcagcatcatactccgatggataaactgagggctcagtgggtcatgacctgcccagagtcatggagggagtgagaggcagagccaggatgagctcccaggccctgaaacttctgggccagtggcctacacacagagcttcccacccttcctcattgggtttctgcaagccctccccaccccagcactctgcagggcctgggaagtgaaccagctgggaggattcttagagaagaaaagtgctgatttaagagaaactgcattatttgtgaaatacaaaattcatcttgtgggtgtaagagatgccttcgtggacggatgaagctcctggtactaagtagcaggagtgcagtgaagctgctgtgttctccagctcgtagttaagggccagtcaggatcagacatcttgccctgatggaaaagaagatgaacagatacctcctgacctggatagcaattaattctggggacctagatccccaaggactttaggatgaggcagcagtttggatttaggatcaacatggtatttaaaatataaaagcattgtagtgttggggaagcatcatttaaaagaacttgtggggtccctgtcaggcccctcttgagacaggccagccccacagaagagaaggcctagggctggctccctagggttgtgagaaactccagaacagtgttgacttctttcttcccctagggtcacaccagcatgtagcatgatgccttgcacacagtaggtgctcagtaaacacttttggaccactgaatgcaatgaccaatggataaaaacattgttcttcccttgaccagataagacccgcttccctgggcgtccacaggccgctggtgatgcacactcttctctgtgtggcctctgcctgccgggggaagccttgtgaccagtttctccccgctgagtcaagggagaatgagggggagcatgaacatttgcttgtttcccttatggcttctgaatctttattttattttttttaatgaaaatgtctacttgaatttaggtaaggaagaccttgctcttagtttttgaattttgaactagaaaaaaaaaaaaggtctttcaatgaacactagcagaacagtctaagcaatcatgataaagacctaattcctgcctctttctcctgctctgatggagctgatgacagcacaaatgggagagggagaatgtagcaaggacactgaaggacagagagttgtccaagccaccaggaaggtgaaagtgggaattcattttctgtgccattgggtggttccttaggaaaaaacgtagacaaagaaaaatattgtattatttgtggaaatcaagttcgtattgcaggtgtaagaaatgtctttgtgggttgacagcatttattgaacatgagcctttatttttggagctcctccaacgtaccatgcactg

SEQ ID NO: 8575 - protein, 48 aa, Homo sapiens
MHTLLCVASACRGKPCDQFLPAESRENEGEHEHLLVSLMASESLFYFF

SEQ ID NO: 8576 - DNA, 481 bp, Homo sapiens
atagctggtaaagcactctttctgggtgtgtctgtaagagtgtttctggaagagattagcatttgcatgggtagactgagtaaagaagacctgttctcaccaagtaagtgggcatcatccaatccactgagagcccagattgaacaaaaacacagagagaaattcccagcatatcctgcatctcattcttggtgtgaagcaggaacacgcactcattcctatttggctatagtcttcacagctttctactgtttcttttaaaagaaggaaactaaaataatataattcaatgttgtccagtcagctttgattactgtcggtccctgtgtgtgaagtgctgtgctggcttgaacgggacatgcaaaaatcaagaaggcaaggtccagtccttaaagccctagagcaagggttgacaaaccacagtacttgggctaaacccagcccaccacctgtttttgcaaataaagttttattggaacac

SEQ ID NO: 8577 - protein, 64 aa, Homo sapiens
MGRLSKEDLFSPSKWASSNPLRAQIEQKHREKFPAYPASHSWCEAGTRTHSYLAIVFTAFYCFF

SEQ ID NO: 8578 - DNA, 2203 bp, Homo sapiens
cactgtggaagctttgttcttttgctctttgcaataaatcttgctactgctcactctttgggtccacgctgcttttatgagctgtaacactcaccgcgaagatctgcagcttcactcctgagcccagcaagaccacgagcccaccgggaggaatgaacaactccagacacgctaccttaagagctgtaccactcaccgcgaaggtctgcagcttcactcctgagccagcgagaccacgaacccaccagaaggaagaaactccgaacacatctgaacatcagaagggacagactccagacacgccaccttaagagctgtaacactcaccgcgagggtccacggcttcattcttgaagtcagtgagaccaagaacccaccaattccggacacagtgctgagaatcatgccttgaaatctagcagctctgttaaaaactgagcaaggtgtacttcggggttgtgttgagaaggttggtgttcagctaaatcaggagggaaggccaaggaaaatcaggcttggcacctgtcaacagcttgttttcatttcctttccaatttaagaatgtgtttaacattctatcccagacaatgtgatggtcatgaagtctctgtcagagaggaaagagggagttaatctataatgaagatcaacagtgaagaggaaaggggtcttccctggaacgcttcagtcatatacgacattttacacaacaataatggacctgtgtaaggaggtatgtgtgggagaagattccagaaggtcttgagacactccagatgaaggttggtgtggggctgtgctgctggagcaccagagagtgaaaagaggttatctccctctgtgccaggccagagtgcagtggtgcaatcacggctcactgtagtctcaacctcctgggctcaagagatcctcccacttcagcctcccaagcagctaagactacagttattttattcttatgagcttgtgggctccatctaccaacctctgggcaaatgctcatctgacttccatagacacacagcaagcagacaaccacacaaagaggaagagggagaatatttaccagccatggaacatctgctctgtgcttatatctcatatgcattatctctaattatcaaaagaagacatgtccttaaccttggcacaacaaatctctaaatcgattgagacctgtctcagatacttcttggtttacaagatggaggctgaaattaaagagaaagatcctcactcaactcacagaggagcagaatgggaagaggacttagtgagaattccctgaacacaggagaaaaccgaagcccagagagtggatggccaagtccaaggtcacacagccaagtgcatccgagcagcgcaggatccaggtttcctgccccagtgctctttctgcagcccatgccacctgttttcatgctatctcagttcaccttccagctacacacctgcaatcagaaacagaaagtctgagagtgtgtgtggagccaaagaggggacagcagtggttagaagcaaggcacaagtcatacctacattcaaggagaggggaccatgcaaaggataaactgcagagagacaacagatttacatcccagacacattcacactgggccaagagcagctgccattgcagattcgagtcacgtccttttttccttccttctccttcttggagttacaacagaagctggggaggtgagagtgcagaaaggacgtggatgaagcagagaggcacgtgcctgtctcattcgcctctggatctgctgcatccaggactgtgccagcacaaagtgggagcccgataaatatttattgaagaaatgaaaggtgacaaaaggcagaaggagggagaccccaaaaagaggtaaatttggtatcttagcaagtgggtgactaccactgtctgggggaaagctgatacacgaggacttgacaataattacagcagtaacaatcgctactattttgttttgagatgaattttagtttctgaaattgtccaaagcacttttatcaatagaaacttgttacacatccctccaacagggagaagcagcacaggaagctgccccctcaaacactaaaggctcctggagctattcacagtgctggggaacaaccagaggaggaggaggacagagggagagaatactttttttaaaaatcccaaacaaaaccaaattctatacatgtatat

SEQ ID NO: 8579 - protein, 163 aa, Homo sapiens; identical to SEQ ID NO: 986

SEQ ID NO: 8580 - DNA, 2810 bp, Homo sapiens
cacgctgcttttatgagctgtaacactcaccgcgaagatctgcagcttcactcctgagcccagcaagaccacgagcccaccgggaggaatgaacaactccagacacgctaccttaagagctgtaccactcaccgcgaaggtctgcagcttcactcctgagccagcgagaccacgaacccaccagaaggaagaaactccgaacacatctgaacatcagaagggacagactccagacacgccaccttaagagctgtaacactcaccgcgagggtccacggcttcattcttgaagtcagtgagaccaagaacccaccaattccggacacagtgctgagaatcatgccttgaaatctagcagctctgttaaaaactgagcaaggtgtacttcggggttgtgttgagaaggttggtgttcagctaaatcaggagggaaggccaaggaaaatcaggcttggcacctgtcaacaggtgggacccaatagccaagcaaatggtcctgcaaactgtactacccaacgttcacagcaaggattccaacttctcaccagggcatggaaaatttgccttcatgtcaaccaccaccttagcccttgactacccaacggactcttcccaagtcaacagccacttcctccctggggcttaacaggcattccttgaagcctgccccgggcagttagtccttcccttttgtgtgaactctcggctgttttcgttgtctgcacacagagcagtggtctagggagcgaagggttttggaatggaccttttcctttcttagcttgctgtagggattgtgcttcagctaagtaaagtggaaaaacagaagtacaaaagcaacagccccagatctaagggcaccgtagctctggaatctggattttattccagattcaaccctcagcagggagttgaagtggtcagccctgtgctttacaaggctgattgggcagcacccatagtagaattgtcaatataaagtaattgaaaggatcagaatccagggttttcgttgtttttaagtttttaagttttaaaaacaaagttgtttttgttcgtttttaagtttacttctctttaatcggtctcactttattgaccaggctggtttcgaactcctgggcttaagtgatttctcctgtctcagcttctcaaagtgctgggattacaggcgtgagccgctgcacccagcccagaatccagttttaaagagtttattcaagccaaaagctgggaatggccatctgagaaacacagactctaggaaaatggggccagggccctgaagttaaaagttaaagtcttgcttacataggcagaaagcaaagacatttagtaaccttgtagaacattttcttgtataacttttcttgttttaactttcttgtttaacattttctatgcaaggctggtttatgagttacaacctataattaattataggttgttcccctgcctccaccttgttttcttttctctacagcttgttttcatttcctttccaatttaagaatgtgtttaacattctatcccagacaatgtgatggtcatgaagtctctgtcagagaggaaagagggagttaatctataatgaagatcaacagtgaagaggaaaggggtcttccctggaacgcttcagtcatatacgacattttacacaacaataatggacctgtgtaaggaggtatgtgtgggagaagattccagaaggtcttgagacactccagatgaaggttggtgtggggctgtgctgctggagcaccagagagtgaaaagaggttatctccctctgtgccaggccagagtgcagtggtgcaatcacggctcactgtagtctcaacctcctgggctcaagagatcctcccacttcagcctcccaagcagctaagactacagacatgtccttaaccttggcacaacaaatctctaaatcgattgagacctgtctcagatacttcttggtttacaagatggaggctgaaattaaagagaaagatcctcactcaactcacagaggagcagaatgggaagaggacttagtgagaattccctgaacacaggagaaaaccgaagcccagagagtggatggccaagtccaaggtcacacagccaagtgcatccgagcagcgcaggatccaggtttcctgccccagtgctctttctgcagcccatgccacctgttttcatgctatctcagttcaccttccagctacacacctgcaatcagaaacagaaagtctgagagtgtgtgtggagccaaagaggggacagcagtggttagaagcaaggcacaagtcatacctacattcaaggagaggggaccatgcaaaggataaactgcagagagacaacagatttacatcccagacacattcacactgggccaagagcagctgccattgcagattcgagtcacgtccttttttccttccttctccttcttggagttacaacagaagctggggaggtgagagtgcagaaaggacgtggatgaagcagagaggcacgtgcctgtctcattcgcctctggatctgctgcatccaggactgtgccagcacaaagtgggagcccgataaatatttattgaagaaatgaaaggtgacaaaaggcagaaggagggagaccccaaaaagagcagcacaggaagctgccccctcaaacactaaaggctcctggagctattcacagtgctggggaacaaccagaggaggaggaggacagagggagagaatactttttttaaaaatcccaaacaaaaccaaattctatacatgtatatctcgagtgagtaaatgtgtaacactcagca

SEQ ID NO: 8581 - protein, 163 aa, Homo sapiens; identical to SEQ ID NO: 986

SEQ ID NO: 8582 - DNA, 3923 bp, Homo sapiens
cacgctgcttttatgagctgtaacactcaccgcgaagatctgcagcttcactcctgagcccagcaagaccacgagcccaccgggaggaatgaacaactccagacacgctaccttaagagctgtaccactcaccgcgaaggtctgcagcttcactcctgagccagcgagaccacgaacccaccagaaggaagaaactccgaacacatctgaacatcagaagggacagactccagacacgccaccttaagagctgtaacactcaccgcgagggtccacggcttcattcttgaagtcagtgagaccaagaacccaccaattccggacacagtgctgagaatcatgccttgaaatctagcagctctgttaaaaactgagcaaggtgtacttcggggttgtgttgagaaggttggtgttcagctaaatcaggagggaaggccaaggaaaatcaggcttggcacctgtcaacaggtgggacccaatagccaagcaaatggtcctgcaaactgtactacccaacgttcacagcaaggattccaacttctcaccagggcatggaaaatttgccttcatgtcaaccaccaccttagcccttgactacccaacggactcttcccaagtcaacagccacttcctccctggggcttaacaggcattccttgaagcctgccccgggcagttagtccttcccttttgtgtgaactctcggctgttttcgttgtctgcacacagagcagtggtctagggagcgaagggttttggaatggaccttttcctttcttagcttgctgtagggattgtgcttcagctaagtaaagtggaaaaacagaagtacaaaagcaacagccccagatctaagggcaccgtagctctggaatctggattttattccagattcaaccctcagcagggagttgaagtggtcagccctgtgctttacaaggctgattgggcagcacccatagtagaattgtcaatataaagtaattgaaaggatcagaatccagggttttcgttgtttttaagtttttaagttttaaaaacaaagttgtttttgttcgtttttaagtttacttctctttaatcggtctcactttattgaccaggctggtttcgaactcctgggcttaagtgatttctcctgtctcagcttctcaaagtgctgggattacaggcgtgagccgctgcacccagcccagaatccagttttaaagagtttattcaagccaaaagctgggaatggccatctgagaaacacagactctaggaaaatggggccagggccctgaagttaaaagttaaagtcttgcttacataggcagaaagcaaagacatttagtaaccttgtagaacattttcttgtataacttttcttgttttaactttcttgtttaacattttctatgcaaggctggtttatgagttacaacctataattaattataggttgttcccctgcctccaccttgttttcttttctctacagcttgttttcatttcctttccaatttaagaatgtgtttaacattctatcccagacaatgtgatggtcatgaagtctctgtcagagaggaaagagggagttaatctataatgaagatcaacagtgaagaggaaaggggtcttccctggaacgcttcagtcatatacgacattttacacaacaataatggacctgtgtaaggaggtatgtgtgggagaagattccagaaggtcttgagacactccagatgaaggttggtgtggggctgtgctgctggagcaccagagagtgaaaagaggttatctccctctgtgccaggccagagtgcagtggtgcaatcacggctcactgtagtctcaacctcctgggctcaagagatcctcccacttcagcctcccaagcagctaagactacagttattttattcttatgagcttgtgggctccatctaccaacctctgggcaaatgctcatctgacttccatagacacacagcaagcagacaaccacacaaagaggaagagggagaatatttaccagccatggaacatctgctctgtgcttatatctcatatgcattatctctaattatcaaaagaaggttagaagcaaggcacaagtcatacctacattcaaggagaggggaccatgcaaaggataaactgcagagagacaacagatttacatcccagacacattcacactgggccaagagcagctgccattgcagattcgagtcacgtccttttttccttccttctccttcttggagttacaacagaagctggggaggtgagagtgcagaaaggacgtggatgaagcagagaggcacgtgcctgtctcattcgcctctggatctgctgcatccaggactgtgccagcacaaagtgggagcccgataaatatttattgaagaaatgaaaggtgacaaaaggcagaaggagggagaccccaaaaagagagatgggatcccactatattgcacaggctggtctcaaactcctgagctcaagcgatcctcctgccttggcctcccacggtgctgagactacaggtgtgagccaccactcccagcctgatttatattttataaagaggcaacgatggagtacacagctgagcaatctcttgcatttctggaccttgagcatcaggaagcttagggagggtgaaaactcagaagaaagctcagagttgagacctttgattttttgcccagagagtccagctaacacactttataacccaaaaggccttacaaatatttcagagcagaggcagcatttttgcactggataaacaaaggtacggtaatttcttcatagtttattttcattacaagtaattcttttcctgaagaaaaatttatatttcagatttatttcccctctcaaaggggaggggagttataatattctgtttccatagcaccattcctcaagatcaaacccaggcaggcatttttacagcacacacttccatatgtcattgctaatcctcgcaaccttgaggaaactgaggtgcaaaggggttgaggaatgtgttcaccatcccaaagccaacgaagtgccagaacccaaatccaagcttggctgtctcatccccaaggacgtactctttatgccgttccttatgacttttcatgcagcaggtgcaaggcagcaagaatttggctcttctgacatttatcaggcacctggtatgtgccaggcctactgtaaaccccaagatgacatggtccatgtctatccattcagcatcagagagactgttatcaggacttgaggcctgagacacagccctgaatcagatgcaggcctctggtgtttgcaaaggatgcgtgagtatgtgtatgtgtatgcgtgcattgtgtgtaggggtgtgtgtatgttgggggttgggggcagaaaatgctccctgaactgttggtattaaggcagatctttgatggagggactggggtgtggagacttgaaccctagtttcaaagtggggacctcgaacactagtatggccagcagacaggctggagttgctgaattgtcagctaggtctttaatccactccccttctctaaatcagggtggaattggactcagggctggttcagggctgaggtttccgggggatgaatgattccagacagtgggaaggggtgatggatgatgaacctggcaagtcacaggactatggacttggctgtatgttgcatgtatgtgtaagatctgagttgagacctttgatttttgcccagaaagtccagctaacatactatataagccagtgagaccagccagtgtctgttcattgcctctgccttgcccctatgcctgcccgcctcctatagcaggtccctatagcataatgaaaatgcgaacaaccttttctctggacactggggaatctagtctggtggataaagatggatggctgttaaacgatc

SEQ ID NO: 8583 - protein, 119 aa, Homo sapiens; identical to SEQ ID NO: 984

SEQ ID NO: 8584 - DNA, 601 bp, Homo sapiens
catttcctttccaatttaagaatgtgtttaacattctatcccagacaatgtgatggtcatgaagtctctgtcagagaggaaagagggagttaatctataatgaagatcaacagtgaagaggaaaggggtcttccctggaacgcttcagtcatatacgacattttacacaacaataatggacctgtgtaaggaggtatgtgtgggagaagattccagaaggtcttgagacactccagatgaaggttggtgtggggctgtgctgctggagcaccagagagtgaaaagaggttatctccctctgtgccaggccagagtgcagtggtgcaatcacggctcactgtagtctcaacctcctgggctcaagagatcctcccacttcagcctcccaagcagctaagactacaggcacgtgtcatcatatctggcaaattaaaaaaaaaattatagagatgggctctccctgtgtttccctggttggtctcaaactcctgggctcaagtgatcctcccatcttggcctcccaacttactgggattacaggcatttgccactgtgcccagcccatttcaatatttctgatcaataaatgtgcctgtccttc

SEQ ID NO: 8585 - protein, 49 aa, Homo sapiens
MGSPCVSLVGLKLLGSSDPPILASQLTGITGICHCAQPISIFLINKCAC

SEQ ID NO: 8586 - DNA, 3780 bp, Homo sapiens; identical to SEQ ID NO: 975

SEQ ID NO: 8587 - protein, 141 aa, Homo sapiens; identical to SEQ ID NO: 976

SEQ ID NO: 8588 - DNA, 3663 bp, Homo sapiens; identical to SEQ ID NO: 981

SEQ ID NO: 8589 - protein, 105 aa, Homo sapiens; identical to SEQ ID NO: 982

SEQ ID NO: 8590 - DNA, 3398 bp, Homo sapiens; identical to SEQ ID NO: 979

SEQ ID NO: 8591 - protein, 141 aa, Homo sapiens; identical to SEQ ID NO: 976

SEQ ID NO: 8592 - DNA, 4232 bp, Homo sapiens; identical to SEQ ID NO: 977

SEQ ID NO: 8593 - protein, 141 aa, Homo sapiens; identical to SEQ ID NO: 976

SEQ ID NO: 8594 - DNA, 3132 bp, Homo sapiens
acatgtccttaaccttggcacaacaaatctctaaatcgattgagacctgtctcagatacttcttggtttacaagatggaggctgaaattaaagagaaagatcctcactcaactcacagaggagcagaatgggaagaggacttagtgagaattccctgaacacaggagaaaaccgaagcccagagagtggatggccaagtccaaggtcacacagccaagtgcatccgagcagcgcaggatccaggtttcctgccccagtgctctttctgcagcccatgccacctgttttcatgctatctcagttcaccttccagctacacacctgcaatcagaaacagaaagtctgagagtgtgtgtggagccaaagaggggacagcagtggtgaggccagtttcatgtcttgtgatttattttctccctttctttttggactttaatcttaagtggacagcaatttggaacagtgtcagcaccttgttggattgtgctgtttgggagaggtgacacagagtattttaaaagagcaggttaagaacttttcacaaggaatcaattgagagaaaataaaatagaaacagactgtcccacatttgggctgagcaccaaacacatttttttttttttttttgagactgagtcttgctctgtcactcaggctggaatgcagtggcgcgatctcggctcactgcagccttcacctcccgggttcaagtgattcttctgcctcagcctcccaagtagctgggattacaggtgcccaccaccatgccaggctaatttttgtatttttagtagagacgaggtttcaccatgttggccaggctggtcttgaactcctgaccaagtgatccacctgcttcggcctcccaaagtgctgggattacaggcacgagccaccgcacctggcctcaaacaagctttttaattgcattcagaagtgcaccaactaggcacagacctctggcatggagacagaatgggaggttcttggtgtctggcctggtcttgcagaaatcagggagttgtggggaccaggcagccactgtgcatcagataggagtttcagcagcaggcaacagaaagcctgccaatgtagctgaaataagaagggcttatttttatccctgaacagaagcttccagcactggttcatcagatcagggcactgagctggcatccccatttatacagttttcctttccttcacctttgtaagatgcctggcacagctctgagcatcaaatatctgtgccatgtgggagcacacgaggggacaagtggggaatagggtctcctctgtcctctgtccccaggctggcttctctcgtggtagaaggacccccacagcaccaggcctcataactaccctgctggtaaactgcaggtgctgtcacggcttcctgccttcgtatatgaaatgttccttggcagctggactgctgtttgtttaccgcacgcacagctctgctgcctcttggttacaccagtgagctattgctccatgacaagccacaccgaaatgtagcaagcacttattgttgcccacatgtgtcaagtcagttgagtgtttctgccaaccggggcctggcttggcccaccttggctgagcttgctctggtgctagggtcagctagacaggtcggcaggagaccagctgctctagaagagcctggacaggatgaattggttctccttccacgtgcatcttgcatccctccagccaaggatttgaacccaggtctcgtctgactccaaatgcaccaagaggatggagcccagagtgacacagaggaagaggcccctggatggatgcatggggaaggttagaagcaaggcacaagtcatacctacattcaaggagaggggaccatgcaaaggataaactgcagagagacaacagatttacatcccagacacattcacactgggccaagagcagctgccattgcagattcgagtcacgtccttttttccttccttctccttcttggagttacaacagaagctggggaggtgagagtgcagaaaggacgtggatgaagcagagaggcacgtgcctgtctcattcgcctctggatctgctgcatccaggactgtgccagcacaaagtgggagcccgataaatatttattgaagaaatgaaaggtgacaaaaggcagaaggagggagaccccaaaaagagtatgaacccagcatcacagtgcacttgtggcagatggcagtgcatacccgggagctactctcctccggccagatgcccttctcccagctgcccgccgtgtggcagctctaccccgggaggaagtaccgagcagcggattccagtttctgggaaatagcagaccatggccagattgactctatggagcagctggtcctaacatatcagccggagaggaaagactgacactgggagtggctggccctgctggccctgcctcttctggcctggtgtctcctcatgccccctcagtgaggatcttcatgtacctgctcttctgtttgcacacccagcatagcctccttgcaggcagaaggcagtagggcccctgcacactcagtttctctcgttttccttagttatcagtcctgtcctgtcccactcaggtctgtacttagggcagctggcctggatgggcttcactggggccctgtctgtgtgctgagccagtttcccctgctggctgcaagctgtgggttctttctcctctgtgcccctcatgctgatcttctagatgccactcccaaatccccttcatacccaccaggatgtgtgcccagccaggcctccagcacccccagtgcagctcgtgattggaaactcaccatcggcaggcagtggttcggtttaagagatggcattagagggagcccagtctggatgtggacttggatgccctgtgggtatcagttctgctgacactttggcccgaaatagatccagtgctgagcaagcaatgtacaccagagcctcagtgagcccatctgcacagtggggagcatggagggatgggtttggcctgtgcttctgcttattcagtccttcagctcacggaagggatgctagtccgtgaaggtgacctcacagtactggttaattaaactttattgctcactgtccacttttgtgctg

SEQ ID NO: 8595 - protein, 105 aa, Homo sapiens; identical to SEQ ID NO: 982

SEQ ID NO: 8596 - DNA, 3587 bp, Homo sapiens
acatgtccttaaccttggcacaacaaatctctaaatcgattgagacctgtctcagatacttcttggtttacaagatggaggctgaaattaaagagaaagatcctcactcaactcacagaggagcagaatgggaagaggacttagtgagaattccctgaacacaggagaaaaccgaagcccagagagtggatggccaagtccaaggtcacacagccaagtgcatccgagcagcgcaggatccaggtttcctgccccagtgctctttctgcagcccatgccacctgttttcatgctatctcagttcaccttccagctacacacctgcaatcagaaacagaaagtctgagagtgtgtgtggagccaaagaggggacagcagtggtgaggccagtttcatgtcttgtgatttattttctccctttctttttggactttaatcttaagtggacagcaatttggaacagtgtcagcaccttgttggattgtgctgtttgggagaggtgacacagagtattttaaaagagcaggttaagaacttttcacaaggaatcaattgagagaaaataaaatagaaacagactgtcccacatttgggctgagcaccaaacacatttttttttttttttttgagactgagtcttgctctgtcactcaggctggaatgcagtggcgcgatctcggctcactgcagccttcacctcccgggttcaagtgattcttctgcctcagcctcccaagtagctgggattacaggtgcccaccaccatgccaggctaatttttgtatttttagtagagacgaggtttcaccatgttggccaggctggtcttgaactcctgaccaagtgatccacctgcttcggcctcccaaagtgctgggattacaggcacgagccaccgcacctggcctcaaacaagctttttaattgcattcagaagtgcaccaactaggcacagacctctggcatggagacagaatgggaggttcttggtgtctggcctggtcttgcagaaatcagggagttgtggggaccaggcagccactgtgcatcagataggagtttcagcagcaggcaacagaaagcctgccaatgtagctgaaataagaagggcttatttttatccctgaacagaagcttccagcactggttcatcagatcagggcactgagctggcatccccatttatacagttttcctttccttcacctttgtaagatgcctggcacagctctgagcatcaaatatctgtgccatgtgggagcacacgaggggacaagtggggaatagggtctcctctgtcctctgtccccaggctggcttctctcgtggtagaaggacccccacagcaccaggcctcataactaccctgctggtaaactgcaggtgctgtcacggcttcctgccttcgtatatgaaatgttccttggcagctggactgctgtttgtttaccgcacgcacagctctgctgcctcttggttacaccagtgagctattgctccatgacaagccacaccgaaatgtagcaagcacttattgttgcccacatgtgtcaagtcagttgagtgtttctgccaaccggggcctggcttggcccaccttggctgagcttgctctggtgctagggtcagctagacaggtcggcaggagaccagctgctctagaagagcctggacaggatgaattggttctccttccacgtgcatcttgcatccctccagccaaggatttgaacccaggtctcgtctgactccaaatgcaccaagaggatggagcccagagtgacacagaggaagaggcccctggatggatgcatggggaagatcacgggaattacaagtgacatcctgaagtatgatcacaaatgtttcaaattaagccttcctgctaagtttccagaggtgtgtggctcggacgaagtgtttccagaccctgatctactgcatgtcctgcctgttgctggttctttgcagcagtccattgaccaatgctgtctacagcttgagagcctctgcaggccagggctgctctgtgcacatcctacgttactattcaaactgcacagcagcatgaaaaacaggcccttcttttctctcatttacacatatgtgaagaagacacagcaagtgagaaaacgtgaccgaaagccacgcggacaggtggccgcagggccaaacccaacttccgtgatgtgatctggctacagtttggagcccacatatttcaatagttatccccaggcctggcacgtcaaagaggctccagaaatgtttgctgagttagaagcaaggcacaagtcatacctacattcaaggagaggggaccatgcaaaggataaactgcagagagacaacagatttacatcccagacacattcacactgggccaagagcagctgccattgcagattcgagtcacgtccttttttccttccttctccttcttggagttacaacagaagctggggaggtgagagtgcagaaaggacgtggatgaagcagagaggcacgtgcctgtctcattcgcctctggatctgctgcatccaggactgtgccagcacaaagtgggagcccgataaatatttattgaagaaatgaaaggtgacaaaaggcagaaggagggagaccccaaaaagagtatgaacccagcatcacagtgcacttgtggcagatggcagtgcatacccgggagctactctcctccggccagatgcccttctcccagctgcccgccgtgtggcagctctaccccgggaggaagtaccgagcagcggattccagtttctgggaaatagcagaccatggccagattgactctatggagcagctggtcctaacatatcagccggagaggaaagactgacactgggagtggctggccctgctggccctgcctcttctggcctggtgtctcctcatgccccctcagtgaggatcttcatgtacctgctcttctgtttgcacacccagcatagcctccttgcaggcagaaggcagtagggcccctgcacactcagtttctctcgttttccttagttatcagtcctgtcctgtcccactcaggtctgtacttagggcagctggcctggatgggcttcactggggccctgtctgtgtgctgagccagtttcccctgctggctgcaagctgtgggttctttctcctctgtgcccctcatgctgatcttctagatgccactcccaaatccccttcatacccaccaggatgtgtgcccagccaggcctccagcacccccagtgcagctcgtgattggaaactcaccatcggcaggcagtggttcggtttaagagatggcattagagggagcccagtctggatgtggacttggatgccctgtgggtatcagttctgctgacactttggcccgaaatagatccagtgctgagcaagcaatgtacaccagagcctcagtgagcccatctgcacagtggggagcatggagggatgggtttggcctgtgcttctgcttattcagtccttcagctcacggaagggatgctagtccgtgaaggtgacctcacagtactggttaattaaactttattgctcactgtccacttttgtgctg

SEQ ID NO: 8597 - protein, 141 aa, Homo sapiens; identical to SEQ ID NO: 976

SEQ ID NO: 8598 - DNA, 3520 bp, Homo sapiens
acatgtccttaaccttggcacaacaaatctctaaatcgattgagacctgtctcagatacttcttggtttacaagatggaggctgaaattaaagagaaagatcctcactcaactcacagaggagcagaatgggaagaggacttagtgagaattccctgaacacaggagaaaaccgaagcccagagagtggatggccaagtccaaggtcacacagccaagtgcatccgagcagcgcaggatccaggtttcctgccccagtgctctttctgcagcccatgccacctgttttcatgctatctcagttcaccttccagctacacacctgcaatcagaaacagaaagtctgagagtgtgtgtggagccaaagaggggacagcagtggtgaggccagtttcatgtcttgtgatttattttctccctttctttttggactttaatcttaagtggacagcaatttggaacagtgtcagcaccttgttggattgtgctgtttgggagaggtgacacagagtattttaaaagagcaggttaagaacttttcacaaggaatcaattgagagaaaataaaatagaaacagactgtcccacatttgggctgagcaccaaacacatttttttttttttttttgagactgagtcttgctctgtcactcaggctggaatgcagtggcgcgatctcggctcactgcagccttcacctcccgggttcaagtgattcttctgcctcagcctcccaagtagctgggattacaggtgcccaccaccatgccaggctaatttttgtatttttagtagagacgaggtttcaccatgttggccaggctggtcttgaactcctgaccaagtgatccacctgcttcggcctcccaaagtgctgggattacaggcacgagccaccgcacctggcctcaaacaagctttttaattgcattcagaagtgcaccaactaggcacagacctctggcatggagacagaatgggaggttcttggtgtctggcctggtcttgcagaaatcagggagttgtggggaccaggcagccactgtgcatcagataggagtttcagcagcaggcaacagaaagcctgccaatgtagctgaaataagaagggcttatttttatccctgaacagaagcttccagcactggttcatcagatcagggcactgagctggcatccccatttatacagttttcctttccttcacctttgtaagatgcctggcacagctctgagcatcaaatatctgtgccatgtgggagcacacgaggggacaagtggggaatagggtctcctctgtcctctgtccccaggctggcttctctcgtggtagaaggacccccacagcaccaggcctcataactaccctgctggtaaactgcaggtgctgtcacggcttcctgccttcgtatatgaaatgttccttggcagctggactgctgtttgtttaccgcacgcacagctctgctgcctcttggttacaccagtgagctattgctccatgacaagccacaccgaaatgtagcaagcacttattgttgcccacatgtgtcaagtcagttgagtgtttctgccaaccggggcctggcttggcccaccttggctgagcttgctctggtgctagggtcagctagacaggtcggcaggagaccagctgctctagaagagcctggacaggatgaattggttctccttccacgtgcatcttgcatccctccagccaaggatttgaacccaggtctcgtctgactccaaatgcaccaagaggatggagcccagagtgacacagaggaagaggcccctggatggatgcatggggaagatcacgggaattacaagtgacatcctgaagtatgatcacaaatgtttcaaattaagccttcctgctaagtttccagaggtgtgtggctcggacgaagtgtttccagaccctgatctactgcatgtcctgcctgttgctggttctttgcagcagtccattgaccaatgctgtctacagcttgagagcctctgcaggccagggctgctctgtgcacatcctacgttactattcaaactgcacagcagcatgaaaaacaggcccttcttttctctcatttacacatatgtgaagaagacacagcaagtgagaaaacgtgaccgaaagccacgcggacaggtggccgcagggccaaacccaacttccgtgatgtgatctggctacagtttggagcccacatatttcaatagttatccccaggcctggcacgtcaaagaggctccagaaatgtttgctgaagagacaacagatttacatcccagacacattcacactgggccaagagcagctgccattgcagattcgagtcacgtccttttttccttccttctccttcttggagttacaacagaagctggggaggtgagagtgcagaaaggacgtggatgaagcagagaggcacgtgcctgtctcattcgcctctggatctgctgcatccaggactgtgccagcacaaagtgggagcccgataaatatttattgaagaaatgaaaggtgacaaaaggcagaaggagggagaccccaaaaagagtatgaacccagcatcacagtgcacttgtggcagatggcagtgcatacccgggagctactctcctccggccagatgcccttctcccagctgcccgccgtgtggcagctctaccccgggaggaagtaccgagcagcggattccagtttctgggaaatagcagaccatggccagattgactctatggagcagctggtcctaacatatcagccggagaggaaagactgacactgggagtggctggccctgctggccctgcctcttctggcctggtgtctcctcatgccccctcagtgaggatcttcatgtacctgctcttctgtttgcacacccagcatagcctccttgcaggcagaaggcagtagggcccctgcacactcagtttctctcgttttccttagttatcagtcctgtcctgtcccactcaggtctgtacttagggcagctggcctggatgggcttcactggggccctgtctgtgtgctgagccagtttcccctgctggctgcaagctgtgggttctttctcctctgtgcccctcatgctgatcttctagatgccactcccaaatccccttcatacccaccaggatgtgtgcccagccaggcctccagcacccccagtgcagctcgtgattggaaactcaccatcggcaggcagtggttcggtttaagagatggcattagagggagcccagtctggatgtggacttggatgccctgtgggtatcagttctgctgacactttggcccgaaatagatccagtgctgagcaagcaatgtacaccagagcctcagtgagcccatctgcacagtggggagcatggagggatgggtttggcctgtgcttctgcttattcagtccttcagctcacggaagggatgctagtccgtgaaggtgacctcacagtactggttaattaaactttattgctcactgtccacttttgtgctg

SEQ ID NO: 8599 - protein, 141 aa, Homo sapiens; identical to SEQ ID NO: 976

SEQ ID NO: 8600 - DNA, 3228 bp, Homo sapiens
acatgtccttaaccttggcacaacaaatctctaaatcgattgagacctgtctcagatacttcttggtttacaagatggaggctgaaattaaagagaaagatcctcactcaactcacagaggagcagaatgggaagaggacttagtgagaattccctgaacacaggagaaaaccgaagcccagagagtggatggccaagtccaaggtcacacagccaagtgcatccgagcagcgcaggatccaggtttcctgccccagtgctctttctgcagcccatgccacctgttttcatgctatctcagttcaccttccagctacacacctgcaatcagaaacagaaagtctgagagtgtgtgtggagccaaagaggggacagcagtggtgaggccagtttcatgtcttgtgatttattttctccctttctttttggactttaatcttaagtggacagcaatttggaacagtgtcagcaccttgttggattgtgctgtttgggagaggtgacacagagtattttaaaagagcaggttaagaacttttcacaaggaatcaattgagagaaaataaaatagaaacagactgtcccacatttgggctgagcaccaaacacatttttttttttttttttgagactgagtcttgctctgtcactcaggctggaatgcagtggcgcgatctcggctcactgcagccttcacctcccgggttcaagtgattcttctgcctcagcctcccaagtagctgggattacaggtgcccaccaccatgccaggctaatttttgtatttttagtagagacgaggtttcaccatgttggccaggctggtcttgaactcctgaccaagtgatccacctgcttcggcctcccaaagtgctgggattacaggcacgagccaccgcacctggcctcaaacaagctttttaattgcattcagaagtgcaccaactaggcacagacctctggcatggagacagaatgggaggttcttggtgtctggcctggtcttgcagaaatcagggagttgtggggaccaggcagccactgtgcatcagataggagtttcagcagcaggcaacagaaagcctgccaatgtagctgaaataagaagggcttatttttatccctgaacagaagcttccagcactggttcatcagatcagggcactgagctggcatccccatttatacagttttcctttccttcacctttgtaagatgcctggcacagctctgagcatcaaatatctgtgccatgtgggagcacacgaggggacaagtggggaatagggtctcctctgtcctctgtccccaggctggcttctctcgtggtagaaggacccccacagcaccaggcctcataactaccctgctggtaaactgcaggtgctgtcacggcttcctgccttcgtatatgaaatgttccttggcagctggactgctgtttgtttaccgcacgcacagctctgctgcctcttggttacaccagtgagctattgctccatgacaagccacaccgaaatgtagcaagcacttattgttgcccacatgtgtcaagtcagttgagtgtttctgccaaccggggcctggcttggcccaccttggctgagcttgctctggtgctagggtcagctagacaggtcggcaggagaccagctgctctagaagagcctggacaggatgaattggttctccttccacgtgcatcttgcatccctccagccaaggatttgaacccaggtctcgtctgactccaaatgcaccaagaggatggagcccagagtgacacagaggaagaggcccctggatggatgcatggggaaggttagaagcaaggcacaagtcatacctacattcaaggagaggggaccatgcaaaggataaactgcagagagacaacagatttacatcccagacacattcacactgggccaagagcagctgccattgcagattcgagtcacgtccttttttccttccttctccttcttggagttacaacagaagctggggaggtgagagtgcagaaaggacgtggatgaagcagagaggcacgtgcctgtctcattcgcctctggatctgctgcatccaggactgtgccagcacaaagtgggagcccgataaatatttattgaagaaatgaaaggtgacaaaaggcagaaggagggagaccccaaaaagaggagagacaaagtttaatcatgtgggccaggctggttttgaactcctgacctcaagtgatctgcccaccttggcctcccaaagtgctgggattacagtatgaacccagcatcacagtgcacttgtggcagatggcagtgcatacccgggagctactctcctccggccagatgcccttctcccagctgcccgccgtgtggcagctctaccccgggaggaagtaccgagcagcggattccagtttctgggaaatagcagaccatggccagattgactctatggagcagctggtcctaacatatcagccggagaggaaagactgacactgggagtggctggccctgctggccctgcctcttctggcctggtgtctcctcatgccccctcagtgaggatcttcatgtacctgctcttctgtttgcacacccagcatagcctccttgcaggcagaaggcagtagggcccctgcacactcagtttctctcgttttccttagttatcagtcctgtcctgtcccactcaggtctgtacttagggcagctggcctggatgggcttcactggggccctgtctgtgtgctgagccagtttcccctgctggctgcaagctgtgggttctttctcctctgtgcccctcatgctgatcttctagatgccactcccaaatccccttcatacccaccaggatgtgtgcccagccaggcctccagcacccccagtgcagctcgtgattggaaactcaccatcggcaggcagtggttcggtttaagagatggcattagagggagcccagtctggatgtggacttggatgccctgtgggtatcagttctgctgacactttggcccgaaatagatccagtgctgagcaagcaatgtacaccagagcctcagtgagcccatctgcacagtggggagcatggagggatgggtttggcctgtgcttctgcttattcagtccttcagctcacggaagggatgctagtccgtgaaggtgacctcacagtactggttaattaaactttattgctcactgtccacttttgtgctg

SEQ ID NO: 8601 - protein, 105 aa, Homo sapiens; identical to SEQ ID NO: 982

SEQ ID NO: 8602 - DNA, 605 bp, Homo sapiens
agatggaggctgaaattaaagagaaagatcctcactcaactcatgctatctcagttcaccttccagctacacacctgcaatcagaaacagaaagtctgagagtgtgtgtgcagagagacaacagatttacatcccagacacattcacactgggccaagagcagctgccattgcagattcgagtcacgtccttttttccttccttctccttcttggagttacaacagaagctggggaggtgagagtgcagaaggagggagaccccaaaaagaggtaaatttggtatcttagcaagtgggtgactaccactgtctgggggaaagctgatacacgaggacttgacaataattacagcagtaacaatcgctactattttgttttgagatgaattttagtttctgaaattgtccaaagcacttttatcaatagaaacttgttacacatccctccaacagggagaagcagcacaggaagctgccccctcaaacactaaaggctcctggagctattcacagtgctggggaacaaccagaggaggaggaggacagagggagagaatactttttttaaaaatcccaaacaaaaccaaattctatacatgtatat

SEQ ID NO: 8603 - protein, 95 aa, Homo sapiens
MEAEIKEKDPHSTHAISVHLPATHLQSETESLRVCVQRDNRFTSQTHSHWAKSSCHCRFESRPFFLPSPSWSYNRSWGGESAEGGRPQKEVNLVS

SEQ ID NO: 8604 - DNA, 2692 bp, Homo sapiens
tccttggcagctggactgctgtttgtttaccgcacgcacagctctgctgcctcttggttacaccagtgagctattgctccatgacaagccacaccgaaatgtagcaagcacttattgttgcccacatgtgtcaagtcagttgagtgtttctgccaaccggggcctggcttggcccaccttggctgagcttgctctggtgctagggtcagctagacaggtcggcaggagaccagctgctctagaagagcctggacaggatgaattggttctccttccacgtgcatcttgcatccctccagccaaggatttgaacccaggtctcgtctgactccaaatgcaccaagaggatggagcccagagtgacacagaggaagaggcccctggatggatgcatggggaagatcacgggaattacaagtgacatcctgaagtatgatcacaaatgtttcaaattaagccttcctgctaagtttccagaggtgtgtggctcggacgaagtgtttccagaccctgatctactgcatgtcctgcctgttgctggttctttgcagcagtccattgaccaatgctgtctacagcttgagagcctctgcaggccagggctgctctgtgcacatcctacgttactattcaaactgcacagcagcatgaaaaacaggcccttcttttctctcatttacacatatgtgaagaagacacagcaagtgagaaaacgtgaccgaaagccacgcggacaggtggccgcagggccaaacccaacttccgtgatgtgatctggctacagtttggagcccacatatttcaatagttatccccaggcctggcacgtcaaagaggctccagaaatgtttgctgagtgagtgatgaatcagcaatttctgattttctcctaaacttagagaataagtggcttgtctgcagtcacccagggcgtccctgacagaggtacaagtaaagcccagatctctgcatctctggttcaaggccttttgtactacacaccgctgtctctttgtcatcattaaaagcaaggctcaagggacatgttttctagccttagttccccatctacaaaatgggcctcatggaatggaatgtctccacttcactccagcatcaacaagtggggaattctgatggattcaattcgacttctttccatgggcgtgttctaagcagcctctttgttccagaagctgccctcagccagagttggataagccaatcctcactccccagcctcctctggatagggatgaagaccccactggggttggaagtgcagaggcagacaggtgtatggagtcacctgtaaattgattcaagtgagccaggaaagcagcaaaggaaagagaaacctgagtgacgacgtggtggaggaacagggctggaaagaggctgctggctgtctggcttcgcagctctggcctcctaatcagcctcgctcttgtctctggtgttctctggctcttgtccatctgtctgtgtttctttttgccagctattgactaatctttgctgaagctgagctagaattctggtgtttataagcaggtaactagctgagcactagttgataactttggagttagtggataaccacagggctgggctactaagctttttcagttgaaaaataaataaataaataaataaacaccacacccagctaatttttgtatttttagtagagacagggtttcaccgtgttagccaggatggactccatctcctgacctcgtgatccgcctacctcggcctcccaaagtgctgggattacaggcgtgagccaccacgcccggtcacctttgtcctgttttctacaggttagaagcaaggcacaagtcatacctacattcaaggagaggggaccatgcaaaggataaactgcaggtgaagaacttgagagctattttagaagctgccttccacactttacaatctactttgcagctatactgagctcttagcaactccctgggcctgctgagcacctcttgcctttctgcctttgcgtatgctgttccctctgcctggaattccatgtcttctgcctttgcccacctcatcttaaggcctctgcttagatgcaatttctttgggctcttattagcagcatccaaatctgtgctggtttcttctcacgcttactctgcatcataatttttctgtttactcgttaatcccctcccactcctgccagtacctaaagtaaaatctacacgggcttggcacattgtggatgctcaatgaagatttgttaaatgagtgaatgattaaatgaaataagccccagcttggaacccagagctgtaatttccggttgtggtccctgtcccctgcccaggggctgtctaagggctcatctctcccaggagcccctgtatcatctcagtaactagaccagtaccatatccgacttcccctgactttgaaataattttcacctgcaatcaggtgcgcttccctagaacctctctcgctgttctttgcctttctccttcccccgccttgtatctccgtggtcctgccaaaaatcagaagctcattattaaaccagaagcttccttgcattatcccagagactacagacagaaaatatttgcttctatctcaactgaggactgacatagtaaagactccttgagatgttagctgtcaaggaggggaataaaagtttttcatctgcatg

SEQ ID NO: 8605 - protein, 141 aa, Homo sapiens; identical to SEQ ID NO: 976

SEQ ID NO: 8606 - DNA, 2078 bp, Homo sapiens
ctcccaaagtgctgggattacaggcgtgagccaccacgcccggtcacctttgtcctgttttctacaggttagaagcaaggcacaagtcatacctacattcaaggagaggggaccatgcaaaggataaactgcagagagacaacagatttacatcccagacacattcacactgggccaagagcagctgccattgcagattcgagtcacgtccttttttccttccttctccttcttggagttacaacagaagctggggaggtgagagtgcagaaaggacgtggatgaagcagagaggcacgtgcctgtctcattcgcctctggatctgctgcatccaggactgtgccagcacaaagtgggagcccgataaatatttattgaagaaatgaaaggtgacaaaaggcagaaggagggagaccccaaaaagagaccccaggctccagaagcagatgaggagacaaacagaagagcagaagaatggcagaatggcacagcagagagaagaaaaggaacatctgaatgttgagaggaatttggctgggggcggttggagaggagattagccactggacagccaaactccaggggaagatcatcttcccactccatcccccttccagctccccatccatcctgctgagagccacctccaccactcagtgaaaccgctgcattcatccttcaagtttatgtgtgacctgattcttcctggacattggacaaagacctaggtccagtgaactgtctaacacttaagtcatccacggacagcaaggctaacagaacgctgtaacatgtgcccacttggactctgggagttgcagacacccacccataggtgctgccatgggtccggagcccaaaaagtgcttgccctggctcctgcacctgcccgtctgcatgctccccctccggtaaggggtttgaggatgtggcggctgaacataagagctatgcccctgtcacacatcatgggacaggggtcagggaactctcccatttcactttcaaatattccaggtcccctttttgttcgggagccagagtctaatggagacagagatagaaaccctgaaataggatccaggcaatataaacctacacgctgtaagccaagtcagagtgaggctgatgtgataacaaaagtctgaatacaaggtgggagacaattattctgactgaaagggaggcaagagttctgccataggcttgatgctgtgtgcccctggcttcctaactcatttgcaaatggaaaatactattccattgtaggaaccttctttttccatgtgtctggggaaggagaaagaatggctgggctgaatgaatttatcccttggtcctcttccaacaaagctcagctatgaaagataaatccagctctccccaccccctctcagtggagctggggagaaatcaaaagcccctctgccaataatgagaccaaagtttgcaagggcaggacgagcccgtgctaacagagaaagtgttgtttcctcaatttggttttagactgtcttgtcctatgggggagaaaagatctgcccttgggagaggtgccaactttatagatctattaataaaagaactggcaggcttacagttcttgccaatgaggaaacttgaatgagagaagccaggctcaaccttggccaacagactggagcccatcaccctaacttcaccccgcttctccttacccaaccgtcaaaggctaggcagcacccacccagcagcttccacctggctgaagcctgcacctgcttcagaccaagggttagatggaaatttggcatgggaagagagggctcacctgtgggcaggatagactctatccaagaaggagaactgaaaaatgaaaacctatgagacaaggggtgatcctgaaggcaggcaggagaaagggctggagggagaggcactggggaatttttcctggtgaatactgaagttactagatgttttgtcttgcaaaactcaagggaaaactctcaaactctaatgtttgtctattctgtgtccaaactgtccttttgaaacggacccacctttcagtaaagaaacttgcattggcctgccc

SEQ ID NO: 8607 - protein, 56 aa, Homo sapiens
MQRINCRETTDLHPRHIHTGPRAAAIADSSHVLFSFLLLLGVTTEAGEVRVQKGRG

SEQ ID NO: 8608 - DNA, 2290 bp, Homo sapiens
ctcccaaagtgctgggattacaggcgtgagccaccacgcccggtcacctttgtcctgttttctacaggttagaagcaaggcacaagtcatacctacattcaaggagaggggaccatgcaaaggataaactgcagagagacaacagatttacatcccagacacattcacactgggccaagagcagctgccattgcagattcgagtcacgtccttttttccttccttctccttcttggagttacaacagaagctggggaggtgagagtgcagaaaggacgtggatgaagcagagaggcacgtgcctgtctcattcgcctctggatctgctgcatccaggactgtgccagcacaaagtgggagcccgataaatatttattgaagaaatgaaaggtgacaaaaggcagaaggagggagaccccaaaaagagaccccaggctccagaagcagatgaggagacaaacagaagagcagaagaatggcagaatggcacagcagagagaagaaaaggaacatctgaatgttgagaggaatttggctgggggcggttggagaggagattagccactggacagccaaactccaggggaagatcatcttcccactccatcccccttccagctccccatccatcctgctgagagccacctccaccactcagtgaaaccgctgcattcatccttcaagtttatgtgtgacctgattcttcctggacattggacaaagacctaggtccagtgaactgtctaacacttaagtcatccacggacagcaaggctaacagaacgctgtaacatgtgcccacttggactctgggagttgcagacacccacccataggtgctgccatgggtccggagcccaaaaagtgcttgccctggctcctgcacctgcccgtctgcatgctccccctccggtaaggggtttgaggatgtggcggctgaacataagagctatgcccctgtcacacatcatgggacaggggtcagggaactctcccatttcactttcaaatattccaggtcccctttttgttcgggagccagagtctaatggagacagagatagaaaccctgaaataggatccaggcaatataaacctacacgctgtaagccaagtcagagtgaggctgatgtgataacaaaagtctgaatacaaggtgggagacaattattctgactgaaagggaggcaagagttctgccataggcttgatgctgtgtgcccctggcttcctaactcatttgcaaatggaaaatactattccattgtaggaaccttctttttccatgtgtctggggaaggagaaagaatggctgggctgaatgaatttatcccttggtcctcttccaacaaagctcagctatgaaagataaatccagctctccccaccccctctcagtggagctggggagaaatcaaaagcccctctgccaataatgagaccaaagtttgcaagggcaggacgagcccgtgctaacagagaaagtgttgtttcctcaatttggttttagactgtcttgtcctatgggggagaaaagatctgcccttgggagaggtgccaactttatagatctattaataaaagaactggcaggcttacagttcttgccaatgaggaaacttgaatgagagaagccaggctcaaccttggccaacagactggagcccatcaccctaacttcaccccgcttctccttacccaaccgtcaaaggctaggcagcacccacccagcagcttccacctggctgaagcctgcacctgcttcagaccaagggttagatggaaatttggcatgggaagagagggctcacctgtgggcaggatagactctatccaagaaggagaactgaaaaatgaaaacctatgagacaaggggtgatcctgaaggcaggcaggagaaagggctggagggagaggcactggggaatttttcctggtgaatactgaagttactagatgttttgtcttgcaaaactcaagggaaaactctcaaactctaatgtttgtctattctgtgtccaaactgtccttttgaaacggacccacctttcagtaaagaaacttgcattggcctgcccagcctggtgtgttagttctgtggaaactgactggctagggtggccacgggaggaagagcctggttctccctcaccagctccttgtgaagaagggacctggtcaataaggcaaacgacaccacttgccaacatttgatattgccaagtgcttttgtttggcactactatagattttaaaaatgtatctcacttttaaaatttgcattttcttg

SEQ ID NO: 8609 - protein, 56 aa, Homo sapiens; identical to SEQ ID NO: 8607

SEQ ID NO: 8610 - DNA, 1164 bp, Homo sapiens
tggaaagctacacgtgtgagcctagaggcgggtcccggttgcagacttgccatggcctccgaagcttctgtgcgtctaggggtgccccctggccgtctgtggatccagaggcctggcatctacgaagatgaggaggggagaacctgggtgactgtggtcgtgcggttcaatccctcgcgtagggaatgggccagggcctcccagggcagcagatatgaacccagcatcacagtgcacttgtggcagatggcagtgcatacccgggagctactctcctccggccagatgcccttctcccagctgcccgccgtgtggcagctctaccccgggaggaagtaccgagcagcggattccagtttctgggaaatagcagaccatggccagattgactctatggagcagctggtcctaacatatcagccggagaggaaagactgacactgggagtggctggccctgctggccctgcctcttctggcctggtgtctcctcatgccccctcagtgaggatcttcatgtacctgctcttctgtttgcacacccagcatagcctccttgcaggcagaaggcagtagggcccctgcacactcagtttctctcgttttccttagttatcagtcctgtcctgtcccactcaggtctgtacttagggcagctggcctggatgggcttcactggggccctgtctgtgtgctgagccagtttcccctgctggctgcaagctgtgggttctttctcctctgtgcccctcatgctgatcttctagatgccactcccaaatccccttcatacccaccaggatgtgtgcccagccaggcctccagcacccccagtgcagctcgtgattggaaactcaccatcggcaggcagtggttcggtttaagagatggcattagagggagcccagtctggatgtggacttggatgccctgtgggtatcagttctgctgacactttggcccgaaatagatccagtgctgagcaagcaatgtacaccagagcctcagtgagcccatctgcacagtggggagcatggagggatgggtttggcctgtgcttctgcttattcagtccttcagctcacggaagggatgctagtccgtgaaggtgacctcacagtactggttaattaaactttattgctcactgtccacttttgtgctg

SEQ ID NO: 8611 - protein, 128 aa, Homo sapiens; identical to SEQ ID NO: 988

SEQ ID NO: 8612 - DNA, 1628 bp, Homo sapiens
acacgtgtgagcctagaggcgggtcccggttgcagacttgccatggcctccgaagcttctgtgcgtctaggggtgccccctggccgtctgtggatccagaggcctggcatctacgaagatgaggaggggagaacctgggtgactgtggtcgtgcggttcaatccctcgcgtagggaatgggccagggcctcccagggcagcagatatgaacccagcatcacagtgcacttgtggcagatggcagtgcatacccgggagctactctcctccggccagatgcccttctcccagctgcccgccgtgtggcagctctaccccgggaggaagtaccgagcagcggattccagtttctgggaaatagcagaccatggccagattgactctatggagcagctggtcctaacatatcagccggagaggaaagactgacactgggagtggctggtatgttggggccctgtgcgtctcagtgtagggatcagacgaaagtgagaagacctctcctcttttcagaaagacggcgtggcctcctcctccctgctgtttgctgagatttttcttacatagccacctgtcacctctgttccccagccccttggatgtgatggtacacagtgggtgggcccccataataagttcctaaagcatgggatctcatcgaataagactcatgaatctagtgatctcgggtccctagatttaaccatggcactgaggtgccgtgtgacggtggccttggaggacccagcactgacccatagagggctcctctcagatgggcagcagcttggagcaggccaggcagggcctgggccattggaggggctggcactggacttgcctttgaccccagcagcttggatggggtgccgggctcccccatagttcactgactgtctcctttggtcttctcgcaggccctgctggccctgcctcttctggcctggtgtctcctcatgccccctcagtgaggatcttcatgtacctgctcttctgtttgcacacccagcatagcctccttgcaggcagaaggcagtagggcccctgcacactcagtttctctcgttttccttagttatcagtcctgtcctgtcccactcaggtctgtacttagggcagctggcctggatgggcttcactggggccctgtctgtgtgctgagccagtttcccctgctggctgcaagctgtgggttctttctcctctgtgcccctcatgctgatcttctagatgccactcccaaatccccttcatacccaccaggatgtgtgcccagccaggcctccagcacccccagtgcagctcgtgattggaaactcaccatcggcaggcagtggttcggtttaagagatggcattagagggagcccagtctggatgtggacttggatgccctgtgggtatcagttctgctgacactttggcccgaaatagatccagtgctgagcaagcaatgtacaccagagcctcagtgagcccatctgcacagtggggagcatggagggatgggtttggcctgtgcttctgcttattcagtccttcagctcacggaagggatgctagtccgtgaaggtgacctcacagtactggttaattaaactttattgctcactgtccacttttgtgctg

SEQ ID NO: 8613 - protein, 128 aa, Homo sapiens; identical to SEQ ID NO: 988

SEQ ID NO: 8614 - DNA, 356 bp, Homo sapiens
tcaaacaaaacaaagcaaaacaaaaaaaacagttaagattttttttttttttaaatgattcagtggaaatagaatggattcttcaaataacttagccacgggtgggataagggacctacttatatgaacccagcatcacagtgcacttgtggcagatggcagtgcatacccgggagctactctcctccggccagatgcccttctcccagctgcccgccgtgtggcagctctaccccgggaggaagtaccgagcagcggattccagtttctgggaaatagcagaccatggccagattgactctatggagcagctggtcctaacatatcagccggagaggaaagactgacactgggag

SEQ ID NO: 8615 - protein, 63 aa, Homo sapiens [sequence omitted]

SEQ ID NO: 8616 - DNA, 1398 bp, Homo sapiens
gccgtcctcccgccccgccgcttggtggcggccgcatgctgcccggatataaagggtcggccccacatcccagggaccagcgagcggccttgagaggctctggctcttgcttcttaggcggcccgaggacgccatggccgagtgcccgacactcggggaggcagtcaccgaccacccggaccgcctgtgggcctgggagaagttcgtgtatttggacgagaagcagcacgcctggctgcccttaaccatcgagataaaggataggttacagttacgggtgctcttgcgtcgggaagacgtcgtcctggggaggcctatgacccccacccagataggcccaagcctgctgcctatcatgtggcagctctaccctgatggacgataccgatcctcagactccagtttctggcgcttagtgtaccacatcaagattgacggcgtggaggacatgcttctcgagctgctgccagatgactgatgtatggtcttggcagcacctgtctcctttcaccccagggcctgagcctggccagcctacaatggggatgttgtgtttctgttcaccttcgtttactatgcctgtgtcttctccaccacgctggggtctgggaggaatggacagacagaggatgagctctacccagggcctgcaggacctgcctgtagcccactctgctcgccttagcactaccactcctgccaaggaggattccatttggcagagcttcttccaggtgcccagctatacctgtgcctcggcttttctcagctggatgatggtcttcagcctctttctgtcccttctgtccctcacagcactagtatttcatgttgcacacccactcagctccgtgaacttgtgagaacacagccgattcacctgagcaggacctctgaaaccctggaccagtggtctcacatggtgctacgcctgcatgtaaacacgcctgcaaacgctgcctgccggtaaacacgcctgcaaacgctgcctgcccgtaaacacgcctgcaaacgctgcctgcccacacaggttcacgtgcagctcaaggaaaggcctgaaaggagcccttatctgtgctcaggactcagaagcctctgggtcagtggtccacatcccgggacgcagcaggaggccaggccggcgagccctgtggatgagccctcagaacccttggcttgcccacgtggaaaagggatagaggttgggtttccccccttttatagatggtcacgcacctgggtgttacaaagttgtatgtggcatgaatactttttgtaatgattgattaaatgcaagatagtttatctaacttcgtgcggaatcagcttctatccttgacttagattctggtggagagaagtgagaataggcagcccccaaataaaaaatattcatgg

SEQ ID NO: 8617 - protein, 130 aa, Homo sapiens
MTDVWSWQHLSPFTPGPEPGQPTMGMLCFCSPSFTMPVSSPPRWGLGGMDRQRMSSTQGLQDLPVAHSARLSTTTPAKEDSIWQSFFQVPSYTCASAFLSWMMVFSLFLSLLSLTALVFHVAHPLSSVNL

SEQ ID NO: 8618 - DNA, 1081 bp, Homo sapiens
gaaggctggtgggaggaggggcagtctccaagagcccctgaaatcctcacacctgggttcctacctgctgtttccagctaggggaaggcgcaggagtgaggaatggagggagtggagggctctggccgatcaatgccttctctctctctctgcctctcagattgacggcgtggaggacatgcttctcgagctgctgccagatgactgatgtatggtcttggcagcacctgtctcctttcaccccagggcctgagcctggccagcctacaatggggatgttgtgtttctgttcaccttcgtttactatgcctgtgtcttctccaccacgctggggtctgggaggaatggacagacagaggatgagctctacccagggcctgcaggacctgcctgtagcccactctgctcgccttagcactaccactcctgccaaggaggattccatttggcagagcttcttccaggtgcccagctatacctgtgcctcggcttttctcagctggatgatggtcttcagcctctttctgtcccttctgtccctcacagcactagtatttcatgttgcacacccactcagctccgtgaacttgtgagaacacagccgattcacctgagcaggacctctgaaaccctggaccagtggtctcacatggtgctacgcctgcatgtaaacacgcctgcaaacgctgcctgccggtaaacacgcctgcaaacgctgcctgcccgtaaacacgcctgcaaacgctgcctgcccacacaggttcacgtgcagctcaaggaaaggcctgaaaggagcccttatctgtgctcaggactcagaagcctctgggtcagtggtccacatcccgggacgcagcaggaggccaggccggcgagccctgtggatgagccctcagaacccttggcttgcccacgtggaaaagggatagaggttgggtttccccccttttatagatggtcacgcacctgggtgttacaaagttgtatgtggcatgaatactttttgtaatgattgattaaatgcaagatagtttatctaacttcgtgcggaatcagcttctatccttgacttagattctgg

SEQ ID NO: 8619 - protein, 130 aa, Homo sapiens; identical to SEQ ID NO: 8617

SEQ ID NO: 8620 - DNA, 1141 bp, Homo sapiens
cgatcctcctgcctctgccttccaaagcactggaattacaagtataaaggataggttacagttacgggtgctcttgcgtcgggaagacgtcgtcctggggaggcctatgacccccacccagataggcccaagcctgctgcctatcatgtggcagctctaccctgatggacgataccgatcctcagactccagtttctggcgcttagtgtaccacatcaagattgacggcgtggaggacatgcttctcgagctgctgccagatgactgatgtatggtcttggcagcacctgtctcctttcaccccagggcctgagcctggccagcctacaatggggatgttgtgtttctgttcaccttcgtttactatgcctgtgtcttctccaccacgctggggtctgggaggaatggacagacagaggatgagctctacccagggcctgcaggacctgcctgtagcccactctgctcgccttagcactaccactcctgccaaggaggattccatttggcagagcttcttccaggtgcccagctatacctgtgcctcggcttttctcagctggatgatggtcttcagcctctttctgtcccttctgtccctcacagcactagtatttcatgttgcacacccactcagctccgtgaacttgtgagaacacagccgattcacctgagcaggacctctgaaaccctggaccagtggtctcacatggtgctacgcctgcatgtaaacacgcctgcaaacgctgcctgccggtaaacacgcctgcaaacgctgcctgcccgtaaacacgcctgcaaacgctgcctgcccacacaggttcacgtgcagctcaaggaaaggcctgaaaggagcccttatctgtgctcaggactcagaagcctctgggtcagtggtccacatcccgggacgcagcaggaggccaggccggcgagccctgtggatgagccctcagaacccttggcttgcccacgtggaaaagggatagaggttgggtttccccccttttatagatggtcacgcacctgggtgttacaaagttgtatgtggcatgaatactttttgtaatgattgattaaatgcaagatagtttatctaacttcgtgcggaatcagcttctatccttgacttagattctgg

SEQ ID NO: 8621 - protein, 130 aa, Homo sapiens; identical to SEQ ID NO: 8617

SEQ ID NO: 8622 - DNA, 1503 bp, Homo sapiens
gggaccagcgagcggccttgagaggctctggctcttgcttcttaggcggcccgaggacgccatggccgagtgcccgacactcggggaggcagtcaccgaccacccggaccgcctgtgggcctgggagaagttcgtgtatttggacgagaagcagcacgcctggctgcccttaaccatcgagatacagggtctcgctctgtgacccaggctggtcttaaactcctggcctcaagcgatcctcctgcctctgccttccaaagcactggaattacaagtgtgagccgctgcaacccgccagaaaaaagtgtgcctttcatggccctgtctgggtggctagacacgtgtgtgtgctggtggtcctggcccagccagagtccctgagaggagcatgcatggcctaaggaaataaaggataggttacagttacgggtgctcttgcgtcgggaagacgtcgtcctggggaggcctatgacccccacccagataggcccaagcctgctgcctatcatgtggcagctctaccctgatggacgataccgatcctcagactccagtttctggcgcttagtgtaccacatcaagattgacggcgtggaggacatgcttctcgagctgctgccagatgactgatgtatggtcttggcagcacctgtctcctttcaccccagggcctgagcctggccagcctacaatggggatgttgtgtttctgttcaccttcgtttactatgcctgtgtcttctccaccacgctggggtctgggaggaatggacagacagaggatgagctctacccagggcctgcaggacctgcctgtagcccactctgctcgccttagcactaccactcctgccaaggaggattccatttggcagagcttcttccaggtgcccagctatacctgtgcctcggcttttctcagctggatgatggtcttcagcctctttctgtcccttctgtccctcacagcactagtatttcatgttgcacacccactcagctccgtgaacttgtgagaacacagccgattcacctgagcaggacctctgaaaccctggaccagtggtctcacatggtgctacgcctgcatgtaaacacgcctgcaaacgctgcctgccggtaaacacgcctgcaaacgctgcctgcccgtaaacacgcctgcaaacgctgcctgcccacacaggttcacgtgcagctcaaggaaaggcctgaaaggagcccttatctgtgctcaggactcagaagcctctgggtcagtggtccacatcccgggacgcagcaggaggccaggccggcgagccctgtggatgagccctcagaacccttggcttgcccacgtggaaaagggatagaggttgggtttccccccttttatagatggtcacgcacctgggtgttacaaagttgtatgtggcatgaatactttttgtaatgattgattaaatgcaagatagtttatctaacttcgtgcggaatcagcttctatccttgacttagattctgg

SEQ ID NO: 8623 - protein, 130 aa, Homo sapiens; identical to SEQ ID NO: 8617

SEQ ID NO: 8624 - DNA, 756 bp, Homo sapiens
ggcagcacctgtctcctttcaccccagggcctgagcctggccagcctacaatggggatgaatggacagacagaggatgagctctacccagggcctgcaggacctgcctgtagcccactctgctcgccttagcactaccactcctgccaaggaggattccatttggcagagcttcttccaggtgcccagctatacctgtgcctcggcttttctcagctggatgatggtcttcagcctctttctgtcccttctgtccctcacagcactagtatttcatgttgcacacccactcagctccgtgaacttgtgagaacacagccgattcacctgagcaggacctctgaaaccctggaccagtggtctcacatggtgctacgcctgcatgtaaacacgcctgcaaacgctgcctgccggtaaacacgcctgcaaacgctgcctgcccgtaaacacgcctgcaaacgctgcctgcccacacaggttcacgtgcagctcaaggaaaggcctgaaaggagcccttatctgtgctcaggactcagaagcctctgggtcagtggtccacatcccgggacgcagcaggaggccaggccggcgagccctgtggatgagccctcagaacccttggcttgcccacgtggaaaagggatagaggttgggtttccccccttttatagatggtcacgcacctgggtgttacaaagttgtatgtggcatgaatactttttgtaatgattgattaaatgcaagatagtttatctaa

SEQ ID NO: 8625 - protein, 82 aa, Homo sapiens [sequence omitted]

SEQ ID NO: 8626 - DNA, 896 bp, Homo sapiens
cagcgagcggccttgagaggctctggctcttgcttcttaggcggcccgaggacgccatggccgagtgcccgacactcggggaggcagtcaccgaccacccggaccgcctgtgggcctgggagaagttcgtgtatttggacgagaagcagcacgcctggctgcccttaaccatcgagataaaggataggttacagttacgggtgctcttgcgtcgggaagacgtcgtcctggggaggcctatgacccccacccagataggcccaagcctgctgcctatcatgtggcagctctaccctgatggacgataccgatcctcagactccagtttctggcgcttagtgtaccacatcaagattgacggcgtggaggacatgcttctcgagctgctgccagatgactgatcactagtatttcatgttgcacacccactcagctccgtgaacttgtgagaacacagccgattcacctgagcaggacctctgaaaccctggaccagtggtctcacatggtgctacgcctgcatgtaaacacgcctgcaaacgctgcctgccggtaaacacgcctgcaaacgctgcctgcccgtaaacacgcctgcaaacgctgcctgcccacacaggttcacgtgcagctcaaggaaaggcctgaaaggagcccttatctgtgctcaggactcagaagcctctgggtcagtggtccacatcccgggacgcagcaggaggccaggccggcgagccctgtggatgagccctcagaacccttggcttgcccacgtggaaaagggatagaggttgggtttccccccttttatagatggtcacgcacctgggtgttacaaagttgtatgtggcatgaatactttttgtaatgattgattaaatgcaagatagtttatctaa

SEQ ID NO: 8627 - protein, 114 aa, Homo sapiens; identical to SEQ ID NO: 992

SEQ ID NO: 8628 - DNA, 1240 bp, Homo sapiens
gccgtcctcccgccccgccgcttggtggcggccgcatgctgcccggatataaagggtcggccccacatcccagggaccagcgagcggccttgagaggctctggctcttgcttcttaggcggcccgaggacgccatggccgagtgcccgacactcggggaggcagtcaccgaccacccggaccgcctgtgggcctgggagaagttcgtgtatttggacgagaagcagcacgcctggctgcccttaaccatcgagataaaggataggttacagttacgggtgctcttgcgtcgggaagacgtcgtcctggggaggcctatgacccccacccagataggcccaagcctgctgcctatcatgtggcagctctaccctgatggacgataccgatcctcagactccagtttctggcgcttagtgtaccacatcaagattgacggcgtggaggacatgcttctcgagctgctgccagatgactgatgtatggtcttggcagcacctgtctcctttcaccccagggcctgagcctggccagcctacaatggggatgttgtgtttctgttcaccttcgtttactatgcctgtgtcttctccaccacgctggggtctgggaggaatggacagacagaggatgagctctacccagggcctgcaggacctgcctgtagcccactctatacctgtgcctcggcttttctcagctggatgatggtcttcagcctctttctgtcccttctgtccctcacagcactagtatttcatgttgcacacccactcagctccgtgaacttgtgagaacacagccgattcacctgagcaggacctctgaaaccctggaccagtggtctcacatggtgctacgcctgcatgtaaacacgcctgcaaacgctgcctgccggtaaacacgcctgcaaacgctgcctgcccgtaaacacgcctgcaaacgctgcctgcccacacaggttcacgtgcagctcaaggaaaggcctgaaaggagcccttatctgtgctcaggactcagaagcctctgggtcagtggtccacatcccgggacgcagcaggaggccaggccggcgagccctgtggatgagccctcagaacccttggcttgcccacgtggaaaagggatagaggttgggtttccccccttttatagatggtcacgcacctgggtgttacaaagttgtatgtggcatgaatactttttgtaatgattgattaaatgcaagatagtttatctaa

SEQ ID NO: 8629 - protein, 114 aa, Homo sapiens; identical to SEQ ID NO: 992

SEQ ID NO: 8630 - DNA, 1038 bp, Homo sapiens
gaaggctggtgggaggaggggcagtctccaagagcccctgaaatcctcacacctgggttcctacctgctgtttccagctaggggaaggcgcaggagtgaggaatggagggagtggagggctctggccgatcaatgccttctctctctctctgcctctcagattgacggcgtggaggacatgcttctcgagctgctgccagatgactgatgtatggtcttggcagcacctgtctcctttcaccccagggcctgagcctggccagcctacaatggggatgttgtgtttctgttcaccttcgtttactatgcctgtgtcttctccaccacgctggggtctgggaggaatggacagacagaggatgagctctacccagggcctgcaggacctgcctgtagcccactctgctcgccttagcactaccactcctgccaaggaggattccatttggcagagcttcttccaggtgcccagctatacctgtgcctcggcttttctcagctggatgatggtcttcagcctctttctgtcccttctgtccctcacagcactagtatttcatgttgcacacccactcagctccgtgaacttgtgagaacacagccgattcacctgagcaggacctctgaaaccctggaccagtggtctcacatggtgctacgcctgcatgtaaacacgcctgcaaacgctgcctgccggtaaacacgcctgcaaacgctgcctgcccgtaaacacgcctgcaaacgctgcctgcccacacaggttcacgtgcagctcaaggaaaggcctgaaaggagcccttatctgtgctcaggactcagaagcctctgggtcagtggtccacatcccgggacgcagcaggaggccaggccggcgagccctgtggatgagccctcagaacccttggcttgcccacgtggaaaagggatagaggttgggtttccccccttttatagatggtcacgcacctgggtgttacaaagttgtatgtggcatgaatactttttgtaatgattgattaaatgcaagatagtttatct

SEQ ID NO: 8631 - protein, 130 aa, Homo sapiens; identical to SEQ ID NO: 8617

SEQ ID NO: 8632 - DNA, 1098 bp, Homo sapiens
cgatcctcctgcctctgccttccaaagcactggaattacaagtataaaggataggttacagttacgggtgctcttgcgtcgggaagacgtcgtcctggggaggcctatgacccccacccagataggcccaagcctgctgcctatcatgtggcagctctaccctgatggacgataccgatcctcagactccagtttctggcgcttagtgtaccacatcaagattgacggcgtggaggacatgcttctcgagctgctgccagatgactgatgtatggtcttggcagcacctgtctcctttcaccccagggcctgagcctggccagcctacaatggggatgttgtgtttctgttcaccttcgtttactatgcctgtgtcttctccaccacgctggggtctgggaggaatggacagacagaggatgagctctacccagggcctgcaggacctgcctgtagcccactctgctcgccttagcactaccactcctgccaaggaggattccatttggcagagcttcttccaggtgcccagctatacctgtgcctcggcttttctcagctggatgatggtcttcagcctctttctgtcccttctgtccctcacagcactagtatttcatgttgcacacccactcagctccgtgaacttgtgagaacacagccgattcacctgagcaggacctctgaaaccctggaccagtggtctcacatggtgctacgcctgcatgtaaacacgcctgcaaacgctgcctgccggtaaacacgcctgcaaacgctgcctgcccgtaaacacgcctgcaaacgctgcctgcccacacaggttcacgtgcagctcaaggaaaggcctgaaaggagcccttatctgtgctcaggactcagaagcctctgggtcagtggtccacatcccgggacgcagcaggaggccaggccggcgagccctgtggatgagccctcagaacccttggcttgcccacgtggaaaagggatagaggttgggtttccccccttttatagatggtcacgcacctgggtgttacaaagttgtatgtggcatgaatactttttgtaatgattgattaaatgcaagatagtttatct

SEQ ID NO: 8633 - protein, 130 aa, Homo sapiens; identical to SEQ ID NO: 8617

SEQ ID NO: 8634 - DNA, 1460 bp, Homo sapiens
gggaccagcgagcggccttgagaggctctggctcttgcttcttaggcggcccgaggacgccatggccgagtgcccgacactcggggaggcagtcaccgaccacccggaccgcctgtgggcctgggagaagttcgtgtatttggacgagaagcagcacgcctggctgcccttaaccatcgagatacagggtctcgctctgtgacccaggctggtcttaaactcctggcctcaagcgatcctcctgcctctgccttccaaagcactggaattacaagtgtgagccgctgcaacccgccagaaaaaagtgtgcctttcatggccctgtctgggtggctagacacgtgtgtgtgctggtggtcctggcccagccagagtccctgagaggagcatgcatggcctaaggaaataaaggataggttacagttacgggtgctcttgcgtcgggaagacgtcgtcctggggaggcctatgacccccacccagataggcccaagcctgctgcctatcatgtggcagctctaccctgatggacgataccgatcctcagactccagtttctggcgcttagtgtaccacatcaagattgacggcgtggaggacatgcttctcgagctgctgccagatgactgatgtatggtcttggcagcacctgtctcctttcaccccagggcctgagcctggccagcctacaatggggatgttgtgtttctgttcaccttcgtttactatgcctgtgtcttctccaccacgctggggtctgggaggaatggacagacagaggatgagctctacccagggcctgcaggacctgcctgtagcccactctgctcgccttagcactaccactcctgccaaggaggattccatttggcagagcttcttccaggtgcccagctatacctgtgcctcggcttttctcagctggatgatggtcttcagcctctttctgtcccttctgtccctcacagcactagtatttcatgttgcacacccactcagctccgtgaacttgtgagaacacagccgattcacctgagcaggacctctgaaaccctggaccagtggtctcacatggtgctacgcctgcatgtaaacacgcctgcaaacgctgcctgccggtaaacacgcctgcaaacgctgcctgcccgtaaacacgcctgcaaacgctgcctgcccacacaggttcacgtgcagctcaaggaaaggcctgaaaggagcccttatctgtgctcaggactcagaagcctctgggtcagtggtccacatcccgggacgcagcaggaggccaggccggcgagccctgtggatgagccctcagaacccttggcttgcccacgtggaaaagggatagaggttgggtttccccccttttatagatggtcacgcacctgggtgttacaaagttgtatgtggcatgaatactttttgtaatgattgattaaatgcaagatagtttatct

SEQ ID NO: 8635 - protein, 130 aa, Homo sapiens; identical to SEQ ID NO: 8617

SEQ ID NO: 8636 - DNA, 1308 bp, Homo sapiens
gccgtcctcccgccccgccgcttggtggcggccgcatgctgcccggatataaagggtcggccccacatcccagggaccagcgagcggccttgagaggctctggctcttgcttcttaggcggcccgaggacgccatggccgagtgcccgacactcggggaggcagtcaccgaccacccggaccgcctgtgggcctgggagaagttcgtgtatttggacgagaagcagcacgcctggctgcccttaaccatcgagataaaggataggttacagttacgggtgctcttgcgtcgggaagacgtcgtcctggggaggcctatgacccccacccagataggcccaagcctgctgcctatcatgtggcagctctaccctgatggacgataccgatcctcagactccagtttctggcgcttagtgtaccacatcaagattgacggcgtggaggacatgcttctcgagctgctgccagatgactgatgtatggtcttggcagcacctgtctcctttcaccccagggcctgagcctggccagcctacaatggggatgttgtgtttctgttcaccttcgtttactatgcctgtgtcttctccaccacgctggggtctgggaggaatggacagacagaggatgagctctacccagggcctgcaggacctgcctgtagcccactctgctcgccttagcactaccactcctgccaaggaggattccatttggcagagcttcttccaggtgcccagctatacctgtgcctcggcttttctcagctggatgatggtcttcagcctctttctgtcccttctgtccctcacagcactagtatttcatgttgcacacccactcagctccgtgaacttgtgagaacacagccgattcacctgagcaggacctctgaaaccctggaccagtggtctcacatggtgctacgcctgcatgtaaacacgcctgcaaacgctgcctgccggtaaacacgcctgcaaacgctgcctgcccgtaaacacgcctgcaaacgctgcctgcccacacaggttcacgtgcagctcaaggaaaggcctgaaaggagcccttatctgtgctcaggactcagaagcctctgggtcagtggtccacatcccgggacgcagcaggaggccaggccggcgagccctgtggatgagccctcagaacccttggcttgcccacgtggaaaagggatagaggttgggtttccccccttttatagatggtcacgcacctgggtgttacaaagttgtatgtggcatgaatactttttgtaatgattgattaaatgcaagatagtttatct

SEQ ID NO: 8637 - protein, 130 aa, Homo sapiens; identical to SEQ ID NO: 8617

SEQ ID NO: 8638 - DNA, 714 bp, Homo sapiens
gggaccagcgagcggccttgagaggctctggctcttgcttcttaggcggcccgaggacgccatggccgagtgcccgacactcggggaggcagtcaccgaccacccggaccgcctgtgggcctgggagaagttcgtgtatttggacgagaagcagcacgcctggctgcccttaaccatcgagataaaggataggttacagttacgggtgctcttgcgtcgggaagacgtcgtcctggggaggcctatgacccccacccagataggcccaagcctgctgcctatcatgtggcagctctaccctgatggacgataccgatcctcagactccagtttctggcgcttagtgtaccacatcaagattgacggcgtggaggacatgcttctcgagctgctgccagatgactgatgtatggtgagctccactggagcctgacccctcttagtccacagtggctgtatcagaaagaaagaccaccccttctccatgaaggcagtgctaacccctccccgactgctgccatctgagggtccctagggatgggagaggcttcctggaggcactcatgtctcccttaccacttcgggagccaagggctttgtaggcagccccctttatcgcagctgctcatatctataaagtacttcacaagtttcagctggcactttcatttaccattgcttttttttttttttgagatgagtctggctctgtgg

SEQ ID NO: 8639 - protein, 114 aa, Homo sapiens; identical to SEQ ID NO: 992

SEQ ID NO: 8640 - DNA, 2779 bp, Homo sapiens
agtcatctggcagcagctcgagaagcatgtcctccacgccgtcaatctgagaggcagagagagagagaaggcattgatcggccagagccctccactccctccattcctcactcctgcgccttcccctagctggaaacagcaggtaggaacccaggtgtgaggatttcaggggctcttggagactgcccctcctcccaccagccttcagcctgtgactgcccaccagagatgtcttcctgcggctagctggtggctgggaggaagtggaggctggaatgcaatggtgtgatcttggctcactgcgacctccacctcctgggttcaagcgattctcctgcttctgcctcccgagtagctgggattacagacaaagaattcaagactaaactgggcatggtgacacgcacctgtagtctcagctacttgggaggctgaggcaggagaatcacatgaacctggcaggcggaggttgcagtgagccgagattgtgccactgcactccagcctggccacagagcgagactccgtctcaaaaaaaaaaaaaaaagaaaaaaagaaaaaagaagaagtcaagactaagaagagtgaagtatgaagtaattcacccacagacacccagctagtgagtggcagacctggaagacaaactagttctgtttggcatcagaatctatgctgtcagccacctcaccacattcatgtgacatccaacaaagtggtgccttcacctgctactaagtcttgctagggctagttccagagccaagactatgaagtggacaatgatctatgaagcgctaagtgaacagatgtcatgtaaatagcttggatctctacgtgcatgtgtgcattgtatatgtttaccaaagaccttgttacagtgtttttaggcatggctcactttataaaggtcatcacagttggccaagctatctggtatttattactcatttgatactcacacctgctcaatgatgctggtatcattactctccataatgattttcctatcattttacagatggggttcagaaagatcaggtggtagatccatagtcacactctagttaattgataggactgagaattcaatgcatgcccactgccttctcttacaagtcttggggtatttgagtgtaattcaataatgacaaccccttcactgtccaaaaggggtgaatgaaacatcaagctgtcacaaaggctaggttggagggcatggcttatatccttgggtaagtaggcttactaaacttaaaccctaaagttgaactgacttaactaccccgtcccagcagctggagtgggacaggacactgggtctatatggagaggggtctgcccagattagctttaggacgtggagaagcagagaactcatgttcctacaaacaggttcactctcaagataaagacaaggaaccaaactcagcctgcctgcttcattttttcatatttgccaatcagataagtcacttccgcccccagagagatttaataaaggagcagagaaagacttctaataaaattccctccatatggaaggaaaaggagacatcgggagttacgttaatcatgctcatttcttaacagtgcaaatatcaagagttagaaattagagttcctggctgggtgcggtgcctcactcctgtaatcctagcactttggaaggccaaggcaggtggattgccggagctcaggagttcgagaccagcctgggcaacacggtgaaaccttgtctctactaaaatacaaaaaaatagccaggcgtggcagcgtgcacctgtaatcccagctactcaggaggctaaggcaggagaattgcttgaacaagggagccagaggttgcagtgagctgagattgcaccactgcactccagcctgggtgacagagcgagactctgtctccaaaaaaaaaaaacaaaacagaaataagagttcccacatgacagcaagaatcactgaaaatgctggacccactgtcaatgctgtattgttgcaaagaaaatgtttatcttgcctaactttaaagtcacacatgcctgggaacttccaactagaacacagctggcaaagcagacaccctctccctgcagcctcgttgaaaatgacctcctttacatttcctcattgagaatctgcccagtgaggactgtggcagaagagagtcagggagaattttctagctgattagggttagaaaatgaagacgagggctctcttgtaatcagcaggaagctatgatagaaaagaatgccttttaaatttgaagtgcaaaactagaaaatagaaaattattaggggggtttgatatgaagtttcggaattcttttcaagactgtgtgttttgaagttaagattttaaataatgtaggaaggtacagtctatactgatgggttcaggatatgctaacccaaaatatggcaccttggtgtttgagaaaatggcggaagcaggaaggtcattctcaccatccacctccctttccccctcctgaagcaggtcttctttgaaaggcccctccctgtaaccagaagaaaggaacattcttacctttgaagtcacagggtcacagagaagaatctgaacaggacttactaaattcttccagtttgtcaccatttgctcataccatctttgtccagttatatttctccaaagctatccactcttcatcaaacttagcataaaaattgtaaaaccttacacatttcttcaggtcttccttttccttaggaagcctcccatgtcacatgaaacttaaataaaataaatctg

SEQ ID NO: 8641 - protein, 36 aa, Homo sapiens
MQWCDLGSLRPPPPGFKRFSCFCLPSSWDYRQRIQD

SEQ ID NO: 8642 - DNA, 2652 bp, Homo sapiens
agtcatctggcagcagctcgagaagcatgtcctccacgccgtcaatctgagaggcagagagagagagaaggcattgatcggccagagccctccactccctccattcctcactcctgcgccttcccctagctggaaacagcaggctggaatgcaatggtgtgatcttggctcactgcgacctccacctcctgggttcaagcgattctcctgcttctgcctcccgagtagctgggattacagacaaagaattcaagactaaactgggcatggtgacacgcacctgtagtctcagctacttgggaggctgaggcaggagaatcacatgaacctggcaggcggaggttgcagtgagccgagattgtgccactgcactccagcctggccacagagcgagactccgtctcaaaaaaaaaaaaaaaagaaaaaaagaaaaaagaagaagtcaagactaagaagagtgaagtatgaagtaattcacccacagacacccagctagtgagtggcagacctggaagacaaactagttctgtttggcatcagaatctatgctgtcagccacctcaccacattcatgtgacatccaacaaagtggtgccttcacctgctactaagtcttgctagggctagttccagagccaagactatgaagtggacaatgatctatgaagcgctaagtgaacagatgtcatgtaaatagcttggatctctacgtgcatgtgtgcattgtatatgtttaccaaagaccttgttacagtgtttttaggcatggctcactttataaaggtcatcacagttggccaagctatctggtatttattactcatttgatactcacacctgctcaatgatgctggtatcattactctccataatgattttcctatcattttacagatggggttcagaaagatcaggtggtagatccatagtcacactctagttaattgataggactgagaattcaatgcatgcccactgccttctcttacaagtcttggggtatttgagtgtaattcaataatgacaaccccttcactgtccaaaaggggtgaatgaaacatcaagctgtcacaaaggctaggttggagggcatggcttatatccttgggtaagtaggcttactaaacttaaaccctaaagttgaactgacttaactaccccgtcccagcagctggagtgggacaggacactgggtctatatggagaggggtctgcccagattagctttaggacgtggagaagcagagaactcatgttcctacaaacaggttcactctcaagataaagacaaggaaccaaactcagcctgcctgcttcattttttcatatttgccaatcagataagtcacttccgcccccagagagatttaataaaggagcagagaaagacttctaataaaattccctccatatggaaggaaaaggagacatcgggagttacgttaatcatgctcatttcttaacagtgcaaatatcaagagttagaaattagagttcctggctgggtgcggtgcctcactcctgtaatcctagcactttggaaggccaaggcaggtggattgccggagctcaggagttcgagaccagcctgggcaacacggtgaaaccttgtctctactaaaatacaaaaaaatagccaggcgtggcagcgtgcacctgtaatcccagctactcaggaggctaaggcaggagaattgcttgaacaagggagccagaggttgcagtgagctgagattgcaccactgcactccagcctgggtgacagagcgagactctgtctccaaaaaaaaaaaacaaaacagaaataagagttcccacatgacagcaagaatcactgaaaatgctggacccactgtcaatgctgtattgttgcaaagaaaatgtttatcttgcctaactttaaagtcacacatgcctgggaacttccaactagaacacagctggcaaagcagacaccctctccctgcagcctcgttgaaaatgacctcctttacatttcctcattgagaatctgcccagtgaggactgtggcagaagagagtcagggagaattttctagctgattagggttagaaaatgaagacgagggctctcttgtaatcagcaggaagctatgatagaaaagaatgccttttaaatttgaagtgcaaaactagaaaatagaaaattattaggggggtttgatatgaagtttcggaattcttttcaagactgtgtgttttgaagttaagattttaaataatgtaggaaggtacagtctatactgatgggttcaggatatgctaacccaaaatatggcaccttggtgtttgagaaaatggcggaagcaggaaggtcattctcaccatccacctccctttccccctcctgaagcaggtcttctttgaaaggcccctccctgtaaccagaagaaaggaacattcttacctttgaagtcacagggtcacagagaagaatctgaacaggacttactaaattcttccagtttgtcaccatttgctcataccatctttgtccagttatatttctccaaagctatccactcttcatcaaacttagcataaaaattgtaaaaccttacacatttcttcaggtcttccttttccttaggaagcctcccatgtcacatgaaacttaaataaaataaatctg

SEQ ID NO: 8643 - protein, 36 aa, Homo sapiens; identical to SEQ ID NO: 8641

SEQ ID NO: 8644 - DNA, 614 bp, Homo sapiens
gccttgagaggctctggctcttgcttcttaggcggcccgaggacgccatggccgagtgcccgacactcggggaggcagtcaccgaccacccggaccgcctgtgggcctgggagaagttcgtgtatttggacgagaagcagcacgcctggctgcccttaaccatcgagatacagggtctcgctctgtgacccaggctggtcttaaactcctggcctcaagcgatcctcctgcctctgccttccaaagcactggaattacaagtgtgagccgctgcaacccgccagaaaaaagtgtgcctttcatggccctgtctgggtggctagacacgtgtgtgtgctggtggtcctggcccagccagagtccctgagaggagcatgcatggcctaaggaagtgagcttcagggaacagtgatgaccatcatttcacactcggacccctgcccagatgggtggatggctggcaggagggattccggttttctgcgcctggagaagccctggcaagcggaacctgaaagtatgccctgtccttttcttctcctcagataaaggataggttacagttacgggtgctcttgcgtcgggaagacgtcgtcctggggaggcctatgacc

SEQ ID NO: 8645 - protein, 46 aa, Homo sapiens
MAECPTLGEAVTDHPDRLWAWEKFVYLDEKQHAWLPLTIEIQGLAL

SEQ ID NO: 8646 - DNA, 589 bp, Homo sapiens
ggactgcccgggaggagtctccacgccatgtgagtcaatcagggaaccctgggcaattgcaaactgatcgtagaaggcggagttgtccacgcccagctccaagtcgatgtcctggagctcttcacagctgtggggtacggtgcccttctcggtgatggtgtcgcaccacatggtgaagcccacgctcacgatggtgctggcaatgaagaccaggaagaccacgaaggcgctgaccaggaggttcaggaaggcggagaagaaggagccctcgtgtcccttgcagaggaagaagagcgtgcgccaggcgtgcgcggcggccagcagcagagacaggaggctggcgagcaggctgaagcggcaggcggccggcgggccccactcctgcaccgtgaagcgctcgcgctcctgcaccgtgaggttggcgctcagccacatgccctcggtgaagagcaggcagcggccgcggaagtcgtggccgttctcggacagcgggaccaccaccacgaagctgaacaggaaggccaagaagtagcaggcgcactgagcgaaaaggaaattgttgagcgccatggccggcccgggcgagagc

SEQ ID NO: 8647 - protein, 141 aa, Homo sapiens
MSWSSSQLWGTVPFSVMVSHHMVKPTLTMVLAMKTRKTTKALTRRFRKAEKKEPSCPLQRKKSVRQACAAASSRDRRLASRLKRQAAGGPHSCTVKRSRSCTVRLALSHMPSVKSRQRPRKSWPFSDSGTTTTKLNRKAKK

SEQ ID NO: 8648 - DNA, 597 bp, Homo sapiens
cagctttgcgatccagcagagagggctggagacgggacgaaggccacaacagacccggccctgccagcgggcggtggcgcctccagatcagagccctcgggaaggaggcctgggcgggcctggcccgttcacctgtgtgccctgcagttctgcccgaggctcaactctcaagggcctgggaggggtgctgccggccaagagggtccaggacctcactggactgtgccccacagggagatcccgaagagcctgtttctgtccctcggggagccaggagggaaccaggaccatgttccagtaaatgaggactgcagcaggagccgtgagccctgactcccggccagagacacgacgtcagaccagaaagaatgaggaggccgcgtggggcccgcgggtgtgcagggcagagagggaggacaacaggaagtgccccccctccatcctgaaacggagccggccggagcaccaccgcccagaggccaagccccagaggacctcgaggcgcgtgtggttccgagaacccccagcggtgaccgtccactacattgctgacaagaacgccacagccactgtcagggctgtgtgtgtgcgtcctgc

SEQ ID NO: 8649 - protein, 97 aa, Homo sapiens
MRTAAGAVSPDSRPETRRQTRKNEEAAWGPRVCRAEREDNRKCPPSILKRSRPEHHRPEAKPQRTSRRVWFREPPAVTVHYIADKNATATVRAVCVR

SEQ ID NO: 8650 - DNA, 1848 bp, Homo sapiens
cagctttgcgatccagcagagagggctggagacgggacgaaggccacaacagacccggccctgccagcgggcggtggcgcctccagatcagagccctcgggaaggaggcctgggcgggcctggcccgttcacctgtgtgccctgcagttctgcccgaggctcaactctcaagggcctgggaggggtgctgccggccaagagggtccaggacctcactggactgtgccccacagggagatcccgaagagcctgtttctgtccctcggggagccaggagggaaccaggaccatgttccagtaaatgaggactgcagcaggagccgtgagccctgactcccggccagagacacgacgtcagaccagaaagaatgaggaggccgcgtggggcccgcgggtgtgcagggcagagagggaggacaacaggaagtgccccccctccatcctgaaacggagccggccggagcaccaccgcccagaggccaagccccagaggacctcgaggcgcgtgtggttccgagaacccccagcggtgaccgtccactacattgctgacaagaacgccacagccactgtcagggtgcccggccggcccaggccacacggcggctccctgctcctgcagctgtgtgtgtgcgtcctgctcgtgctggccctgggcctatactgcggccgggccaagcccgtggcaacggcactggaggacctgcgggcccggctcctcggccttgtcctgcacctgcggcacgtggccctcacctgctggcgcggcctcctgcggctctgacgggcaggacgggcaggacgggcagggcttccaggagagctcaagcactccgggggctccgagacagcctgagccctggccctgctgcttggtgaatcatgggggccaaaaggggctgctgcctgagggctaactaggaaaagggggaccccgtggcgtgagatcggacatggggggcacagcaggcggccccgccacactagtcagcacagccctcctgtctcctgtgttgggtccatgtgagattttattagaaagaggattcgactgctaacagttgaggctccccaggctcacccaaagacccctccctcgtcccagcaggaactcctgctgctgctagggcctggcccggccatcaccgtgtgcaccctcttgaggagggggacacactgcccgtgttcaaggggctgctcggaggaggcaaacccagccttttgcgattatggcttgtggggaatccagacctcgaaaccccacggggagggaagggtctggttgtcaaggtgggtccctttgatgtgaggtgccatcctctgagcccaggtctgacccccctacccagccccgtgagtctggagaggccccagggaaggacccctcatcaggggcggcttcaggtgtagaagccgaggggacagcaaggggcccagacacccccgaccttcagaacagccatctgtgcccagctctgcaggccaggcacacccagctgagcccggggccagccagcaccacccaccagctggggcctgtgggtcccggagaccgtctgtggttgtggctttgtcgccggattgcagagctgaagggagccctgtggatgacaaacaccaggggcctctccagaccctacgtggggggagggctgaacaaagcagggaggcccacggttagacaccaggcagaactgcccaggagagacacagggacaatcagaccagcgtcctcgaggttagcctgaggcgggtgggcacggccgaccatccacccggtggttcctgtttgtcccaccacttaactgggagacactgttttattaaaacacaccgtggcttccttca

SEQ ID NO: 8651 - protein, 160 aa, Homo sapiens; identical to SEQ ID NO: 994

SEQ ID NO: 8652 - DNA, 573 bp, Homo sapiens
acaacagacccggccctgccagcgggcggtggcgcctccagatcagagccctcgggaaggaggcctgggcgggcctggcccgttcacctgtgtgccctgcagttctgcccgaggctcaactctcaagggcctgggaggggtgctgccggccaagagggtccaggacctcactggactgtgccccacagggagatcccgaagagcctgtttctgtccctcggggagccaggagggaaccaggaccatgttccagtaaatgaggactgcagcaggagccgtgagccctgactcccggccagagacacgacgtcagaccagaaagaatgaggaggccgcgtggggcccgcgggtgtgcagggcagagagggaggacaacaggaagtgccccccctccatcctgaaacggagccggccggagcaccaccgcccagaggccaagccccagaggacctcgaggcgcgtgtggttccgagaacccccagcggtgaccgtccactacattgctgacaagaacgccacagccactgtcaggggtgagttctgagcccacatccctgtgccccactgccccct

SEQ ID NO: 8653 - protein, 95 aa, Homo sapiens
MRTAAGAVSPDSRPETRRQTRKNEEAAWGPRVCRAEREDNRKCPPSILKRSRPEHHRPEAKPQRTSRRVWFREPPAVTVHYIADKNATATVRGEF

SEQ ID NO: 8654 - DNA, 561 bp, Homo sapiens
agacccggccctgccagcgggcggtggcgcctccagatcagagccctcgggaaggaggcctgggcgggcctggcccgttcacctgtgtgccctgcagttctgcccgaggctcaactctcaagggcctgggaggggtgctgccggccaagagggtccaggaccatgttccagtaaatgaggactgcagcaggagccgtgagccctgactcccggccagagacacgacgtcagaccagaaagaatgaggaggccgcgtggggcccgcgggtgtgcagggcagagagggaggacaacaggaagtgccccccctccatcctgaaacggagccggccggagcaccaccgcccagaggccaagccccagaggacctcgaggcgcgtgtggttccgagaacccccagcggtgaccgtccactacattgctgacaagaacgccacagccactgtcaggggtgagttctgagcccacatccctgtgccccactgccccctccgtgggtgcacccaccctcactccctccccgagggaggtgtcacagggccagggcctctaaggagtccc

SEQ ID NO: 8655 - protein, 95 aa, Homo sapiens; identical to SEQ ID NO: 8653

SEQ ID NO: 8656 - DNA, 2048 bp, Homo sapiens
gttccagtggtgagcgttgggctgggagccaaggcttttcccaggagcccagccaccccgcctggctgtgttctgcctccgccctgcagaggaaaggccagcgaggcagtgtccatggtcccagtcttcttccaccggaagaaggcacaacctgcatctgcagccccagggccattgggttaggcctgtggccaaactactaaggtgctgggagactgaggaggcccagctcctcctggggccaccaagcccgtggttgacggcctccccatggaccgggctgtcccgagagcagcaagtcagccggggccctcagggccgctgaggccactgctcagtgtcgccgtaatggaaacttctcagctggttgtgagccgcaacagctctggttcacaccctgcgacagcgaggctgtgaccgccagtggatctcggggctgatcaggcctgagccaccccggaggtacagcaccagcaggagcccaggaccatgttccagtaaatgaggactgcagcaggagccgtgagccctgactcccggccagagacacgacgtcagaccagaaagaatgaggaggccgcgtggggcccgcgggtgtgcagggcagagagggaggacaacaggaagtgccccccctccatcctgaaacggagccggccggagcaccaccgcccagaggccaagccccagaggacctcgaggcgcgtgtggttccgagaacccccagcggtgaccgtccactacattgctgacaagaacgccacagccactgtcagggtgcccggccggcccaggccacacggcggctccctgctcctgcagctgtgtgtgtgcgtcctgctcgtgctggccctgggcctatactgcggccgggccaagcccgtggcaacggcactggaggacctgcgggcccggctcctcggccttgtcctgcacctgcggcacgtggccctcacctgctggcgcggcctcctgcggctctgacgggcaggacgggcaggacgggcagggcttccaggagagctcaagcactccgggggctccgagacagcctgagccctggccctgctgcttggtgaatcatgggggccaaaaggggctgctgcctgagggctaactaggaaaagggggaccccgtggcgtgagatcggacatggggggcacagcaggcggccccgccacactagtcagcacagccctcctgtctcctgtgttgggtccatgtgagattttattagaaagaggattcgactgctaacagttgaggctccccaggctcacccaaagacccctccctcgtcccagcaggaactcctgctgctgctagggcctggcccggccatcaccgtgtgcaccctcttgaggagggggacacactgcccgtgttcaaggggctgctcggaggaggcaaacccagccttttgcgattatggcttgtggggaatccagacctcgaaaccccacggggagggaagggtctggttgtcaaggtgggtccctttgatgtgaggtgccatcctctgagcccaggtctgacccccctacccagccccgtgagtctggagaggccccagggaaggacccctcatcaggggcggcttcaggtgtagaagccgaggggacagcaaggggcccagacacccccgaccttcagaacagccatctgtgcccagctctgcaggccaggcacacccagctgagcccggggccagccagcaccacccaccagctggggcctgtgggtcccggagaccgtctgtggttgtggctttgtcgccggattgcagagctgaagggagccctgtggatgacaaacaccaggggcctctccagaccctacgtggggggagggctgaacaaagcagggaggcccacggttagacaccaggcagaactgcccaggagagacacagggacaatcagaccagcgtcctcgaggttagcctgaggcgggtgggcacggccgaccatccacccggtggttcctgtttgtcccaccacttaactgggagacactgttttattaaaacacaccgtggcttccttca

SEQ ID NO: 8657 - protein, 160 aa, Homo sapiens; identical to SEQ ID NO: 994

SEQ ID NO: 8658 - DNA, 543 bp, Homo sapiens
atgtgagattttattagaaagaggattcgactgctaacagttgaggctccccaggctcacccaaagacccctccctcgtcccagcaggaactcctgctgctgctagggcctggcccggccatcaccgtgtgcaccctcttgaggagggggacacactgcccgtgttcaaggggctgctcggaggaggcaaacccagccttttgcgattatggcttgtggggaatccagacctcgaaaccccacggggagggaagggtctggttgtcaaggtgggtccctttgatgtgaggtgccatcctctgagcccaggtctgacccccctctccagaccctacgtggggggagggctgaacaaagcagggaggcccacggttagacaccaggcagaactgcccaggagagacacagggacaatcagaccagcgtcctcgaggttagcctgaggcgggtgggcacggccgaccatccacccggtggttcctgtttgtcccaccacttaactgggagacactgttttattaaaacacaccgtggcttccttca

SEQ ID NO: 8659 - protein, 132 aa, Homo sapiens
GSPGSPKDPSLVPAGTPAAARAWPGHHRVHPLEEGDTLPVFKGLLGGGKPSLLRLWLVGNPDLETPRGGKGLVVKVGPFDVRCHPLSPGLTPLSRPYVGGGLNKAGRPTVRHQAELPRRDTGTIRPASSRLA

SEQ ID NO: 8660 - DNA, 619 bp, Homo sapiens
aggattcgactgctaacagttgaggctccccaggctcacccaaagacccctccctcgtcccagcaggaactcctgctgctgctagggcctggcccggccatcaccgtgtgcaccctcttgaggagggggacacactgcccgtgttcaaggggctgctcggaggaggcaaacccagccttttgcgattatggcttgtggggaatccagacctcgaaaccccacggggagggaagggtctggttgtcaaggtgggtccctttgatgtgaggtgccatcctctgagcccaggtctgacccccctacccagccccgtgagtctggagaggccccagggaaggacccctcatcaggggcggcttcaggtgtagaagccgaggggacagcaaggggcccagacacccccgaccctacgtggggggagggctgaacaaagcagggaggcccacggttagacaccaggcagaactgcccaggagagacacagggacaatcagaccagcgtcctcgaggttagcctgaggcgggtgggcacggccgaccatccacccggtggttcctgtttgtcccaccacttaactgggagacactgttttattaaaacacaccgtggcttccttca

SEQ ID NO: 8661 - protein, 67 aa, Homo sapiens
VWRGPREGPLIRGGFRCRSRGDSKGPRHPRPYVGGGLNKAGRPTVRHQAELPRRDTGTIRPASSRLA

SEQ ID NO: 8662 - DNA, 2035 bp, Homo sapiens
cgagaaggagctgctgctggcccggccgtccccacgcacctccttccaagaggagaagagcgctgtcatttaggcacagtgcaggcagggggagctggccccgacctccctgctgcgctcgggggcacgggcctgcctggggaagcagctggggggctctgcctgggccctggccacatgcagccctgcgtgtgtcccctcgacgccacgtgtagtgagccctgacccactggacatggggactctttccagtccggagagctccttgtctgtgtccccagcagaaggtggggtggctcctgcctcaccctctgcccagccctgatccaggccacagccatctagggccctgaaggaggggcaggaggcaggggtggcttctggaacctgaggcttggccccggttgggtctgttcttgggggctgcactgctggatcccaggagcaggtgtggaacagccccatggccagggtgatggaaatcctcggctgcatgcagacatagacccaccctggactgggctgtctccggagcccagacacatcgccctgggaaggggcagctgggcctgcagtgtgctgggcaggggctggcggccctggtcgtgggctctccagggtccctcaggggattgggcctctccccaggcaggaaggtgggaagtgcaggcatgacccggggttcctgaggctggtccaccaagttgcttctgagacgccttcgcttctgtcctggctggctgttaatgatatccctgttctaattccactctggctaaactgaaagtaaagatccttaagcttacatgtgtctattcctcaaaatcaaaataaaaacaaaagcacccgagtctccaacagggatgaggaggagcgtgtggggcttctgtctgccctctccgctgttggctggcctggctcgtggttctaactgtctgtaatttgtgggtcacacacagtttgctcaggctttgagcctttcgtgtccgaagcttttaggaattagaagttggccttcccgaggttctgccttcctctctgtacattttctagtggcttcgagtctcactgcttcccatgcagcttccccaggtgggaggatccatttcgaaggatctcttgggggtgtggtgcccatctttgagcaatgtttattcgaaaacacctgaggtcgtagcgtgggaccccgcaaagccaggcacgtccttgcgttgcctttgcagtggacagacagcagcggctgggggagatcggcctgtgcggtgtcccccgtcagaaccggggctggaggggtgtcccaagcacacagggctgagcctgggcctgtgactgctctgagagacccaacctctgggagccgctgcttctgcatccagaatatggggcaggaacctgcccatcctccttcctggggtggggtgggatgggctgggcctggggagagatgctggagggtccccgggggagcccccaccatggtcccttctgggccacttctggaaacagccccttttgttacctccacccgcaactctgggctccctggattccaaagctggaagtgaccctggagaccacttcacctgttccctggcacctggagttgcagggacacaccctgactgcagggcaaagggagccggccgggcatccctcaagacccaggggcttggtcagcccctgcccgagtggacacatccactcccaggcctgcaggagatggggaggttccaggcgcccaggacatccgctttggccactgaggccgattccttagcaaatcggttctggtttctctcatttctataaaaacaccaagactgaaggaagccacggtgtgttttaataaaacagtgtctcccagttaagtggtgggacaaacaggaaccaccgggtggatggtcggccgtgcccacccgcctcaggctaacctcgaggacgctggtctgattgtccctgtgtctctcctgggcagttctgcctggtgtctaaccgtgggcctccctgctttgttcagccctccccccacgtaggg

SEQ ID NO: 8663 - protein, 117 aa, Homo sapiens
MGWAWGEMLEGPRGSPHHGPFWATSGNSPFCYLHPQLWAPWIPKLEVTLETTSPVPWHLELQGHTLTAGQREPAGHPSRPRGLVSPCPSGHIHSQACRRWGGSRRPGHPLWPLRPIP

SEQ ID NO: 8664 - DNA, 804 bp, Homo sapiens
cgagaaggagctgctgctggcccggccgtccccacgcacctccttccaagaggagaagagcgctgtcatttaggcacagtgcaggcagggggagctggccccgacctccctgctgcgctcgggggcacgggcctgcctggggaagcagctggggggctctgcctgggccctggccacatgcagccctgcgtgtgtcccctcgacgccacgtgtagtgagccctgacccactggacatggggactctttccagtccggagagctccttgtctgtgtccccagcagaaggtggggtggctcctgcctcaccctctgcccagccctgatccaggccacagccatctagggccctgaaggaggggcaggaggcaggggtggcttctggaacctgaggcttggccccggttgggtctgttcttgggggctgcactgctggatcccaggagcaggtgtggaacagccccatggccagggtgatggaaatcctcggctgcatgcagacatagacccaccctggactgggctgtctccggagcccagacacatcgccctgggaaggggcagctgggcctgcagtgtgctgggcaggggctggcggccctggtcgtgggctctccagggtccctcaggggattgggcctctccccaggcaggaaggtgggaagtgcaggcatgacccggggttcctgaggctggtccaccaagttgcttctgagacgccttcgcttctgtcctggctggctgttaatgatatccctgttctaattccactctggctaaactgaaagtaaagatccttaagctt

SEQ ID NO: 8665 - protein, 44 aa, Homo sapiens
ALTHWTWGLFPVRRAPCLCPQQKVGWLLPHPLPSPDPGHSHLGP

SEQ ID NO: 8666 - DNA, 1207 bp, Homo sapiens
ccagaggctggaaggtgccgtgagctcctccccacacgcagcctctgcctggatggcagaattcatgcagaattcgttcagggctaagtgacatctggccacccctgggccagctggcatggagacagcatccggccagggttgggggagacaagctggacgccctccacataggctggccagtcaggtcctactgggacagccaaggggccctgtgcgaggcctggaggtgccccccgcccccgccccacacccatagtctctctgcaccatcctcatcagggagccggcacccacccagtccactgccaggctcacaggtgggcactggggcgctcacctcactacacgtggcgtcgaggggacacacgcagggctgcatgtggccagggcccaggcagagccccccagctgcttccccaggcaggcccgtgcccccgagcgcagcagggaggtcggggccagctccccctgcctgcactgtgcctaaatgacagcgctcttctcctcttggaaggaggtgcgtggggacggccgggccagcagcagctccttctcgtggatcaggctgtccagcaggtcctcctgacggtagttgtggtagaccttcaggaaggccagcgtggtgatggccagccaggccagccatgaggcccagaggccaaactgggcaattgcaaactgatcgtagaaggcggagttgtccacgcccagctccaagtcgatgtcctggagctcttcacagctgtggggtacggtgcccttctcggtgatggtgtcgcaccacatggtgaagcccacgctcacgatggtgctggcaatgaagaccaggaagaccacgaaggcgctgaccaggaggttcaggaaggcggagaagaaggagccctcgtgtcccttgcagaggaagaagagcgtgcgccaggcgtgcgcggcggccagcagcagagacaggaggctggcgagcaggctgaagcggcaggcggccggcgggccccactcctgcaccgtgaagcgctcgcgctcctgcaccgtgaggttggcgctcagccacatgccctcggtgaagagcaggcagcggccgcggaagtcgtggccgttctcggacagcgggaccaccaccacgaagctgaacaggaaggccaagaagtagcaggcgcactgagcgaaaaggaaattgttgagcgccatggccggcccgggcgagagc

SEQ ID NO: 8667 - protein, 141 aa, Homo sapiens; identical to SEQ ID NO: 8647

SEQ ID NO: 8668 - DNA, 1623 bp, Homo sapiens
ccaaacagttgaaggagaaacaatttaatcagaaccaggcctgagctacattaagctgattctcatttgagcgtatttgccatcagactgcactcacaccttaatccaactggcacaaattaggcctgaggcctcttccactcactaaatttgcatgaaggtgtctttgacaggtccagttcatctcggcaaagagcattcaggcccacccatgtccagcacccttggagggctcctggccaggagaagcgtcctcaggccagccacggccagcaagagccttcagaggccagcctggggtccggaattggacctgaagccagcgggccctgatcagtgctggcaggagccaggtgtctggtctcagccacccccacccggcacccctcatctgcctcatctccgtctggggcacatctgcagatttcaaggggcaaacccaattccagggttccccctccggccctcacgggccactgatgtgtccccacatgcctgcatttcagcaaatagcgtccctcagagtgggggccaccatcgccctccaccaagtctcctagggggcgggggacgcagcttatacaagggcagggtggcaaatctgaattcacaagtgggatcccctgcctccttccttggactctgtatcagcttccccctggctaggggactcctctaagcctccagctctgatctgaacaggcccacccagcgccagcaccaaagtccaaagcccttgtccctacactggacccccaggatctgatgcctggtttcgtttctggcaccacctccccccacacccccacacttcccaccccagaccccagggccttgccacttcctgattctaactcactgtggccatctcctccccaaacccacctacaaaagcccagctctcccccacctcctgcaggaagccttcccgactgctcccactgcctggtcccattgctaactaccttatccacacaggagcctgcctcctcctctggatgggggagagctcagcaaatgtccagcagtaaatggccccctcccagcattgcaagcctcccttcttgcccagagccccctacctgggcaattgcaaactgatcgtagaaggcggagttgtccacgcccagctccaagtcgatgtcctggagctcttcacagctgtggggtacggtgcccttctcggtgatggtgtcgcaccacatggtgaagcccacgctcacgatggtgctggcaatgaagaccaggaagaccacgaaggcgctgaccaggaggttcaggaaggcggagaagaaggagccctcgtgtcccttgcagaggaagaagagcgtgcgccaggcgtgcgcggcggccagcagcagagacaggaggctggcgagcaggctgaagcggcaggcggccggcgggccccactcctgcaccgtgaagcgctcgcgctcctgcaccgtgaggttggcgctcagccacatgccctcggtgaagagcaggcagcggccgcggaagtcgtggccgttctcggacagcgggaccaccaccacgaagctgaacaggaaggccaagaagtagcaggcgcactgagcgaaaaggaaattgttgagcgccatggccggcccgggcgagagc

SEQ ID NO: 8669 - protein, 196 aa, Homo sapiens
MAPSQHCKPPFLPRAPYLGNCKLIVEGGVVHAQLQVDVLELFTAVGYGALLGDGVAPHGEAHAHDGAGNEDQEDHEGADQEVQEGGEEGALVSLAEEEERAPGVRGGQQQRQEAGEQAEAAGGRRAPLLHREALALLHREVGAQPHALGEEQAAAAEVVAVLGQRDHHHEAEQEGQEVAGALSEKEIVERHGRPGR

SEQ ID NO: 8670 - DNA, 702 bp, Homo sapiens
gcatgaaggtgtctttgacaggtccagttcatctcggcaaagagcattcaggcccacccatgtccagcacccttggagggctcctggccaggagaagcgtcctcaggccagccacggccagcaagagccttcagaggccagcctggggtccggaattggacctgggcaattgcaaactgatcgtagaaggcggagttgtccacgcccagctccaagtcgatgtcctggagctcttcacagctgtggggtacggtgcccttctcggtgatggtgtcgcaccacatggtgaagcccacgctcacgatggtgctggcaatgaagaccaggaagaccacgaaggcgctgaccaggaggttcaggaaggcggagaagaaggagccctcgtgtcccttgcagaggaagaagagcgtgcgccaggcgtgcgcggcggccagcagcagagacaggaggctggcgagcaggctgaagcggcaggcggccggcgggccccactcctgcaccgtgaagcgctcgcgctcctgcaccgtgaggttggcgctcagccacatgccctcggtgaagagcaggcagcggccgcggaagtcgtggccgttctcggacagcgggaccaccaccacgaagctgaacaggaaggccaagaagtagcaggcgcactgagcgaaaaggaaattgttgagcgccatggccggcccgggcgagagc

SEQ ID NO: 8671 - protein, 232 aa, Homo sapiens
MKVSLTGPVHLGKEHSGPPMSSTLGGLLARRSVLRPATASKSLQRPAWGPELDLGNCKLIVEGGVVHAQLQVDVLELFTAVGYGALLGDGVAPHGEAHAHDGAGNEDQEDHEGADQEVQEGGEEGALVSLAEEEERAPGVRGGQQQRQEAGEQAEAAGGRRAPLLHREALALLHREVGAQPHALGEEQAAAAEVVAVLGQRDHHHEAEQEGQEVAGALSEKEIVERHGRPGR

SEQ ID NO: 8672 - DNA, 3816 bp, Homo sapiens
ctggatcttcctgccttgacagccccacagaaaatgctaagagcccaggaaggttgtgaagggtgtgtgtgtgtttgtgtgtgtgtctgtgtgctgtgtgtgtctgtgtgtgtttgtgtgtgtctgtgtgtttgtgtgtgtgtatgtgtgtgtctgtgtttgtgtgtgttgtctgtgtctgtgtgtctgtgtgtctgtgtgtctgtgtgtctgtgtgtgtgtcttgtgtctgtgtgtttgtgtgtgtgtctgtgtgtttgtgtgtctgtgtgtttgtgtgtgtgtttgcatctgtgtgtttgtgtgtctgtgtgtgtgtgtgtttgtgtttgtgtgtctgtgtgtgtttgtgtgtctgtgtgtgtttgcatctgtgtgtgtgtgtgggtttgtgtgtgtctgtgtgtttctgtgtgtctgtgtgtgtgtgtctgtgtgtgtgtgtttgcatctgtgtgtttgtgtgtgtgtgggtttgtgtgtgtctgtgtgtttgtgtgtgtctgtgtgtgtgtctgtgtttgtgtgtgtttctgtgtgtctgtgtgtttgtgtcggtgtgtgtctctgtgtgtgtttgtgtgtgtatgtgtattgggaggacagtggtcccagctcctcaggggcatcaggctctgtagcagggcccaccgtctcggcaggagggtgcaatggcctcacccacactgtccaggcagttctcttgggaccccttttagccagcacaggtgccttctccctcggcaggagggtgcgatggtctcacccacacggtccaggcgggtctcttgggtctccttttccagcacaggtgccttctccctaggaaacggcaaagatgtaatgaccacactcaggtgtaaactctgtagccgggtttctaaactagaacctactgatcgtgggataaaaatcaggaaacggtgaagatgtaataaccacactcaggtgtaaactctgcagccggatttctaaactagaagctactgatcatgggataaaaatcaggaaacggtgaagatgtaatcaccacactcaggtgtaaactctgcagccgggttctaaactagaacctactgatcatgggattcaggtgtccctgaacttggatggaaaaacgttgcatctttactttcaccagcctctaggctaaagtgagtgttcctcaatagtgaatgtggccaaaggacctagcggtctccacagaacctgggactccaccgtcagcaaagtcctgtgtattttcccatcgtgtttcagttgcttcggcgtcttgaagcctcatttttgttcctgcttcaacactgttggtcatgagagctgctgctagatctggatcagtaggttttttttaatctgttgcccaggctgtagtgcagtggtgcaatctcggttcactgcaacctccgcctcccaggttcaagtgattctcctgcctcagcctcccaagtagctgggagtacaggtgcacgccaccacacccagctgatttttgtatttttagtagagatggtggcggggggggaggggtctcaccatgttggccagcctggtcttgaacccctgacctcaggtgatccacccgcctcggcctcccaaagtgctgagattacaggcgtgagccaccatgcctggcctgaatcagtagattaacaagaaatccaataacaattactttattattttggtaaccgtatttcaatatagtgggtgtatgagttggttctcacactgctataaagatactacaagagactgggtaatttataatcaaaggaggttttatttatttactgagacagagtcttgttttgtcccccaggctggagtgcagtggtgcaatctcagctcactgcaacctccgcctcctggtttcaagtgagtctcctgcctcagcctcccaagtaactgggattacaggtgcgtgccaccatgcccggctaatttttgtatttttagtaggacggggtttcaccacgttggccaggctggtctcgaactcctgacctcaagtgatccacccacctcagcctcccaaagtgctggtatcacaggtgtgagccacctcgcccagcccacaaaggaggtttaattgactcacagttctgcatggctggggaggcctcaggaaacttacaatcatggtggaagggaagcaggtgccttctcacaaggcggcacgagaaagaagttcaagcaggggaaatgccagctgaagcctgggcgcaggtgaccacgcaggccgagaggtcccacgcccgcgaagacccagggaagctggtggtgcagtgcggtctgagtccgaagccctgagagccggagggctaatggcgttaatctcagtgtcagggccagagaaggtgaggtgagtgtcccagctcaagcagcgtggcaggaagaggggggcaaattcacctttctctgccttccgcgctattcgggtcctcagcggattgggtgacaccacccaccctggggagggcggcctgctttacagagcccactgattcaaatgctaatctcatccagaacaccctcggacatccccagaaataacgttcaacccggcaccccacggccaggggagctgacacataaagttaaccgtcactccgcccgcatggagagggagcccacaggaaggagctggtgctgctgtctcgaccctgaccctgggccgtgtgggtcgttctggcccttgcccctgcttgtctgtagctcccaccccacagtgaggaacctgccccaccacccaccatccatggacctaatcgctaagctgcagtgtgcagggggagcagtgtagggactgctcacctgtaccccgcggcagaagcgtgtgtctgccagggtacagggctcatgtgcgggtccatttgcttttggcttcacagacttcgtcgtttgtgagggtacccaggtcagccccatcccccagcccctccctacgtctgtaatacagctgctccctgggtctgtgatacagccagaggctctcgccacacacggcccgccttccgtcctagacccccagcctcttgactgagctttaaaatttgcatacattaaggctcactcttgctgtgaagttctgtgggttttgacagatgcacagtgtcgtgtctctgccattacaatgtcgttcacgttagtttcacagccctaaaaacccccctgtgctccaccgatccaaccatttcctctttcccgaactcctggcaacaactgtttccataaatgtatttttctggtgggtttttggtgaacaattttatcaaattagaaatatttcatttgtttcaatttctaatttgcccagaaatttttaaaaagtcaccgatggcatcacttgagacattgggacactttttgccctgtcatctattcagatggtatttgcacggatcagattctgatattaaaccttccttgaattcctgggagaaacccttagatctatcagggtcccagcaggaaagagacccacatttagagcaggttacttgcagcagtgtttaacaaaggggctctttataaaggtagggcagagtactggaaacctcaaggggcagtacatgtcccagggctggccaaaggcatgcctggtggagagaattttctggaatgtgaaggagagtgctgtggagaggagccatgacattcccaaggccacctcacacagtcatctgccatcatttgcagatcacatgtcagcttacttagcaagcctaacagaacggacaggaaaacgtaatgttataaacacataattctccccagagaattatggggacataataaattcaatgcaattct

SEQ ID NO: 8673 - protein, 297 aa, Homo sapiens
MLRAQEGCEGCVCVCVCVCVLCVSVCVCVCLCVCVCVCVCLCLCVLSVSVCLCVCVSVCLCVCLVSVCLCVCLCVCVSVCLCVCLHLCVCVSVCVCVCVCVSVCVCVSVCVCICVCVWVCVCLCVSVCLCVCVCVCVFASVCLCVCGFVCVCVFVCVCVCVCVCVCFCVSVCLCRCVSLCVFVCVCVLGGQWSQLLRGIRLCSRAHRLGRRVQWPHPHCPGSSLGTPFSQHRCLLPRQEGAMVSPTRSRRVSWVSFSSTGAFSLGNGKDVMTTLRCKLCSRVSKLEPTDRGIKIRKR

SEQ ID NO: 8674 - DNA, 1317 bp, Homo sapiens
ctggggggtggcaccaggctgtgaaggatccacagactggcatatgcaggaggaaatggggcgggcgaggagtaaggaccccaaaaagcaggggtagggaagggccctcccagcgccccactgtaataggggcctcatcaatgccccatgctcactgaataaagcactgccagcgaaaggtgaaaagaggaacaaagaacattctcctggacgccacccacagaaagccacgtgcaggcttggccctcaccttggggaccttggacacggagctggttatgtcacatctggctctcagagctggggcagcgtctaggaggcctgatgtagaaagcactcagctaagccctagttaccggcacacgggcaccagcgccccctctcagcaaactccacgtcttatgaaattagcactggatttccacttcaattggaaaatatggccaaggtggagaaccccttctttaagcaaaagatggcacggacccccgacataagacagttcaaagctgagcggctctccccatcatgcaagtaacctgcgtgccgccacgggaaacagcacgcatcccatctggactcccaccagacaactgaggcaaccgagaaggaggctggggagggacagctcgagggctcactggaggtcagcagggaggtggactgcgtctcccgagggccagcactggcttagcctgctcagtgaggtgcccgaaggaggcccaccagctctgccagcacccggcctctgcacctcagctttcagcggataggtttgtgcaacgaaatatttcatagaaatcaagaaacatgagtgaacgatgcacaccaccgcgtggatgagtctcagagactgtggagcgaaagaagccagacacaaaggttgacatttacacgcaatcctagaatgacggctctatggtggcagagaggagaaaagcagttagctttggcaggtgcccacggagggggctatgcaatggaactttctgggccctggaggtgttgcagagtttgctatgggtggtggtagttacgtgggtttctatgaatgtaaaaactcttggtgtggtagacccaagctctgggcacctcacgcatgccatgcagcagctcgatctgtgacagcgagtcctgtgttccatgatatggctgcaaacacttgacagagtgaatgccgaacctctgctcctaagggaaatagagggccaggttcctacgagcctctgctccagccttttcagcaaccaatcagtacacaatagagttatttatgtgtttctgttaatatatgtcactaaactcccggccaagagc

SEQ ID NO: 8675 - protein, 72 aa, Homo sapiens
MSHLALRAGAASRRPDVESTQLSPSYRHTGTSAPSQQTPRLMKLALDFHFNWKIWPRWRTPSLSKRWHGPPT

SEQ ID NO: 8676 - DNA, 1694 bp, Homo sapiens
cgccccgcgcccgccaggagccaccgtccgagccttgcggagcgcggcagtgggcgccggctgcccgcagcccctgacccggccccggacggagcgccggccgcaccaccgccctctggccgttgcctcaccggctcggcaagatgtcggtgaaggagggcgcacagcgcaagtgggcagcgctgaaggagaagctggggccacaggattcggaccccacggaggccaacctggagagcgcggaccccgagctgtgcatccggctgctccagatgccctctgtggtcaactactccggcctgcgcaagcgcctggagggcagcgacggcggctggatggtgcagttcctggagcagagcggcctggacctgctgctggaggcgctggcgcggctgtcgggccgcggcgttgcacgtatctccgacgccctgctgcagctcacctgcgtcagctgcgtgcgcgccgtcatgaactcgcggcagggcatcgagtacatcctcagcaaccagggctacgtgcgccagctctcccaggccctggacacatccaacgtgatggtgaagaagcaggtgtttgagctactggctgccctgtgcatctactctcccgagggccacgtgctgaccctggacgccctggaccactacaagacggtgtgcagccagcagtaccgcttcagcattgtcatgaacgagctctccggcagcgacaacgtgccctacgtggtcaccctgcttagcgtgatcaacgccgtcatcttgggccccgaggacctgcgcgcgcgcacccagctgcggaacgagtttatcgggctgcagctgctggacgtcctggctcgcctgcggtgagtccccactgtagcggtcctgccggctccccctcctgctcccaaggccaggcccacctgccctttggctcccagccacctcacctaagcagcacctccagatggcagggaggtggctccctcggagtaaccccaggggtccagccagaagccaggtctcaggctagaatccagctcactgtccctggcagctgcccacagaaactagggttgcagcagccatagaaaggacagaatgagctcatatcctttgcacaccgtggatggagctggaggccgtgatcctaagtgaaccaacccagaaacagaaaatgaaatgccaataagagggaactacagggtggttcacgtggacgcaagatggagacagggacacgggctccagggcgagagttgaaaaactacctacagggtacagtgttcgtcgctacttggtgtcaggcccactagaacaagggtccccaaccgccaggctgcggaccggtacctggcctattggaaccgggccacgcagcaggaagtgagcggtgggcgggcattcctgcctgagctgcacctcatgtcagatcagcactgcattagattctccagcgcacgcacgcgcgcaagggatccaggctgcgcgctcctcatgacaatctaatgcctgatgatcgggggtggaacagttttatccctaaaccattcccgtcaccccagtctatggaaaaattgtcttccacaaaaccagtccctggtgccaaaaaggctggggaccactgccctagaaggcaaatcgcctacgttacacagtgtaccatgtggcaaacacgcacatgtacccccgagtctaaaataaaaatttttt

SEQ ID NO: 8677 - protein, 234 aa, Homo sapiens; identical to SEQ ID NO: 1004

SEQ ID NO: 8678 - DNA, 709 bp, Homo sapiens
ataacttttccaacccaggaagtaactgcactttgatggaaggcgcagagtctatttcagagtgcagatgtggaaactgaggccggaagagggcgagtatcctgctccattccagtgccagacggaggggcagggctggcagtaagggaatttcctacgtccagcgccttctgggtgtgcctgacctctggcccggttcctgggttcctggttccctgcctgggcagggtctctgcctctctgcctcctggtgtgtccagctggagtgggcagtaatgctgtggtcacagctgagctgcgggagccctgggtggggagcttgagccccagaaggcccagacagacagaccaccccccacgcctgtgctccccagggggcattggggacggtcagggacacagctggtcaccccgccttcccctccttagtcatggtcactcctggggcgactccccagttagagggttgacgggtgggtctgggggcgtacagggattggatcctaccccacccaaaaggaacagagagctgtgatggaggctgattcccctaagcctgccagcggttgcggggtgggaagggctccctgtgcgcccacctgcgcgtgggcagctggaagccaagcagtcagggtggggccgcaggccggcgcgcacctcggggtgccacccgggcggcggacccgaagttgaagtttattttcccaac

SEQ ID NO: 8679 - protein, 52 aa, Homo sapiens
MEADSPKPASGCGVGRAPCAPTCAWAAGSQAVRVGPQAGAHLGVPPGRRTRS

SEQ ID NO: 8680 - DNA, 3008 bp, Homo sapiens
cactactgccctgcacctgcagcccccccgtggcgggaggcatggaggaggtcatcgtggcccaggtggaccatggcttgggctcagcatgggtccccagccatcggcgggtgaacccacccacactgcgcatgaagaagctgaactggcagaagctgccatccaacgtggcacgtgagcacaactctatgtgggcgtccctgagcagccccgacgccgaggctgtggagcccgacttctccagcatcgagcgactattctccttccctgcagccaagcccaaggagcccaccatggtggccccccgggccaggaaggagcccaaggagatcactttcctcgatgccaagaagagcctgaacctcaacatcttcctgaagcaatttaagtgctccaacgaggaggtcgctgctatgatccgggctggagataccaccaagtttgatgtggaggttctcaaacaactccttaagctccttcccgagaagcacgagattgaaaacctgcgggcattcacagaggagcgagccaagctggccagcgccgaccacttctacctcctcctgctggccattccctgctaccagctgcgaatcgagtgcatgctgctgtgtgagggcgcggccgccgtgctggacatggtgcggcccaaggcccagctggtgctggctgcctgcgaaagcctgctcaccagccgccagctgcccatcttctgccagctgatcctgagaattgggaacttcctcaactacggcagccacaccggtgacgccgacggcttcaagatcagcacattgctgaagctcacggagaccaagtcccagcagaaccgcgtgacgctgctgcaccacgtgctggaggaagcggaaaagagccaccccgacctcctgcagctgccccgggacctggaacagccctcgcaagcagcagggatcaacctggagatcatccgctcagaggccagctccaacctgaagaagcttctggagaccgagcggaaggtgtctgcctccgtggccgaggtccaggagcagtacaccgagcgcctccaggcaacatctcggccttccgggcactggatgagctgtttgaggccatcgagcagaagcaacgggagctggccgactacctgtgtgaggacgcccagcagctgtccctggaggacacgttcagcaccatgaaggctttccgggaccttttcctccgcgccctgaaggagaacaaggaccggaaggagcaggcggcgaaggcagagaggaggaagcagcagctggcggaggaggaggcgcggcggcctcggggagaggacgggaagcctgtcaggaaggggcccgggaagcaggaggaggtgtgtgtcatcgatgccctgctggctgacatcaggaagggcttccagctgcggaagacagcccggggccgcggggacaccgacgggggcagcaaggcagcctccatggatcccccaagagccacagagcctgtggccaccagtaaccctgcaggagatcccgtgggcagcacgcgctgtcccgcctctgagcccggccttgatgctacaacagccagcgagtcccggggctgggaccttgtagacgccgtgacccccggccctcagcccaccctggagcagttggaggagggtggtccacggcccctggagaggcgttcttcctggtatgtggatgccagcgatgtcctaaccactgaggatccccagtgcccccagcccttggagggggcctggccggtgactctgggagatgctcaggccctgaagcccctcaagttctccagcaaccagccccctgcagccggaagttcaaggcaagatgccaaggatcccacgtccttgctgggcgtcctccaggccgaggccgacagcacaagtgaggggctggaggacgctgtccacagccgtggtgccagaccccctgcagcaggcccaggtggggatgaggacgaggacgaggaggacacggccccagagtccgcactggacacatccctggacaagtccttctccgaggatgcggtgaccgactcctcggggtcgggcacactccccagggcccggggccgggcctcaaaggggaccgggaagcgaaggaagaagcgtccctccaggagccaggaagaggttccccctgattctgatgataataaaacaaagaaactgtgtgtgatccagtaaggcctcaggcccaggcccaaggccaagtgagagagcccaggccacaggacatgctgccattctgccaagagaggctcttctgggggccaggctgggactgggccccggaaaccaaaactccgtgccttacccagccggggccctcctggagccttcttggggtgttgtggctgggaacccgacaggcaccagtgccctgccaggcctggtgccctcctggaccgcctgcacgtgccagcctcccacctgcttcctaaaggcaaccctggcccacacccgcatgcgcccggtgcagcctgccaagggccagtcggggggtgctgcgtcctgccagtgtccaccacagctctgcctgcccttcagcccagcaaggtttaatcaaaatgcaatgctttgcaagtctttactgcttggaggtggctgagttgggggccctgggcaggggtaagctggcaggcagtgccatggcaggccagggtcccctcccatggggtctggcccccgttccagcatgtccagcccctgaagttggagtggggggcggtctgcctttgctgccactgccaggcctctgccctgcagctgaaacttggccatcacatcaacagaaaacccctcccagtgccagctgcccagcgtgggcaggccctggggacaatacaggtccacctgaggggctgcagggtgacacccagcagccgctgccccctcactgcccacccagcgagggcagcctacccgagcctgccccctgccaggtgtgtgccctgaggctggcggctggatgcgtggccaataaaaagcagacctagcccgg

SEQ ID NO: 8681 - protein, 379 aa, Homo sapiens
MEEVIVAQVDHGLGSAWVPSHRRVNPPTLRMKKLNWQKLPSNVAREHNSMWASLSSPDAEAVEPDFSSIERLFSFPAAKPKEPTMVAPRARKEPKEITFLDAKKSLNLNIFLKQFKCSNEEVAAMIRAGDTTKFDVEVLKQLLKLLPEKHEIENLRAFTEERAKLASADHFYLLLLAIPCYQLRIECMLLCEGAAAVLDMVRPKAQLVLAACESLLTSRQLPIFCQLILRIGNFLNYGSHTGDADGFKISTLLKLTETKSQQNRVTLLHHVLEEAEKSHPDLLQLPRDLEQPSQAAGINLEIIRSEASSNLKKLLETERKVSASVAEVQEQYTERLQATSRPSGHWMSCLRPSSRSNGSWPTTCVRTPSSCPWRTRSAP

SEQ ID NO: 8682 - DNA, 2951 bp, Homo sapiens
cactactgccctgcacctgcagcccccccgtggcgggaggcatggaggaggtcatcgtggcccaggtggaccatggcttgggctcagcatgggtccccagccatcggcgggtgaacccacccacactgcgcatgaagaagctgaactggcagaagctgccatccaacgtggcacgtgagcacaactctatgtgggcgtccctgagcagccccgacgccgaggctgtggagcccgacttctccagcatcgagcgactattctccttccctgcagccaagcccaaggagcccaccatggtggccccccgggccaggaaggagcccaaggagatcactttcctcgatgccaagaagagcctgaacctcaacatcttcctgaagcaatttaagtgctccaacgaggaggtcgctgctatgatccgggctggagataccaccaagtttgatgtggaggttctcaaacaactccttaagctccttcccgagaagcacgagattgaaaacctgcgggcattcacagaggagcgagccaagctggccagcgccgaccacttctacctcctcctgctggccattccctgctaccagctgcgaatcgagtgcatgctgctgtgtgagggcgcggccgccgtgctggacatggtgcggcccaaggcccagctggtgctggctgcctgcgaaagcctgctcaccagccgccagctgcccatcttctgccagctgatcctgagaattgggaacttcctcaactacggcagccacaccggtgacgccgacggcttcaagatcagcacattgctgaagctcacggagaccaagtcccagcagaaccgcgtgacgctgctgcaccacgtgctggaggaagcggaaaagagccaccccgacctcctgcagctgccccgggacctggaacagccctcgcaagcagcagggatcaacctggagatcatccgctcagaggccagctccaacctgaagaagcttctggagaccgagcggaaggtgtctgcctccgtggccgaggtccaggagcagtacaccgagcgcctccaggcaacatctcggccttccgggcactggatgagctgtttgaggccatcgagcagaagcaacgggagctggccgactacctgtgtgaggacgcccagcagctgtccctggaggacacgttcagcaccatgaaggctttccgggaccttttcctccgcgccctgaaggagaacaaggaccggaaggagcaggcggcgaaggcagagaggaggaagcagcagctggcggaggaggaggcgcggcggcctcggggagaggacgggaagcctgtcaggaaggggcccgggaagcaggaggaggtgtgtgtcatcgatgccctgctggctgacatcaggaagggcttccagctgcggaagacagcccggggccgcggggacaccgacgggggcagcaaggcagcctccatggatcccccaagagccacagagcctgtggccaccagtaaccctgcaggagatcccgtgggcagcacgcgctgtcccgcctctgagcccggccttgatgctacaacagccagcgagtcccggggctgggaccttgtagacgccgtgacccccggccctcagcccaccctggagcagttggaggagggtggtccacggcccctggagaggcgttcttcctggtatgtggatgccagcgatgtcctaaccactgaggatccccagtgcccccagcccttggagggggcctggccggtgactctgggagatgctcaggccctgaagcccctcaagttctccagcaaccagccccctgcagccggaagttcaaggcaagatgccaaggatcccacgtccttgctgggcgtcctccaggccgaggccgacagcacaagtgaggggctggaggacgctgtccacagccgtggtgccagaccccctgcagcaggcccaggtggggatgaggacgaggacgaggaggacacggccccagagtccgcactggacacatccctggacaagtccttctccgaggatgcggtgaccgactcctcggggtcgggcacactccccagggcccggggccgggcctcaaaggggaccgggaagcgaaggaagaagcgtccctccaggagccaggaaggcctcaggcccaggcccaaggccaagtgagagagcccaggccacaggacatgctgccattctgccaagagaggctcttctgggggccaggctgggactgggccccggaaaccaaaactccgtgccttacccagccggggccctcctggagccttcttggggtgttgtggctgggaacccgacaggcaccagtgccctgccaggcctggtgccctcctggaccgcctgcacgtgccagcctcccacctgcttcctaaaggcaaccctggcccacacccgcatgcgcccggtgcagcctgccaagggccagtcggggggtgctgcgtcctgccagtgtccaccacagctctgcctgcccttcagcccagcaaggtttaatcaaaatgcaatgctttgcaagtctttactgcttggaggtggctgagttgggggccctgggcaggggtaagctggcaggcagtgccatggcaggccagggtcccctcccatggggtctggcccccgttccagcatgtccagcccctgaagttggagtggggggcggtctgcctttgctgccactgccaggcctctgccctgcagctgaaacttggccatcacatcaacagaaaacccctcccagtgccagctgcccagcgtgggcaggccctggggacaatacaggtccacctgaggggctgcagggtgacacccagcagccgctgccccctcactgcccacccagcgagggcagcctacccgagcctgccccctgccaggtgtgtgccctgaggctggcggctggatgcgtggccaataaaaagcagacctagcccgg

SEQ ID NO: 8683 - protein, 379 aa, Homo sapiens; identical to SEQ ID NO: 8681

SEQ ID NO: 8684 - DNA, 3002 bp, Homo sapiens
gggtgcctgctgtacgctggacctggacctactgggccccaggcaggacatcctttagaccctctgggaggctccagcccctgcctgctggatcgccaggccccggggctgcgagagcctcactggccgtgtccccacccgacagagcacaactctatgtgggcgtccctgagcagccccgacgccgaggctgtggagcccgacttctccagcatcgagcgactattctccttccctgcagccaagcccaaggagcccaccatggtggccccccgggccaggaaggagcccaaggaggtggggacggggaggggactcagaccggggccgcctgcctggccaccctccggtaccagcctgttgggtggggggttttctagatcactttcctcgatgccaagaagagcctgaacctcaacatcttcctgaagcaatttaagtgctccaacgaggaggtcgctgctatgatccgggctggagataccaccaagtttgatgtggaggttctcaaacaactccttaagctccttcccgagaagcacgagattgaaaacctgcgggcattcacagaggagcgagccaagctggccagcgccgaccacttctacctcctcctgctggccattccctgctaccagctgcgaatcgagtgcatgctgctgtgtgagggcgcggccgccgtgctggacatggtgcggcccaaggcccagctggtgctggctgcctgcgaaagcctgctcaccagccgccagctgcccatcttctgccagctgatcctgagaattgggaacttcctcaactacggcagccacaccggtgacgccgacggcttcaagatcagcacattgctgaagctcacggagaccaagtcccagcagaaccgcgtgacgctgctgcaccacgtgctggaggaagcggaaaagagccaccccgacctcctgcagctgccccgggacctggaacagccctcgcaagcagcagggatcaacctggagatcatccgctcagaggccagctccaacctgaagaagcttctggagaccgagcggaaggtgtctgcctccgtggccgaggtccaggagcagtacaccgagcgcctccaggcaacatctcggccttccgggcactggatgagctgtttgaggccatcgagcagaagcaacgggagctggccgactacctgtgtgaggacgcccagcagctgtccctggaggacacgttcagcaccatgaaggctttccgggaccttttcctccgcgccctgaaggagaacaaggaccggaaggagcaggcggcgaaggcagagaggaggaagcagcagctggcggaggaggaggcgcggcggcctcggggagaggacgggaagcctgtcaggaaggggcccgggaagcaggaggaggtgtgtgtcatcgatgccctgctggctgacatcaggaagggcttccagctgcggaagacagcccggggccgcggggacaccgacgggggcagcaaggcagcctccatggatcccccaagagccacagagcctgtggccaccagtaaccctgcaggagatcccgtgggcagcacgcgctgtcccgcctctgagcccggccttgatgctacaacagccagcgagtcccggggctgggaccttgtagacgccgtgacccccggccctcagcccaccctggagcagttggaggagggtggtccacggcccctggagaggcgttcttcctggtatgtggatgccagcgatgtcctaaccactgaggatccccagtgcccccagcccttggagggggcctggccggtgactctgggagatgctcaggccctgaagcccctcaagttctccagcaaccagccccctgcagccggaagttcaaggcaagatgccaaggatcccacgtccttgctgggcgtcctccaggccgaggccgacagcacaagtgaggggctggaggacgctgtccacagccgtggtgccagaccccctgcagcaggcccaggtggggatgaggacgaggacgaggaggacacggccccagagtccgcactggacacatccctggacaagtccttctccgaggatgcggtgaccgactcctcggggtcgggcacactccccagggcccggggccgggcctcaaaggggaccgggaagcgaaggaagaagcgtccctccaggagccaggaaggcctcaggcccaggcccaaggccaagtgagagagcccaggccacaggacatgctgccattctgccaagagaggctcttctgggggccaggctgggactgggccccggaaaccaaaactccgtgccttacccagccggggccctcctggagccttcttggggtgttgtggctgggaacccgacaggcaccagtgccctgccaggcctggtgccctcctggaccgcctgcacgtgccagcctcccacctgcttcctaaaggcaaccctggcccacacccgcatgcgcccggtgcagcctgccaagggccagtcggggggtgctgcgtcctgccagtgtccaccacagctctgcctgcccttcagcccagcaaggtttaatcaaaatgcaatgctttgcaagtctttactgcttggaggtggctgagttgggggccctgggcaggggtaagctggcaggcagtgccatggcaggccagggtcccctcccatggggtctggcccccgttccagcatgtccagcccctgaagttggagtggggggcggtctgcctttgctgccactgccaggcctctgccctgcagctgaaacttggccatcacatcaacagaaaacccctcccagtgccagctgcccagcgtgggcaggccctggggacaatacaggtccacctgaggggctgcagggtgacacccagcagccgctgccccctcactgcccacccagcgagggcagcctacccgagcctgccccctgccaggtgtgtgccctgaggctggcggctggatgcgtggccaataaaaagcagacctagcccgg

SEQ ID NO: 8685 - protein, 328 aa, Homo sapiens
MKAFRDLFLRALKENKDRKEQAAKAERRKQQLAEEEARRPRGEDGKPVRKGPGKQEEVCVIDALLADIRKGFQLRKTARGRGDTDGGSKAASMDPPRATEPVATSNPAGDPVGSTRCPASEPGLDATTASESRGWDLVDAVTPGPQPTLEQLEEGGPRPLERRSSWYVDASDVLTTEDPQCPQPLEGAWPVTLGDAQALKPLKFSSNQPPAAGSSRQDAKDPTSLLGVLQAEADSTSEGLEDAVHSRGARPPAAGPGGDEDEDEEDTAPESALDTSLDKSFSEDAVTDSSGSGTLPRARGRASKGTGKRRKKRPSRSQEGLRPRPKAK

SEQ ID NO: 8686 - DNA, 452 bp, Homo sapiens
cgctgtcccgcctctgagcccggccttgatgctacaacagccagcgagtcccggggctgggaccttgtagacgccgtgacccccggccctcagcccaccctggagcagttggaggagggtggtccacggcccctggagaggcgttcttcctggtatgtggatgccagcgatgtcctaaccactgaggatccccagtgcccccagcccttggagggggcctggccggtgactctgggagatgctcaggccctgaagcccctcaactgcccagcgtgggcaggccctggggacaatacaggtccacctgaggggctgcagggtgacacccagcagccgctgccccctcactgcccacccagcgagggcagcctacccgagcctgccccctgccaggtgtgtgccctgaggctggcggctggatgcgtggccaataaaaagcagacctagcccgg

SEQ ID NO: 8687 - protein, 148 aa, Homo sapiens
RCPASEPGLDATTASESRGWDLVDAVTPGPQPTLEQLEEGGPRPLERRSSWYVDASDVLTTEDPQCPQPLEGAWPVTLGDAQALKPLNCPAWAGPGDNTGPPEGLQGDTQQPLPPHCPPSEGSLPEPAPCQVCALRLAAGCVANKKQT

SEQ ID NO: 8688 - DNA, 1108 bp, Homo sapiens
actgcagttccagtaaccctgtggctttcctgctctgtctgttggtggagggctatcttcactctaagtgtgtcaatggcgtggggccttctggggcatgtccccaggaagtctgtgaggagaccgggacagtcgcaagggcagatgctgccagggacaagtacactgcaacccccctcctgttggacagtgtcctcccaccccgaggccatgggtgggtctatggagaagcagattaccccccgcacaccgagtcttctggggggcgaccagccaaaggtcaatcagccaggcctcaggcccaggcccaaggccaagtgagagagcccaggccacaggacatgctgccattctgccaagagaggctcttctgggggccaggctgggactgggccccggaaaccaaaactccgtgccttacccagccggggccctcctggagccttcttggggtgttgtggctgggaacccgacaggcaccagtgccctgccaggcctggtgccctcctggaccgcctgcacgtgccagcctcccacctgcttcctaaaggcaaccctggcccacacccgcatgcgcccggtgcagcctgccaagggccagtcggggggtgctgcgtcctgccagtgtccaccacagctctgcctgcccttcagcccagcaaggtttaatcaaaatgcaatgctttgcaagtctttactgcttggaggtggctgagttgggggccctgggcaggggtaagctggcaggcagtgccatggcaggccagggtcccctcccatggggtctggcccccgttccagcatgtccagcccctgaagttggagtggggggcggtctgcctttgctgccactgccaggcctctgccctgcagctgaaacttggccatcacatcaacagaaaacccctcccagtgccagctgcccagcgtgggcaggccctggggacaatacaggtccacctgaggggctgcagggtgacacccagcagccgctgccccctcactgcccacccagcgagggcagcctacccgagcctgccccctgccaggtgtgtgccctgaggctggcggctggatgcgtggccaataaaaagcagacctagcccgg

SEQ ID NO: 8689 - protein, 81 aa, Homo sapiens
MAWGLLGHVPRKSVRRPGQSQGQMLPGTSTLQPPSCWTVSSHPEAMGGSMEKQITPRTPSLLGGDQPKVNQPGLRPRPKAK

SEQ ID NO: 8690 - DNA, 725 bp, Homo sapiens
cattccatttcatggctgaagcacattccattgcatgcagggaccacattttgtttgtctgctcttctgtccatggacatctgggttgcttccagtttggggcttctgtgaatcctgctgctgtggacatttgcgtagtcctcgtgtggatgctgctgtggacgtctgcgtcgtcctcgtgtggatgctgctgtggacgtctgcgtcgtcctcgtgtggatgctgctgtggacgtctgcgtagtctcgtgtggatgctgctgtggacgtctgcgtcgtcctcgtgtggatgctgctgtggacatctgcgtagtctcgtgtggatgctgctgtgaacgtctgcgtagtctcgtgtggatgctgctgtggacgtctgcgtagtctcgtgtggatgctgctgtgcacgtctgcgtcgtcctcgtgtggatgctgctgtggacgtctgcgtcgtcctcgtgtggatgctgctgtggacgtctgcgtcgtcctcgtgtggatgctgctgtggacgtctgccgtcgtctcgtgtggatgctgctgtggacgtctgcgtcgtcctcgtgtggatgctgctgtggacgtctgcgtcgtctcgtgtggatgctgctgtggacgtctgcgtcgtcctcgtgtggatgctgctgtggacgtctgcgtcgtcctcgtgtggatgctgctgtggacgtctgcgtcgtcctcgtgtggatgctgctgtggacgtctgcg

SEQ ID NO: 8691 - protein, 110 aa, Homo sapiens
MLLCTSASSSCGCCCGRLRRPRVDAAVDVCVVLVWMLLWTSAVVSCGCCCGRLRRPRVDAAVDVCVVSCGCCCGRLRRPRVDAAVDVCVVLVWMLLWTSASSSCGCCCGR

SEQ ID NO: 8692 - DNA, 483 bp, Homo sapiens
ttctgtgaatcctgctgctgtggacatttgcgtagtcctcgtgtggatgctgctgtggacgtctgcgtcgtcctcgtgtggatgctgctgtggacgtctgcgtcgtcctcgtgtggatgctgctgtggacgtctgcgtagtctcgtgtggatgctgctgtggacgtctgcgtcgtcctcgtgtggatgctgctgtggacatctgccgtcgtctcgtgtggatgctgctgtggacgtctgcgtcgtctcgtgtggatgctgctgtggacgtctgcgtcgtctcgtgtggatgctgctgtggacgtctgcgtcgtcctcgtgtggatgctgctgtggacgtctgcgtcgtctcgtgtggatgctgctgtggacgtctgcgtcgtcctcgtgtggatgctgctgtggacgtctgcgtcgtcctcgtgtggatgctgctgtggacgtctgcgtcgtcctcgtgtggatgctgctgtggacgtctgcg

SEQ ID NO: 8693 - protein, 144 aa, Homo sapiens
MLLWTSASSSCGCCCGRLRRPRVDAAVDVCVVSCGCCCGRLRRPRVDAAVDICRRLVWMLLWTSASSRVDAAVDVCVVSCGCCCGRLRRPRVDAAVDVCVVSCGCCCGRLRRPRVDAAVDVCVVLVWMLLWTSASSSCGCCCGR

SEQ ID NO: 8694 - DNA, 2106 bp, Homo sapiens
tcgtgtggatgctgctgtggacgtctgcgtcgtcctcgtgtggatgctgctgtggacatctgcgtagtctcgtgtggatgctgctgtgaacgtctgcgtagtctcgtgtggatgctgctgtggacgtctgcgtagtctcgtgtggatgctgctgtgcacgtctgcgtcgtcctcgtgtggatgctgctgtggacgtctgcgtcgtcctcgtgtggatgctgctgtggacgtctgcgtcgtcctcgtgtggatgctgctgtggacgtctgcgtcgtctcgtgtggatgctgctgtggacgtctgcgtcgtctcgtgtggatgctgctgtggacgtctgcgtcgtctcgtgtggatgctgctgtggacgtctgcgtcgtcctcgtgtggatgctgctgtggacgtctgcgtcgtctcgtgtggatgctgctgtggacgtctgcgtcgtcctcgtgtggatgctgctgtggacgtctgcgtcgtcctcgtgtggatgctgctgtggacgtctgcgtcgtcctcgtgtggatgctgctgtggacgtctgcgtcgtcctcctgtggatgctgctgtggacgtctgcgtcgtcctcgtgtggatgctgctgtggacgtctgcgtagtctcgtgtggatgctgctgtggacgtctgcgtagtctcgtgtggatgctgctgtggacgtctgcgtcgtcctcgatgctgctgtggacgtctgcgtcgtcctcgtgtggatgctgctatggacgtctgcgtagtctcgtgtggatgctgctgtggacgtctgcgtcgtcctcgtgtggatgctgctgtggacgtctgcgtagtctcgtgtggatgctgctgtggacgtctgcgtagtctcgtgtggatgctgctgtggacgtctgcgtcgtcctcgtgtggatgctgctgtggacgtctgcgtagtctcgtgtggatgctgctgtggacgtctgcgtcgtcctcgtgtggatgctgctgtggacgtctgtgtagtctcatgtggatgctgcgagttttcgttgctctggggtagattcgtagcggaggaacaactgggcgacacgctaagtttatgtttaactttttaagtaactgcctaactgttttccaaagcagctgcaccatttttcattcccatccatgctattgtttttcagttaaatagctccactcctccccctccccaccctccacagaactgccagtaaaactggactatggagtattgggtggggtcacctacaaggtcatctgcagcaagtgagaccatcgcccctcctgcctggagaggtgggactggggaccctgtgacaggaggagctgcccttcctggagcctggtttttctttttcctctgtgctccatgagaagtcagtttagtgggctacagccagcaaaggaaccaaaaccaacaggagctctgggggtgccttgcatggcgaggctccgtggctgcacgcgtgtatgcaggtggctgtgggtgtctgtgtgtcctgggccactgtgtgcgatggtcccactgggaggtgtggcccccaaagagtggaacccacaggtggacacacccatgcaccctcgttcttgcccaaggtcacacatcgagacagcagggcccagatggatggccccaagctcggtggctcccgtgctgcccacacctggggacaggcccactgtggggggtaaggggtggaggtgttctaattcgggctgagccgtgtgactggcaggggccccagctgttgggcctgggcaggactgtttttagaaaagccccaactccctgcccctacccgggcccgtggctatttatagtccgggcctggagaagtcagtgagtcactagcgttcgcctctgcagggtcagtccaagcccccttagtgaggtggtctagcatgtcccccagtcccccaagcctctatctgacatctgctagcccagagccccaggggtccccaggaagggctcagagctggtggccccccccaggccttggcagcacctccttgtctgatgggactttgtggttcctggtggacatttaacattgtcggtttctctcatctggaaacaaacctccatgacgctcttggtttctcctgtt

SEQ ID NO: 8695 - protein, 236 aa, Homo sapiens
MLLCTSASSSCGCCCGRLRRPRVDAAVDVCVVLVWMLLWTSASSRVDAAVDVCVVSCGCCCGRLRRLVWMLLWTSASSSCGCCCGRLRRLVWMLLWTSASSSCGCCCGRLRRPRVDAAVDVCVVLVWMLLWTSASSSCGCCCGRLRRPRVDAAVDVCVVSCGCCCGRLRSLVWMLLWTSASSSMLLWTSASSSCGCCYGRLRSLVWMLLWTSASSSCGCCCGRLRSLVWMLLWTSA

SEQ ID NO: 8696 - DNA, 1789 bp, Homo sapiens
ccccggcccggctccatttaatggcgcggacgccggcggcggcgggctcctggccgggccagcgcagcggaagagccaagccagcatgtcggggacccgagcctccaacgaccggccccccggcgcaggcggcgtcaagcgggggcggctgcagcaggaggcggcggcgaccggctcccgcgtgacggtggtgctgggcgcgcagtggggggacgagggcaaaggcaaggtggtggacctgctggccacggacgccgacatcatcagccgctgccaggggggcaacaacgccggccacacggtggtggtggatgggaaagagtacgacttccacctgctgcccagcggcatcatcaacaccaaggccgtgtccttcattggcaacggggtggtcatccacttgccaggcttgtttgaggaagcagagaagaatgaaaagaaaggcctgaaggactgggagaagaggctcatcatctctgacagagcccaccttgtgtttgattttcaccaggctgtcgacggacttcaggaagtgcagcgccaggcacaagaggggaagaatataggcaccaccaagaagggaatcggaccaacctactcttccaaagctgcccggacaggcctccgcatctgcgacctcctgtcagattttgatgagttttcctccagattcaagaacctggcccaccagcaccagtcgatgttccccaccctggaaatagacattgaaggccaactcaaaaggctcaagggctttgctgagcggatcagacccatggtccgagatggtgtttactttatgtatgaggcactccacggcccccccaagaagatcctggtggagggtgccaacgccgccctcctcgacattgacttcgggacctacccctttgtgacttcatccaactgcaccgtgggcggtgtgtgcacgggcctgggcatccccccgcagaacataggtgacgtgtatggcgtggtgaaagcctataccacacgtgtgggcatcggggccttccccaccgagcagatcaacgagattggaggcctgctgcagacccgcggccacgagtggggagtgaccacaggcaggaagaggcgctgcggctggctcgacctgatgattctaagatatgctcacatggtcaacggattcactgcgctggccctgacgaagctggacatcctggacgtactgggtgaggttaaagtcggtgtctcatacaagctgaacgggaaaaggattccctatttcccagctaaccaggagatgcttcagaaggtcgaagttgagtatgaaacgctgcctgggtggaaagcagacaccacaggcgccaggaggtgggaggacctgcccccacaggcccagaactacatccgctttgtggagaatcacgtgggagtcgcagtcaaatgggttggtgttggcaagtcaagagagtcgatgatccagctgttttagtcacagactgagctgatcccaacaggccctggcagcgtctggacttgtgtaaacagcagcagtcacgttcctcggccgccacaaccaacaccaaagcaggaaaaccattttctgtacttttatatttctgttcaacctgttggtttctacaatgattttaaacattggaaagccagccttgtgtatatttttaaaaattatattcaaaatgagccaaagtgctcagagaccttctatgacacattagtgtcacatggttgcgtgtccagccgaagcagtgtaataaacatctccaatggccactgaatgggagcagttgttacatgtttg

SEQ ID NO: 8697 - protein, 457 aa, Homo sapiens; identical to SEQ ID NO: 1006

SEQ ID NO: 8698 - DNA, 1839 bp, Homo sapiens
gtcggcatggtggggaggagctgtggggtggcaacccagaggcaaggaggtgggcagaggcccacgaacctggccctgaccctcagctcgtccccagctcacagcacagccctcccctggctgcctccaaggagtctccagttactgagtggccactccgtgccagctcagcccacccctcaccttcccagtgcctgtggaggcccaactagggtgacgctgggagaggagagggcttggaggagccacgggtcaaatgcaggaggccacacctgcctgcccaggaggactgcaggagccggatccttaacacctggaggggagcgggggggcaacaacgccggccacacggtggtggtggatgggaaagagtacgacttccacctgctgcccagcggcatcatcaacaccaaggccgtgtccttcattggcaacggggtggtcatccacttgccaggcttgtttgaggaagcagagaagaatgaaaagaaaggcctgaaggactgggagaagaggctcatcatctctgacagagcccaccttgtgtttgattttcaccaggctgtcgacggacttcaggaagtgcagcgccaggcacaagaggggaagaatataggcaccaccaagaagggaatcggaccaacctactcttccaaagctgcccggacaggcctccgcatctgcgacctcctgtcagattttgatgagttttcctccagattcaagaacctggcccaccagcaccagtcgatgttccccaccctggaaatagacattgaaggccaactcaaaaggctcaagggctttgctgagcggatcagacccatggtccgagatggtgtttactttatgtatgaggcactccacggcccccccaagaagatcctggtggagggtgccaacgccgccctcctcgacattgacttcgggacctacccctttgtgacttcatccaactgcaccgtgggcggtgtgtgcacgggcctgggcatccccccgcagaacataggtgacgtgtatggcgtggtgaaagcctataccacacgtgtgggcatcggggccttccccaccgagcagatcaacgagattggaggcctgctgcagacccgcggccacgagtggggagtgaccacaggcaggaagaggcgctgcggctggctcgacctgatgattctaagatatgctcacatggtcaacggattcactgcgctggccctgacgaagctggacatcctggacgtactgggtgaggttaaagtcggtgtctcatacaagctgaacgggaaaaggattccctatttcccagctaaccaggagatgcttcagaaggtcgaagttgagtatgaaacgctgcctgggtggaaagcagacaccacaggcgccaggaggtgggaggacctgcccccacaggcccagaactacatccgctttgtggagaatcacgtgggagtcgcagtcaaatgggttggtgttggcaagtcaagagagtcgatgatccagctgttttagtcacagactgagctgatcccaacaggccctggcagcgtctggacttgtgtaaacagcagcagtcacgttcctcggccgccacaaccaacaccaaagcaggaaaaccattttctgtacttttatatttctgttcaacctgttggtttctacaatgattttaaacattggaaagccagccttgtgtatatttttaaaaattatattcaaaatgagccaaagtgctcagagaccttctatgacacattagtgtcacatggttgcgtgtccagccgaagcagtgtaataaacatctccaatggccactgaatgggagcagttgttacatgtttg

SEQ ID NO: 8699 - protein, 500 aa, Homo sapiens; identical to SEQ ID NO: 1008

SEQ ID NO: 8700 - DNA, 2642 bp, Homo sapiens
attctaccagtctggacaaacgtatgctgtgtatctgccactatagtatcgtacagaattttttactgtcctaaaacccccgagctccacccatttcattcatctctcccccctcaaccctcggcagccactcaccttatgctgtctcctcagttttgccttttccagaatctcagagttggaattgtacagtatgtcgccttttcggattggcttctttcactcagtaacatgcatttaactttcctctatgtcttttcatggcttgaaagctcatttcttttcagtgttgaataatactccactgtctggatggaccacagttgatttctccttttgtttactgatgggcctcttgactgctgccgagtttcggcgattatgaatagagctgcacatctacgcgcaggtttctgcagggacatcaatttccagctccttaaataccgaggaatgtgttttgcatccatcaccaccatccacctccagaactttcttatcttcacacactgaaatgctgaaatatcaaataactccccagtctccctctcccagcccctggcgcctcccattctactttctatctctatgaatttcacttttccagggacttcatataagcggaatcatcctgtttgtgtccgtttgtaactgccttatttcactcagcataatgtcttcgaggcctgtgtcagaatttccttccttttttaaggctgaatactcttccatcgtatgggtagaccgtgttctgcttacccattcatctgtcaatggacagctcttggctactctgaataatgctgctatgaacataggtgtgcccatttcatgctgggttgttttttgttgttgtttgtttgcttgtttgttttttgagacggagtctcgctctgtcacccagagtgcagtggcaggatctcagctcactgcaacctccgcctcccaggttcaagcgattctcctgcctcagcctcccgagtagctgagattacaggcatgcgccaccatgccaagataattttttgtatttttactagagatggggtttcaccatgtgggccaggctggtttcgaactcctgacctcaagtgatcctcctgcctcagcctcccaaagtgctaggattacaggcatgagccaccgcacccacccatttcatgctgttcttaatgtatgttttccagtgtctgggacacaactctgtctctcatgcctctgtctctcatgcaggcaacggggtggtcatccacttgccaggcttgtttgaggaagcagagaagaatgaaaagaaaggcctgaaggactgggagaagaggctcatcatctctgacagagcccaccttgtgtttgattttcaccaggctgtcgacggacttcaggaagtgcagcgccaggcacaagaggggaagaatataggcaccaccaagaagggaatcggaccaacctactcttccaaagctgcccggacaggcctccgcatctgcgacctcctgtcagattttgatgagttttcctccagattcaagaacctggcccaccagcaccagtcgatgttccccaccctggaaatagacattgaaggccaactcaaaaggctcaagggctttgctgagcggatcagacccatggtccgagatggtgtttactttatgtatgaggcactccacggcccccccaagaagatcctggtggagggtgccaacgccgccctcctcgacattgacttcgggacctacccctttgtgacttcatccaactgcaccgtgggcggtgtgtgcacgggcctgggcatccccccgcagaacataggtgacgtgtatggcgtggtgaaagcctataccacacgtgtgggcatcggggccttccccaccgagcagatcaacgagattggaggcctgctgcagacccgcggccacgagtggggagtgaccacaggcaggaagaggcgctgcggctggctcgacctgatgattctaagatatgctcacatggtcaacggattcactgcgctggccctgacgaagctggacatcctggacgtactgggtgaggttaaagtcggtgtctcatacaagctgaacgggaaaaggattccctatttcccagctaaccaggagatgcttcagaaggtcgaagttgagtatgaaacgctgcctgggtggaaagcagacaccacaggcgccaggaggtgggaggacctgcccccacaggcccagaactacatccgctttgtggagaatcacgtgggagtcgcagtcaaatgggttggtgttggcaagtcaagagagtcgatgatccagctgttttagtcacagactgagctgatcccaacaggccctggcagcgtctggacttgtgtaaacagcagcagtcacgttcctcggccgccacaaccaacaccaaagcaggaaaaccattttctgtacttttatatttctgttcaacctgttggtttctacaatgattttaaacattggaaagccagccttgtgtatatttttaaaaattatattcaaaatgagccaaagtgctcagagaccttctatgacacattagtgtcacatggttgcgtgtccagccgaagcagtgtaataaacatctccaatggccactgaatgggagcagttgttacatgtttg

SEQ ID NO: 8701 - protein, 383 aa, Homo sapiens
MLFLMYVFQCLGHNSVSHASVSHAGNGVVIHLPGLFEEAEKNEKKGLKDWEKRLIISDRAHLVFDFHQAVDGLQEVQRQAQEGKNIGTTKKGIGPTYSSKAARTGLRICDLLSDFDEFSSRFKNLAHQHQSMFPTLEIDIEGQLKRLKGFAERIRPMVRDGVYFMYEALHGPPKKILVEGANAALLDIDFGTYPFVTSSNCTVGGVCTGLGIPPQNIGDVYGVVKAYTTRVGIGAFPTEQINEIGGLLQTRGHEWGVTTGRKRRCGWLDLMILRYAHMVNGFTALALTKLDILDVLGEVKVGVSYKLNGKRIPYFPANQEMLQKVEVEYETLPGWKADTTGARRWEDLPPQAQNYIRFVENHVGVAVKWVGVGKSRESMIQLF

SEQ ID NO: 8702 - DNA, 2279 bp, Homo sapiens
atgaaactgtcccacctctgatcttcaggcattcgattctcacaaggagcatgtggcctagatccctcgcatgcacagttcacaatagggttcaggctcctgtgagaattgaatgacaggaggtggagctcaggccgtaatgctagcttgcccgccactcatctgctctgcagcccaattccaaacaggccaccaaccagtactggtccacagcccagggactggggacccctgctgtaagtaacagaagcgagaggtcaaaagcaagcggaagaaaccccagcactgctgaccacttcttgggtttgcccggccccttggctttccacaggctggccctgacgaagctggacatcctggacgtactgggtgaggttaaagtcggtgtctcatacaagctgaacgggaaaaggattccctatttcccaggtatgtgaagtggggcaaccgttctgcctgttgggccgtttcatggtattggaatagataggacctgtgacttctcagagaggggtgagttcccacgttcacaggacacagggcaagcagcttgtctccagtgaccagcctccatcatggcttttgcctctcacgggtttctccccacagcgttccccaggaggcctggctgggcaggggtggctgtaggccccttccagtgttttgggaatggctcagggggacagactactcgcctgggaccctgggggaccttcagctgccttgaggaaaaggcccacctgcagggagccacgggaggcacacaggagttagtggatgcggtcggctctggaagatgtaaagctctatgcggacgtacaggatgactatttcatctgagaaaatacgctttgtggcgagatttttaagacctaaccgggatccctgctccatgcaccccttcttctggaaagcatgaaggaggtgccattttcctgggtttcacaggtttcagtttcgtgtgcgtctggatgtgccccctcgacctcggtccagggtcatgttctgaccctgttccccacaatggcttcctcctcagcagccctgggcgagctgctcctggctggtctccactcagcagatctttgtaggccacacagggccacttggctacaggagccatgtgtgtccttgcaggcggtgtccctgaccctcctgacccttgacctttgagaggctgcacttgtgaggactgcaagctctcctcatggtggtccagggtcccagggggacacgcaaacactgcctggctccaaggctcaaacacacttgcagcgagaacccgtattccagcatcttccatctgtaagggtggttgtcttctaccaggagccacagagtcctgcacagggccgggatccctgccctctgggagttgatgctcttggggtgggaggacacagatgcttcaggatcccttagtgcttcaggattctagagtctcagaatttccaagccaaggcttggagtgcctcagctgatgtcacagtggaggttctagcagagtgggtagcacatatgtgtcatgtccctctggtctggaaggcgtgtagtgtctgagccccactgctgtcccctgcttaccacccaacactgagaaaatcaaactgggccacgtgcccacttgctgccttccttgcagctgagtccctaggcaaggaggccctggatgggggtggccgtgtcaccaaatatccgcttccctggtgataggaggtctgtgggccccactcatctcctgtgtgcttcccccagctaaccaggagatgcttcagaaggtcgaagttgagtatgaaacgctgcctgggtggaaagcagacaccacaggcgccaggaggtgggaggacctgcccccacaggcccagaactacatccgctttgtggagaatcacgtgggagtcgcagtcaaatgggttggtgttggcaagtcaagagagtcgatgatccagctgttttagtcacagactgagctgatcccaacaggccctggcagcgtctggacttgtgtaaacagcagcagtcacgttcctcggccgccacaaccaacaccaaagcaggaaaaccattttctgtacttttatatttctgttcaacctgttggtttctacaatgattttaaacattggaaagccagccttgtgtatatttttaaaaattatattcaaaatgagccaaagtgctcagagaccttctatgacacattagtgtcacatggttgcgtgtccagccgaagcagtgtaataaacatctccaatggccactgaatgggagcagttgtt

SEQ ID NO: 8703 - protein, 63 aa, Homo sapiens
MLQKVEVEYETLPGWKADTTGARRWEDLPPQAQNYIRFVENHVGVAVKWVGVGKSRESMIQLF

SEQ ID NO: 8704 - DNA, 728 bp, Homo sapiens
ctgtaagtaacagaagcgagaggtcaaaagcaagcggaagaaaccccagcactgctgaccacttcttgggtttgcccggccccttggctttccacaggctggccctgacgaagctggacatcctggacgtactgggtgaggttaaagtcggtgtctcatacaagctgaacgggaaaaggattccctatttcccagctaaccaggagatgcttcagaaggtcgaagttgagtatgaaacgctgcctgggtggaaagcagacaccacaggcgccaggaggtgggaggacctgcccccacaggcccagaactacatccgctttgtggagaatcacgtgggagtcgcagtcaaatgggttggtgttggcaagtcaagagagtcgatgatccagctgttttagtcacagactgagctgatcccaacaggccctggcagcgtctggacttgtgtaaacagcagcagtcacgttcctcggccgccacaaccaacaccaaagcaggaaaaccattttctgtacttttatatttctgttcaacctgttggtttctacaatgattttaaacattggaaagccagccttgtgtatatttttaaaaattatattcaaaatgagccaaagtgctcagagaccttctatgacacattagtgtcacatggttgcgtgtccagccgaagcagtgtaataaacatctccaatggccactgaatgggagcagttgttacatgtttg

SEQ ID NO: 8705 - protein, 63 aa, Homo sapiens; identical to SEQ ID NO: 8703

SEQ ID NO: 8706 - DNA, 675 bp, Homo sapiens
gcacatatgtgtcatgtccctctggtctggaaggcgtgtagtgtctgagccccactgctgtcccctgcttaccacccaacactgagaaaatcaaactgggccacgtgcccacttgctgccttccttgcagctgagtccctagctaaccaggagatgcttcagaaggtcgaagttgagtatgaaacgctgcctgggtggaaagcagacaccacaggcgccaggaggtgggaggacctgcccccacaggcccagaactacatccgctttgtggagaatcacgtgggagtcgcagtcaaatgggttggtgttggcaagtcaagagagtcgatgatccagctgttttagtcacagactgagctgatcccaacaggccctggcagcgtctggacttgtgtaaacagcagcagtcacgttcctcggccgccacaaccaacaccaaagcaggaaaaccattttctgtacttttatatttctgttcaacctgttggtttctacaatgattttaaacattggaaagccagccttgtgtatatttttaaaaattatattcaaaatgagccaaagtgctcagagaccttctatgacacattagtgtcacatggttgcgtgtccagccgaagcagtgtaataaacatctccaatggccactgaatgggagcagttgttacatgtttg

SEQ ID NO: 8707 - protein, 63 aa, Homo sapiens; identical to SEQ ID NO: 8703

SEQ ID NO: 8708 - DNA, 737 bp, Homo sapiens
cctgcttaccacccaacactgagaaaatcaaactgggccacgtgcccacttgctgccttccttgcagctgagtccctaggcaaggaggccctggatgggggtggccgtgtcaccaaatatccgcttccctggtgataggaggtctgtgggccccactcatctcctgtgtgcttcccccagctaaccaggagatgcttcagaaggtcgaagttgagtatgaaacgctgcctgggtggaaagcagacaccacaggcgccaggaggtgggaggacctgcccccacaggcccagaactacatccgctttgtggagaatcacgtgggagtcgcagtgtgtatcataacagtcttttctgctctctcagtcaaatgggttggtgttggcaagtcaagagagtcgatgatccagctgttttagtcacagactgagctgatcccaacaggccctggcagcgtctggacttgtgtaaacagcagcagtcacgttcctcggccgccacaaccaacaccaaagcaggaaaaccattttctgtacttttatatttctgttcaacctgttggtttctacaatgattttaaacattggaaagccagccttgtgtatatttttaaaaattatattcaaaatgagccaaagtgctcagagaccttctatgacacattagtgtcacatggttgcgtgtccagccgaagcagtgtaataaacatctccaatggccactgaatgggagcagttgtt

SEQ ID NO: 8709 - protein, 74 aa, Homo sapiens
MLQKVEVEYETLPGWKADTTGARRWEDLPPQAQNYIRFVENHVGVAVCIITVFSALSVKWVGVGKSRESMIQLF

SEQ ID NO: 8710 - DNA, 772 bp, Homo sapiens
tgtgacgtcacggcgtcgttggtaaggggctggcggccggggagctgcgtagctcccggccccgcggccatgcccaagcggagctgccccttcgcggacgtggccccgctacagctcaaggtccgcgtgagccagagggagttgagccgcggcgtgtgcgccgagcgctactcgcaggaggtcttcgagaagaccaagcgactcctgttcctcggggcccaggcctacctggaccacgtgtgggatgaaggctgtgccgtcgttcacctgccagagtccccaaagcctggccctacaggggccccgagggctgcacgtgggcagatgctgattggaccagacggccgcctgatcaggagccttgggcaggcctccgaagctgacccatctggggtagcgtccattgcctgttcctcatgcgtgcgagccgtggatgggaaggcggtctgcggtcagtgtgagcgagccctgtgcgggcagtgtgtgcgcacctgctggggctgcggctccgtggcctgtaccctgtgtggcctcgtggactgcagtgacatgtacgagaaagtgctgtgcaccagctgtgccatgttcgagacctgaggctggctcaagccggctgccttcaccgggagccacgccgtgcatggcagccttccctggacgagcgctcggtgttcacactgaactgtggggtcgacgggaggggtgccttttacatgttctattttgtatcctaatgacagaatgaataaacctctttatatttgcacaagag

SEQ ID NO: 8711 - protein, 175 aa, Homo sapiens; identical to SEQ ID NO: 1010

SEQ ID NO: 8712 - DNA, 3328 bp, Homo sapiens
gtgacgtcacggcgtcgttggtaaggggctggcggccggggagctgcgtagctcccggccccgcggccatgcccaagcggagctgccccttcgcggacgtggccccgctacagctcaaggtccgcgtgagccagagggagttgagccgcggcgtgtgcgccgagcgctactcgcaggaggtcttcgagaagaccaagcgactcctgttcctcggggcccaggcctacctgacggccgcctgatcaggagccttgggcaggcctccgaagctgacccatctggggtagcgtccattgcctgttcctcatgcgtgcgagccgtggatgggaaggcggtctgcggtcagtgtgagcgagccctgtgcgggcagtgtgtgcgcacctgctggggctgcggctccgtggcctgtaccctgtgtggcctcgtggagtaagtacttcagtccctggagctgctgagatcccatagccccagcaagccgtgatgggggacgggtgggtcacccatgtgggcccagaacacacacgtgtggcccctgatgcagtgccatctggcattgcctaacgggacatggtggcaatagatgcttggcccaactttagtggttagtaatcctctctaagggaaagctgaacctcacagatgacctgctctgtatccggctctagtccctgtcttcagccacttcctgttctgatctttgagcacccccacctcctcctcctctggtctttgagccccccctccccccgtccgaggagcccctggttggtgacacaggtgcacaccgcagcttcaccacagtcatgcgtgccgtttggttgtagaccctctcaggcaggaagtggagtgtttgtgtagtctcccatttgtgggtgggtttgctgcagctggctggatcccgtccttactcctaaggtggggaggggcgttctcaccctaggggctactcacctggtggatgggagtggacagtgtggagcctgtttgccctgccccgtgagaaagatgacttcatccagacacatgtggaactggctccatagacccaaagcaagcttagtccaaacaatgtctgaaattgtccatctaaaatagaaaccacatgttacatctcgagtcctttctctcgagcctttcttcagtcggggcagaggcccagactcattggagacggagagccctgggcagggggggcagcaccagggagaagcgccgcgtgccagtgatcggctcccatggcttcagcatgggcaggagtggggtaacgcaccccatccaggttgggaatcatctgcagggctagctatgaatgtgggatactctgtctttgcttttcacccgctgagttcatcttctttcctagaagtaaactgaaaagggcagggttttctcattgtctggtggccctctcaccaaagcagaagtgaacatagccatgggcaggttcagcggagaggtgggtcccagagcgctgcgtggctggcctcccactcctgccctgcacaccatccttgagggactcccttgcgcccatttcctcctggcctctacctactttctgctgctgcttcctcccatacccacagagttcacgttgagctgagtgggccactgtccccactgtggacacactcttttatcgcagctacagcacaggaggtgggctctgccctctttcacaaataaatgacttgttccaggtcacaagccagaagtggcattcccaggccaggcagcccagctggtggcacccgcagtctcctaccccctcccctgccatttcctacttcaggaccaggcgtcgcaggagtgggggaaaacagggatctgtccacacggctctggtttaacacagatgcagcccagcagcctttggcgtcctgctgatggcctgcactggcccacgcctggcccgtcctctgcagggctctccagctggctgccggtggcggtgaggggctgtcttcgcggctcacccacaatactactggcaaactctgcaaaccaagtggcaagcagttctggctgccttgttgactccacggccctgtcgtgtttggggtagccattgccagtcccgtttcctcgcaacatctctcttaatcactttctccctgtgttttgccgggttccctagcctttacctttagagctttcttttttttttttttttgagacggagtctcgctctgtcacccaggctggagtgcagtggtgcgatcttggctcactgcaacttccacctcctgtgttcaagcaattttcctgtctcagcctcccaagtagctggagttacaggcgtgcgctagcacgcccagctaatttttgtattcttagtagagacagagtttcaccatgttggccaggctggtctcgaactcctgacctcaggtgatcctccggcctcagcctcccaaagtgctgaggtaagccacaccatacgcgtgagccaccatgcccggccctacccttagtcttgatatatcagaaaagcactgtttgatgtgcttcagtgtaaaccattgtggttcggtgaattctggcaggtcatctggaggtttctttggagagcttctatcctactggaaacccaggttgggccccatgtggattgatcggcagtgggaatcagctagggctgctgtaactgagttcgcagacccagtggcatagacagcaaagaggtactgccacgtggctttggagaccagaagtctgagaggaaggtgctggcagggctggttccttctgaggctgcaatggaaaacctgtcctggcctctctcctggcatctgctggttatctttggtgttccctgtagacagctgccccctccctgtatcttcatgtcgtcttccttctctgtgtccttctcttcacgtagtctttttaggacgctggtcgtgttgccttagggcccccatgtcagtgccgtcatctagactgatgatgcccgcagtgatcctgtctccagataaggtcatgtcctgaggtgttctgggttaggactttgacgtttgaatggtggggggtggtggacacaattcagcccctgacagcagcttttctctcccctccctgacgctgtcgcagctgcagtgacatgtacgagaaagtgctgtgcaccagctgtgccatgttcgagacctgaggctggctcaagccggctgccttcaccgggagccacgccgtgcatggcagccttccctggacgagcgctcggtgttcacactgaactgtggggtcgacgggaggggtgccttttacatgttctattttgtatcctaatgacagaatgaataaacctctttatatttgcacaaga

SEQ ID NO: 8713 - protein, 57 aa, Homo sapiens
MPKRSCPFADVAPLQLKVRVSQRELSRGVCAERYSQEVFEKTKRLLFLGAQAYLTAA

SEQ ID NO: 8714 - DNA, 574 bp, Homo sapiens
gacgtcacggcgtcgttggtaaggggctggcggccggggagctgcgtagctcccggccccgcggccatgcccaagcggagctgccccttcgcggacgtggccccgctacagctcaaggtccgcgtgagccagagggagttgagccgcggcgtgtgcgccgagcgctactcgcaggaggtcttcgagaagaccaagcgactcctgttcctcggggcccaggcctacctggaccacgtgtgggatgaaggctgtgccgtcgttcacctgccagagtccccaaagcctggccctacaggggccccgagggctgcacgtgggcagatgctgattggaccagacggccgcctgatcaggagccttgggcaggcctccgaagctgacccatctggggtagcgtccattgcctgttcctcatgcgtgcgagccgtggatgggaaggcggtctgcggtcagtgtgagcgagccctgtgcgggcagtgtgtgcgcacctgctggggctgcggctccgtggcctgtaccctgtgtggcctcgtggagggctactcacctggtggatgggagtggacagtgtgga

SEQ ID NO: 8715 - protein, 168 aa, Homo sapiens
MPKRSCPFADVAPLQLKVRVSQRELSRGVCAERYSQEVFEKTKRLLFLGAQAYLDHVWDEGCAVVHLPESPKPGPTGAPRAARGQMLIGPDGRLIRSLGQASEADPSGVASIACSSCVRAVDGKAVCGQCERALCGQCVRTCWGCGSVACTLCGLVEGYSPGGWEWTV

SEQ ID NO: 8716 - DNA, 1162 bp, Homo sapiens
gacgtcacggcgtcgttggtaaggggctggcggccggggagctgcgtagctcccggccccgcggccatgcccaagcggagctgccccttcgcggacgtggccccgctacagctcaaggtccgcgtgagccagagggagttgagccgcggcgtgtgcgccgagcgctactcgcaggaggtcttcgagaagaccaagcgactcctgttcctcggggcccaggcctacctggaccacgtgtgggatgaaggctgtgccgtcgttcacctgccagagtccccaaagcctggccctacaggggccccgagggctgcacgtgggcagatgctgattggaccagacggccgcctgatcaggagccttgggcaggcctccgaagctgacccatctggggtagcgtccattgcctgttcctcatgcgtgcgagccgtggatgggaaggcggtctgcggtcagtgtgagcgagccctgtgcgggcagtgtgtgcgcacctgctggggctgcggctccgtggcctgtaccctgtgtggcctcgtggagccggccttgtgctggaaagagcatgatgtgggcatgtgagaaacaaactcacccatccacacccgaagaatggactcagagacctcagagaccggagaacagcaaaaaactatccctaagaggccaggtgtggtggctcacaccttataatcccaacgttttgggaggacaaggcaggaggatcacttgaggcccggagttcaagaccggcctgaacaacatagcgagaccctatctctaccataaaaaagacccagaacatcctcgccagcctgtgctccctatggggcaccccctccagtggaagtgagggcagccacgcacccctgggaatgccttagagaggggccaattgccatcgccaggggcctgactctgcaaccatccacacctacggggagtccatttgagagatgaggaagctgaagctccaggcccctggctcgtgctggtcacccaaccacccggaacctggtcgccaacccgctgtcagttgctcggcagtggactcctctcctggctcagggcgcggttccggcaggcgtccaccaggtggcagcaccggcacattctgcaggctgttccggctcagagctcgatgtagtgctctggggtaacctgggcc

SEQ ID NO: 8717 - protein, 169 aa, Homo sapiens
MPKRSCPFADVAPLQLKVRVSQRELSRGVCAERYSQEVFEKTKRLLFLGAQAYLDHVWDEGCAVVHLPESPKPGPTGAPRAARGQMLIGPDGRLIRSLGQASEADPSGVASIACSSCVRAVDGKAVCGQCERALCGQCVRTCWGCGSVACTLCGLVEPALCWKEHDVGM

SEQ ID NO: 8718 - DNA, 562 bp, Homo sapiens
gtcgttggtaaggggctggcggccggggagctgcgtagctcccggccccgcggccatgcccaagcggagctgccccttcgcggacgtggccccgctacagctcaaggtccgcgtgagccagagggagttgagccgcggcgtgtgcgccgagcgctactcgcaggaggtcttcgacccatctggggtagcgtccattgcctgttcctcatgcgtgcgagccgtggatgggaaggcggtctgcggtcagtgtgagcgagccctgtgcgggcagtgtgtgcgcacctgctggggctgcggctccgtggcctgtaccctgtgtggcctcgtggactgcagtgacatgtacgagaaagtgctgtgcaccagctgtgccatgttcgagacctgaggctggctcaagccggctgccttcaccgggagccacgccgtgcatggcagccttccctggacgagcgctcggtgttcacactgaactgtggggtcgacgggaggggtgccttttacatgttctattttgtatcctaatgacagaatgaataaacctctttatatttgcacaaga

SEQ ID NO: 8719 - protein, 110 aa, Homo sapiens; identical to SEQ ID NO: 1012

SEQ ID NO: 8720 - DNA, 3356 bp, Homo sapiens
gtcgttggtaaggggctggcggccggggagctgcgtagctcccggccccgcggccatgcccaagcggagctgccccttcgcggacgtggccccgctacagctcaaggtccgcgtgagccagagggagttgagccgcggcgtgtgcgccgagcgctactcgcaggaggtcttcgagaagaccaagcgactcctgttcctcggggcccaggcctacctggaccacgtgtgggatgaaggctgtgccgtcgttcacctgccagagtccccaaagcctggccctacaggggccccgagggctgcacgtgggcagatgctgattggaccagacggccgcctgatcaggagccttgggcaggcctccgaagctgacccatctggggtagcgtccattgcctgttcctcatgcgtgcgagccgtggatgggaaggcggtctgcggtcagtgtgagcgagccctgtgcgggcagtgtgtgcgcacctctgctgagatcccatagccccagcaagccgtgatgggggacgggtgggtcacccatgtgggcccagaacacacacgtgtggcccctgatgcagtgccatctggcattgcctaacgggacatggtggcaatagatgcttggcccaactttagtggttagtaatcctctctaagggaaagctgaacctcacagatgacctgctctgtatccggctctagtccctgtcttcagccacttcctgttctgatctttgagcacccccacctcctcctcctctggtctttgagccccccctccccccgtccgaggagcccctggttggtgacacaggtgcacaccgcagcttcaccacagtcatgcgtgccgtttggttgtagaccctctcaggcaggaagtggagtgtttgtgtagtctcccatttgtgggtgggtttgctgcagctggctggatcccgtccttactcctaaggtggggaggggcgttctcaccctaggggctactcacctggtggatgggagtggacagtgtggagcctgtttgccctgccccgtgagaaagatgacttcatccagacacatgtggaactggctccatagacccaaagcaagcttagtccaaacaatgtctgaaattgtccatctaaaatagaaaccacatgttacatctcgagtcctttctctcgagcctttcttcagtcggggcagaggcccagactcattggagacggagagccctgggcagggggggcagcaccagggagaagcgccgcgtgccagtgatcggctcccatggcttcagcatgggcaggagtggggtaacgcaccccatccaggttgggaatcatctgcagggctagctatgaatgtgggatactctgtctttgcttttcacccgctgagttcatcttctttcctagaagtaaactgaaaagggcagggttttctcattgtctggtggccctctcaccaaagcagaagtgaacatagccatgggcaggttcagcggagaggtgggtcccagagcgctgcgtggctggcctcccactcctgccctgcacaccatccttgagggactcccttgcgcccatttcctcctggcctctacctactttctgctgctgcttcctcccatacccacagagttcacgttgagctgagtgggccactgtccccactgtggacacactcttttatcgcagctacagcacaggaggtgggctctgccctctttcacaaataaatgacttgttccaggtcacaagccagaagtggcattcccaggccaggcagcccagctggtggcacccgcagtctcctaccccctcccctgccatttcctacttcaggaccaggcgtcgcaggagtgggggaaaacagggatctgtccacacggctctggtttaacacagatgcagcccagcagcctttggcgtcctgctgatggcctgcactggcccacgcctggcccgtcctctgcagggctctccagctggctgccggtggcggtgaggggctgtcttcgcggctcacccacaatactactggcaaactctgcaaaccaagtggcaagcagttctggctgccttgttgactccacggccctgtcgtgtttggggtagccattgccagtcccgtttcctcgcaacatctctcttaatcactttctccctgtgttttgccgggttccctagcctttacctttagagctttcttttttttttttttttgagacggagtctcgctctgtcacccaggctggagtgcagtggtgcgatcttggctcactgcaacttccacctcctgtgttcaagcaattttcctgtctcagcctcccaagtagctggagttacaggcgtgcgctagcacgcccagctaatttttgtattcttagtagagacagagtttcaccatgttggccaggctggtctcgaactcctgacctcaggtgatcctccggcctcagcctcccaaagtgctgaggtaagccacaccatacgcgtgagccaccatgcccggccctacccttagtcttgatatatcagaaaagcactgtttgatgtgcttcagtgtaaaccattgtggttcggtgaattctggcaggtcatctggaggtttctttggagagcttctatcctactggaaacccaggttgggccccatgtggattgatcggcagtgggaatcagctagggctgctgtaactgagttcgcagacccagtggcatagacagcaaagaggtactgccacgtggctttggagaccagaagtctgagaggaaggtgctggcagggctggttccttctgaggctgcaatggaaaacctgtcctggcctctctcctggcatctgctggttatctttggtgttccctgtagacagctgccccctccctgtatcttcatgtcgtcttccttctctgtgtccttctcttcacgtagtctttttaggacgctggtcgtgttgccttagggcccccatgtcagtgccgtcatctagactgatgatgcccgcagtgatcctgtctccagataaggtcatgtcctgaggtgttctgggttaggactttgacgtttgaatggtggggggtggtggacacaattcagcccctgacagcagcttttctctcccctccctgacgctgtcgcagctgcagtgacatgtacgagaaagtgctgtgcaccagctgtgccatgttcgagacctgaggctggctcaagccggctgccttcaccgggagccacgccgtgcatggcagccttccctggacgagcgctcggtgttcacactgaactgtggggtcgacgggaggggtgccttttacatgttctattttgtatcctaatgacagaatgaataaacctctttatatttgcacaaga

SEQ ID NO: 8721 - protein, 146 aa, Homo sapiens
MPKRSCPFADVAPLQLKVRVSQRELSRGVCAERYSQEVFEKTKRLLFLGAQAYLDHVWDEGCAVVHLPESPKPGPTGAPRAARGQMLIGPDGRLIRSLGQASEADPSGVASIACSSCVRAVDGKAVCGQCERALCGQCVRTSAEIP

SEQ ID NO: 8722 - DNA, 3424 bp, Homo sapiens
gtcgttggtaaggggctggcggccggggagctgcgtagctcccggccccgcggccatgcccaagcggagctgccccttcgcggacgtggccccgctacagctcaaggtccgcgtgagccagagggagttgagccgcggcgtgtgcgccgagcgctactcgcaggaggtcttcgagaagaccaagcgactcctgttcctcggggcccaggcctacctggaccacgtgtgggatgaaggctgtgccgtcgttcacctgccagagtccccaaagcctggccctacaggggccccgagggctgcacgtgggcagatgctgattggaccagacggccgcctgatcaggagccttgggcaggcctccgaagctgacccatctggggtagcgtccattgcctgttcctcatgcgtgcgagccgtggatgggaaggcggtctgcggtcagtgtgagcgagccctgtgcgggcagtgtgtgcgcacctgctggggctgcggctccgtggcctgtaccctgtgtggcctcgtggagtaagtacttcagtccctggagctgctgagatcccatagccccagcaagccgtgatgggggacgggtgggtcacccatgtgggcccagaacacacacgtgtggcccctgatgcagtgccatctggcattgcctaacgggacatggtggcaatagatgcttggcccaactttagtggttagtaatcctctctaagggaaagctgaacctcacagatgacctgctctgtatccggctctagtccctgtcttcagccacttcctgttctgatctttgagcacccccacctcctcctcctctggtctttgagccccccctccccccgtccgaggagcccctggttggtgacacaggtgcacaccgcagcttcaccacagtcatgcgtgccgtttggttgtagaccctctcaggcaggaagtggagtgtttgtgtagtctcccatttgtgggtgggtttgctgcagctggctggatcccgtccttactcctaaggtggggaggggcgttctcaccctaggggctactcacctggtggatgggagtggacagtgtggagcctgtttgccctgccccgtgagaaagatgacttcatccagacacatgtggaactggctccatagacccaaagcaagcttagtccaaacaatgtctgaaattgtccatctaaaatagaaaccacatgttacatctcgagtcctttctctcgagcctttcttcagtcggggcagaggcccagactcattggagacggagagccctgggcagggggggcagcaccagggagaagcgccgcgtgccagtgatcggctcccatggcttcagcatgggcaggagtggggtaacgcaccccatccaggttgggaatcatctgcagggctagctatgaatgtgggatactctgtctttgcttttcacccgctgagttcatcttctttcctagaagtaaactgaaaagggcagggttttctcattgtctggtggccctctcaccaaagcagaagtgaacatagccatgggcaggttcagcggagaggtgggtcccagagcgctgcgtggctggcctcccactcctgccctgcacaccatccttgagggactcccttgcgcccatttcctcctggcctctacctactttctgctgctgcttcctcccatacccacagagttcacgttgagctgagtgggccactgtccccactgtggacacactcttttatcgcagctacagcacaggaggtgggctctgccctctttcacaaataaatgacttgttccaggtcacaagccagaagtggcattcccaggccaggcagcccagctggtggcacccgcagtctcctaccccctcccctgccatttcctacttcaggaccaggcgtcgcaggagtgggggaaaacagggatctgtccacacggctctggtttaacacagatgcagcccagcagcctttggcgtcctgctgatggcctgcactggcccacgcctggcccgtcctctgcagggctctccagctggctgccggtggcggtgaggggctgtcttcgcggctcacccacaatactactggcaaactctgcaaaccaagtggcaagcagttctggctgccttgttgactccacggccctgtcgtgtttggggtagccattgccagtcccgtttcctcgcaacatctctcttaatcactttctccctgtgttttgccgggttccctagcctttacctttagagctttcttttttttttttttttgagacggagtctcgctctgtcacccaggctggagtgcagtggtgcgatcttggctcactgcaacttccacctcctgtgttcaagcaattttcctgtctcagcctcccaagtagctggagttacaggcgtgcgctagcacgcccagctaatttttgtattcttagtagagacagagtttcaccatgttggccaggctggtctcgaactcctgacctcaggtgatcctccggcctcagcctcccaaagtgctgaggtaagccacaccatacgcgtgagccaccatgcccggccctacccttagtcttgatatatcagaaaagcactgtttgatgtgcttcagtgtaaaccattgtggttcggtgaattctggcaggtcatctggaggtttctttggagagcttctatcctactggaaacccaggttgggccccatgtggattgatcggcagtgggaatcagctagggctgctgtaactgagttcgcagacccagtggcatagacagcaaagaggtactgccacgtggctttggagaccagaagtctgagaggaaggtgctggcagggctggttccttctgaggctgcaatggaaaacctgtcctggcctctctcctggcatctgctggttatctttggtgttccctgtagacagctgccccctccctgtatcttcatgtcgtcttccttctctgtgtccttctcttcacgtagtctttttaggacgctggtcgtgttgccttagggcccccatgtcagtgccgtcatctagactgatgatgcccgcagtgatcctgtctccagataaggtcatgtcctgaggtgttctgggttaggactttgacgtttgaatggtggggggtggtggacacaattcagcccctgacagcagcttttctctcccctccctgacgctgtcgcagctgcagtgacatgtacgagaaagtgctgtgcaccagctgtgccatgttcgagacctgaggctggctcaagccggctgccttcaccgggagccacgccgtgcatggcagccttccctggacgagcgctcggtgttcacactgaactgtggggtcgacgggaggggtgccttttacatgttctattttgtatcctaatgacagaatgaataaacctctttatatttgcacaaga

SEQ ID NO: 8723 - protein, 157 aa, Homo sapiens
MPKRSCPFADVAPLQLKVRVSQRELSRGVCAERYSQEVFEKTKRLLFLGAQAYLDHVWDEGCAVVHLPESPKPGPTGAPRAARGQMLIGPDGRLIRSLGQASEADPSGVASIACSSCVRAVDGKAVCGQCERALCGQCVRTCWGCGSVACTLCGLVE

SEQ ID NO: 8724 - DNA, 4203 bp, Homo sapiens
gtcgttggtaaggggctggcggccggggagctgcgtagctcccggccccgcggccatgcccaagcggagctgccccttcgcggacgtggccccgctacagctcaaggtccgcgtgagccagagggagttgagccgcggcgtgtgcgccgagcgctactcgcaggaggtcttcgagaagaccaagcgactcctgttcctcggggcccaggcctacctggaccacgtgtgggatgaaggctgtgccgtcgttcacctgccagagtccccaaagcctggccctacaggggccccgagggctgcacgtgggcagatgctgattggaccagacggccgcctgatcaggagccttgggcaggcctccgaagctggtgagtggcaccagcagccctttgtggctgtggcactgagggcaggtggtggcacgagcatttttcttgatttgcaaggtcaggcttttcctccctgggtaagcaggactctgacccagagcttggccttctggctcagaaggctcctgttatcaggaggtctcacattcaagactggaagttgttaaacagcttctaagtactgggccaaaaaagcagcagagactccccgggtatcccgtctgctttccgcctgcagccccctcagatagtcccacaaggctggaaacatgccagtcccatccctatgcagtgtggggtctcagagcatcacctgtgttgctggttagaaatgcaatccccgactctacctcaagtctggttggtgtgtctaggaggagcccaggcacctctttgttaaccagtaaggcagtgggccacactgagacccagatgggacacatggagttctgacaagcaacaggggaagaatggtccttccagcactagcctccaggtagcagagggacctggtaagggaaagagcactgaacttggagtcaactacaggcatatctcaccttggatctctgtagtaaaacgggggtcctgtgcactgtaccaggctcacgggttgtcagaaggatccagtgtaggtggggatggggtaggcaggtcagagccctctgccctcaggtatgcatggaggcaggtagcccggcagtcccggaaactccagtctccttgcagcctgacggcttggcgtttcttcctcacagacccatctggggtagcgtccattgcctgttcctcatgcgtgcgagccgtggatgggaaggcggtctgcggtcagtgtgagcgagccctgtgcgggcagtgtgtgcgcacctgctggggctgcggctccgtggcctgtaccctgtgtggcctcgtggagtaagtacttcagtccctggagctgctgagatcccatagccccagcaagccgtgatgggggacgggtgggtcacccatgtgggcccagaacacacacgtgtggcccctgatgcagtgccatctggcattgcctaacgggacatggtggcaatagatgcttggcccaactttagtggttagtaatcctctctaagggaaagctgaacctcacagatgacctgctctgtatccggctctagtccctgtcttcagccacttcctgttctgatctttgagcacccccacctcctcctcctctggtctttgagccccccctccccccgtccgaggagcccctggttggtgacacaggtgcacaccgcagcttcaccacagtcatgcgtgccgtttggttgtagaccctctcaggcaggaagtggagtgtttgtgtagtctcccatttgtgggtgggtttgctgcagctggctggatcccgtccttactcctaaggtggggaggggcgttctcaccctaggggctactcacctggtggatgggagtggacagtgtggagcctgtttgccctgccccgtgagaaagatgacttcatccagacacatgtggaactggctccatagacccaaagcaagcttagtccaaacaatgtctgaaattgtccatctaaaatagaaaccacatgttacatctcgagtcctttctctcgagcctttcttcagtcggggcagaggcccagactcattggagacggagagccctgggcagggggggcagcaccagggagaagcgccgcgtgccagtgatcggctcccatggcttcagcatgggcaggagtggggtaacgcaccccatccaggttgggaatcatctgcagggctagctatgaatgtgggatactctgtctttgcttttcacccgctgagttcatcttctttcctagaagtaaactgaaaagggcagggttttctcattgtctggtggccctctcaccaaagcagaagtgaacatagccatgggcaggttcagcggagaggtgggtcccagagcgctgcgtggctggcctcccactcctgccctgcacaccatccttgagggactcccttgcgcccatttcctcctggcctctacctactttctgctgctgcttcctcccatacccacagagttcacgttgagctgagtgggccactgtccccactgtggacacactcttttatcgcagctacagcacaggaggtgggctctgccctctttcacaaataaatgacttgttccaggtcacaagccagaagtggcattcccaggccaggcagcccagctggtggcacccgcagtctcctaccccctcccctgccatttcctacttcaggaccaggcgtcgcaggagtgggggaaaacagggatctgtccacacggctctggtttaacacagatgcagcccagcagcctttggcgtcctgctgatggcctgcactggcccacgcctggcccgtcctctgcagggctctccagctggctgccggtggcggtgaggggctgtcttcgcggctcacccacaatactactggcaaactctgcaaaccaagtggcaagcagttctggctgccttgttgactccacggccctgtcgtgtttggggtagccattgccagtcccgtttcctcgcaacatctctcttaatcactttctccctgtgttttgccgggttccctagcctttacctttagagctttcttttttttttttttttgagacggagtctcgctctgtcacccaggctggagtgcagtggtgcgatcttggctcactgcaacttccacctcctgtgttcaagcaattttcctgtctcagcctcccaagtagctggagttacaggcgtgcgctagcacgcccagctaatttttgtattcttagtagagacagagtttcaccatgttggccaggctggtctcgaactcctgacctcaggtgatcctccggcctcagcctcccaaagtgctgaggtaagccacaccatacgcgtgagccaccatgcccggccctacccttagtcttgatatatcagaaaagcactgtttgatgtgcttcagtgtaaaccattgtggttcggtgaattctggcaggtcatctggaggtttctttggagagcttctatcctactggaaacccaggttgggccccatgtggattgatcggcagtgggaatcagctagggctgctgtaactgagttcgcagacccagtggcatagacagcaaagaggtactgccacgtggctttggagaccagaagtctgagaggaaggtgctggcagggctggttccttctgaggctgcaatggaaaacctgtcctggcctctctcctggcatctgctggttatctttggtgttccctgtagacagctgccccctccctgtatcttcatgtcgtcttccttctctgtgtccttctcttcacgtagtctttttaggacgctggtcgtgttgccttagggcccccatgtcagtgccgtcatctagactgatgatgcccgcagtgatcctgtctccagataaggtcatgtcctgaggtgttctgggttaggactttgacgtttgaatggtggggggtggtggacacaattcagcccctgacagcagcttttctctcccctccctgacgctgtcgcagctgcagtgacatgtacgagaaagtgctgtgcaccagctgtgccatgttcgagacctgaggctggctcaagccggctgccttcaccgggagccacgccgtgcatggcagccttccctggacgagcgctcggtgttcacactgaactgtggggtcgacgggaggggtgccttttacatgttctattttgtatcctaatgacagaatgaataaacctctttatatttgcacaaga

SEQ ID NO: 8725 - protein, 166 aa, Homo sapiens
MPKRSCPFADVAPLQLKVRVSQRELSRGVCAERYSQEVFEKTKRLLFLGAQAYLDHVWDEGCAVVHLPESPKPGPTGAPRAARGQMLIGPDGRLIRSLGQASEAGEWHQQPFVAVALRAGGGTSIFLDLQGQAFPPWVSRTLTQSLAFWLRRLLLSGGLTFKTGSC

SEQ ID NO: 8726 - DNA, 756 bp, Homo sapiens
cccctcctgtcccaagaggtattcatggagcgcgcggccctgccaggcacggcggctttctcgggagaccaaaggcaggcaagacagatgtgccccgtctcccgggagctccccagcctagttggggagaccagcaggaggagtcgccacaggtggtcggggcaggcacagagaagaccaagcgactcctgttcctcggggcccaggcctacctggaccacgtgtgggatgaaggctgtgccgtcgttcacctgccagagtccccaaagcctggccctacaggggccccgagggctgcacgtgggcagatgctgattggaccagacggccgcctgatcaggagccttgggcaggcctccgaagctgacccatctggggtagcgtccattgcctgttcctcatgcgtgcgagccgtggatgggaaggcggtctgcggtcagtgtgagcgagccctgtgcgggcagtgtgtgcgcacctgctggggctgcggctccgtggcctgtaccctgtgtggcctcgtggactgcagtgacatgtacgagaaagtgctgtgcaccagctgtgccatgttcgagacctgaggctggctcaagccggctgccttcaccgggagccacgccgtgcatggcagccttccctggacgagcgctcggtgttcacactgaactgtggggtcgacgggaggggtgccttttacatgttctattttgtatcctaatgacagaatgaataaacctctttatatttgcacaagag

SEQ ID NO: 8727 - protein, 103 aa, Homo sapiens
MGRRSAVSVSEPCAGSVCAPAGAAAPWPVPCVASWTAVTCTRKCCAPAVPCSRPEAGSSRLPSPGATPCMAAFPGRALGVHTELWGRREGCLLHVLFCILMTE

SEQ ID NO: 8728 - DNA, 430 bp, Homo sapiens
cggccgcctgatcaggagccttgggcaggcctccgaagctgacccatctggggtagcgtccattgcctgttcctcatgcgtgcgagccgtggatgggaaggcggtctgcggtcagtgtgagcgagccctgtgcgggcagtgtgtgcgcacctgctggggctgcggctccgtggcctgtaccctgtgtggcctcgtggactgcagtgacatgtacgagaaagtgctgtgcaccagctgtgccatgttcgagacctgaggctggctcaagccggctgccttcaccgggagccacgccgtgcatggcagccttccctggacgagcgctcggtgttcacactgaactgtggggtcgacgggaggggtgccttttacatgttctattttgtatcctaatgacagaatgaataaacctctttatatttgcacaaga

SEQ ID NO: 8729 - protein, 103 aa, Homo sapiens; identical to SEQ ID NO: 8727

SEQ ID NO: 8730 - DNA, 306 bp, Homo sapiens
gacccatctggggtagcgtccattgcctgttcctcatgcgtgcgagccgtggatgggaaggcggtctgcggtcagtgtgagcgagccctgtgcgggcagtgtgtgcgcaccagctgtgccatgttcgagacctgaggctggctcaagccggctgccttcaccgggagccacgccgtgcatggcagccttccctggacgagcgctcggtgttcacactgaactgtggggtcgacgggaggggtgccttttacatgttctattttgtatcctaatgacagaatgaataaacctctttatatttgcaca

SEQ ID NO: 8731 - protein, 76 aa, Homo sapiens
MGRRSAVSVSEPCAGSVCAPAVPCSRPEAGSSRLPSPGATPCMAAFPGRALGVHTELWGRREGCLLHVLFCILMTE

SEQ ID NO: 8732 - DNA, 724 bp, Homo sapiens
aggagttcacggcccagatgatcaccatcacaccacctgaccaagatgacagcatggagtgtgtggacagcgagcgcaggccccacttcccccagttctcctactcggccagcggcacggcctgaggcggcggtggactgcgctgggcctcagttcaacctggtggcaccagatgcaacctcactatggtatgctggccagcaccctctcctgggggtggcaggcacacagcagccccccagcactaaggccgtgtctctgaggacgtcatcggaggctgggcccctgggatgggaccagggatgggggatgggccagggtttacccagtgggacagaggagcaaggtttaaatttgttattgtgtattatgttgttcaaatgcattttgggggtttttaatctttgtgacaggaaagccctcccccttccccttctgtgtcacagttcttggtgactgtcccaccgggagcctccccctcagatgatctctccacggtagcacttgaccttttcgacgcttaacctttccgctgtcgccccaggccctccctgactccctgtgggggtggccatccctgggcccctccacgcctcctggccagacgctgccgctgccgctgcaccacggcgtttttttacaacattcaactttagtatttttactattataatataatatggaaccttccctccaaattcttcaataaaagttgcttttcaaa

SEQ ID NO: 8733 - protein, 136 aa, Homo sapiens
MTAWSVWTASAGPTSPSSPTRPAARPEAAVDCAGPQFNLVAPDATSLWYAGQHPLLGVAGTQQPPSTKAVSLRTSSEAGPLGWDQGWGMGQGLPSGTEEQGLNLLLCIMLFKCILGVFNLCDRKALPLPLLCHSSW

SEQ ID NO: 8734 - DNA, 2480 bp, Homo sapiens
tggtcctcatttcctcctcccctcggaggtgtgtcacactctgagtttcctcctcccctcggaggtgtgtcacactctgagtgccagccttggggttcccttccctgacgctgtgcagtgaaggctggctggtggtggaccaggggtgctgccccttggcctccacgagttcctcctgtttgacctcaatcccttctgccgcaaggagagcccagccctatttctggctgtgcagggacagggacagcacctacttttctggcacatgggggagtccgccctggagggaggcagctctttctgcatgagtcgccatcctgggtgctcatctttcagggaccctaggagccctggccatcaccccagctgatggggtctgccagctgggttcggaagcctgcactctgagatgctgggtgccctgtcaccaggtgtgcttctgccccgttcccagcctgcccctcccctgaatgcctgtcctaggctgtgtgcagctggtcgggctgggcagccctgggacccagctgggcacctgttctcccattaacacagggtgccctggtcctggtccccgttcctgccttgaggcctgccaccctcctgccctgccctccaagggtatggggggcctgggcagtgctcaacctctgcccagccttgaccagagaccttgctaattgacaatggacaatgctggtgcccagcccagactctggggtggggcagtgcttgagggggtccttgactgtgggacctgaggggctctctggcagctcctcacgtgtgcacatcaccttatagtcacccttcatcctgggtcattgagagtcctgtctgcagccagatgccagcaggctgtggtcctgtagtccctgagccatggaggcagggtgggctcatcctgtgcaccttgttccacagtctccctctttcccaatttacaagaagaccaataagaaaaataagaaaacaagaaagaaaaaggaaaaataaagttatcacctcctggtagcagggagggtctctcagagctgggctgcactacctcctgtcgcctgctggggctgctgtgagggcagctttgcgtctcagctgttgagggttgtctccgtgctcctgcacccctcatgtccctccctcccagagctgcctctgtggggggctggtggcttgctgctctctgacatcagtcctgcctggagaccccttggagatccaggtgctttgaaggtcttgagcacacttgagggtgtgctgggagtggggagcgaagctcatgactgtcccgtctgcccacctctgcagctcagcccacccttcaagccccaggtcacgtcggagactgacaccaggtattttgatgaggagttcacggcccagatgatcaccatcacaccacctgaccaagatgacagcatggagtgtgtggacagcgagcgcaggccccacttcccccagttctcctactcggccagcggcacggcctgaggcggcggtggactgcgctggacgatagcttggagggatggagaggcggcctcgtgccatgatctgtatttaatggtttttatttctcgggtgcatttgagagaagccacgctgtcctctcgagcccagatggaaagacgtttttgtgctgtgggcagcaccctcccccgcagcggggtagggaagaaaactatcctgcgggttttaatttatttcatccagtttgttctccgggtgtggcctcagccctcagaacaatccgattcacgtagggaaatgttaaggacttctgcagctatgcgcaatgtggcattggggggccgggcaggtcctgcccatgtgtcccctcactctgtcagccagccgccctgggctgtctgtcaccagctatctgtcatctctctggggccctgggcctcagttcaacctggtggcaccagatgcaacctcactatggtatgctggccagcaccctctcctgggggtggcaggcacacagcagccccccagcactaaggccgtgtctctgaggacgtcatcggaggctgggcccctgggatgggaccagggatgggggatgggccagggtttacccagtgggacagaggagcaaggtttaaatttgttattgtgtattatgttgttcaaatgcattttgggggtttttaatctttgtgacaggaaagccctcccccttccccttctgtgtcacagttcttggtgactgtcccaccgggagcctccccctcagatgatctctccacggtagcacttgaccttttcgacgcttaacctttccgctgtcgccccaggccctccctgactccctgtgggggtggccatccctgggcccctccacgcctcctggccagacgctgccgctgccgctgcaccacggcgtttttttacaacattcaactttagtatttttactattataatataatatggaaccttccctccaaattcttcaataaaagttgcttttcaaa

SEQ ID NO: 8735 - protein, 35 aa, Homo sapiens
MITITPPDQDDSMECVDSERRPHFPQFSYSASGTA

SEQ ID NO: 8736 - DNA, 3190 bp, Homo sapiens
atggaggagatccgcttcccgcgcacgcttggtcccgaggccaagtccttgctttcagggctgctcaagaaggaccccaagcagaggcttggcgggggctccgaggacgccaaggagatcatgcagcatcgcttctttgccggtatcgtgtggcagcacgtgtacgagaagaaggtgcggctgctccccgcatattcacgcgcacgcatgctccccacatatccacactcacgcatgcacgtggcacgctcgccagatttcccacacactcgccctcacctcaggagcctgctgcagtcctggtacaaggagggccttgctgcaccaacctcagcgcctggtgctcagaggctctggcactgccgggttccaccaggaaactggcctggtcctcatttcctcctcccctcggaggtgtgtcacactctgagtttcctcctcccctcggaggtgtgtcacactctgagtgccagccttggggttcccttccctgacgctgtgcagtgaaggctggctggtggtggaccaggggtgctgccccttggcctccacgagttcctcctgtttgacctcaatcccttctgccgcaaggagagcccagccctatttctggctgtgcagggacagggacagcacctacttttctggcacatgggggagtccgccctggagggaggcagctctttctgcatgagtcgccatcctgggtgctcatctttcagggaccctaggagccctggccatcaccccagctgatggggtctgccagctgggttcggaagcctgcactctgagatgctgggtgccctgtcaccaggtgtgcttctgccccgttcccagcctgcccctcccctgaatgcctgtcctaggctgtgtgcagctggtcgggctgggcagccctgggacccagctgggcacctgttctcccattaacacagggtgccctggtcctggtccccgttcctgccttgaggcctgccaccctcctgccctgccctccaagggtatggggggcctgggcagtgctcaacctctgcccagccttgaccagagaccttgctaattgacaatggacaatgctggtgcccagcccagactctggggtggggcagtgcttgagggggtccttgactgtgggacctgaggggctctctggcagctcctcacgtgtgcacatcaccttatagtcacccttcatcctgggtcattgagagtcctgtctgcagccagatgccagcaggctgtggtcctgtagtccctgagccatggaggcagggtgggctcatcctgtgcaccttgttccacagtctccctctttcccaatttacaagaagaccaataagaaaaataagaaaacaagaaagaaaaaggaaaaataaagttatcacctcctggtagcagggagggtctctcagagctgggctgcactacctcctgtcgcctgctggggctgctgtgagggcagctttgcgtctcagctgttgagggttgtctccgtgctcctgcacccctcatgtccctccctcccagagctgcctctgtggggggctggtggcttgctgctctctgacatcagtcctgcctggagaccccttggagatccaggtgctttgaaggtcttgagcacacttgagggtgtgctgggagtggggagcgaagctcatgactgtcccgtctgcccacctctgcagctcagcccacccttcaagccccaggtcacgtcggagactgacaccaggtattttgatgaggagttcacggcccagatgatcaccatcacaccacctgaccaaggtgaggggccactgcctgcccccgcccactcccttttctctccacactcagagaggcctgcagtgttcagcttttttggcttcagatgttttaaaatctaaatatttaaaaaggttccttttggagagtgccaatgatcagggtgggaggcagtgctctgagggcccaggtccctgtgtcaatctgtggggccctgtctcagtttcctggcagtatggcagcgtgctggccgtgctttaagaggttggcttcctactggagctgtgggtgggtggaggtggcagggaggtggggcaccggggtctgagctgtctacacccacagatgacagcatggagtgtgtggacagcgagcgcaggccccacttcccccagttctcctactcggccagcggcacggcctgaggcggcggtggactgcgctggacgatagcttggagggatggagaggcggcctcgtgccatgatctgtatttaatggtttttatttctcgggtgcatttgagagaagccacgctgtcctctcgagcccagatggaaagacgtttttgtgctgtgggcagcaccctcccccgcagcggggtagggaagaaaactatcctgcgggttttaatttatttcatccagtttgttctccgggtgtggcctcagccctcagaacaatccgattcacgtagggaaatgttaaggacttctgcagctatgcgcaatgtggcattggggggccgggcaggtcctgcccatgtgtcccctcactctgtcagccagccgccctgggctgtctgtcaccagctatctgtcatctctctggggccctgggcctcagttcaacctggtggcaccagatgcaacctcactatggtatgctggccagcaccctctcctgggggtggcaggcacacagcagccccccagcactaaggccgtgtctctgaggacgtcatcggaggctgggcccctgggatgggaccagggatgggggatgggccagggtttacccagtgggacagaggagcaaggtttaaatttgttattgtgtattatgttgttcaaatgcattttgggggtttttaatctttgtgacaggaaagccctcccccttccccttctgtgtcacagttcttggtgactgtcccaccgggagcctccccctcagatgatctctccacggtagcacttgaccttttcgacgcttaacctttccgctgtcgccccaggccctccctgactccctgtgggggtggccatccctgggcccctccacgcctcctggccagacgctgccgctgccgctgcaccacggcgtttttttacaacattcaactttagtatttttactattataatataatatggaaccttccctccaaattcttcaataaaagttgcttttcaaa

SEQ ID NO: 8737 - protein, 168 aa, Homo sapiens
MEEIRFPRTLGPEAKSLLSGLLKKDPKQRLGGGSEDAKEIMQHRFFAGIVWQHVYEKKVRLLPAYSRARMLPTYPHSRMHVARSPDFPHTRPHLRSLLQSWYKEGLAAPTSAPGAQRLWHCRVPPGNWPGPHFLLPSEVCHTLSFLLPSEVCHTLSASLGVPFPDAVQ

SEQ ID NO: 8738 - DNA, 1375 bp, Homo sapiens
atgagaagctttttgagctcatcctcatggaggagatccgcttcccgcgcacgcttggtcccgaggccaagtccttgctttcagggctgctcaagaaggaccccaagcagaggcttggcgggggctccgaggacgccaaggagatcatgcagcatcgcttctttgccggtatcgtgtggcagcacgtgtacgagaagaagctcagcccacccttcaagccccaggtcacgtcggagactgacaccaggtattttgatgaggagttcacggcccagatgatcaccatcacaccacctgaccaagatgacagcatggagtgtgtggacagcgagcgcaggccccacttcccccagttctcctactcggccagcggcacggcctgaggcggcggtggactgcgctggacgatagcttggagggatggagaggcggcctcgtgccatgatctgtatttaatggtttttatttctcgggtgcatttgagagaagccacgctgtcctctcgagcccagatggaaagacgtttttgtgctgtgggcagcaccctcccccgcagcggggtagggaagaaaactatcctgcgggttttaatttatttcatccagtttgttctccgggtgtggcctcagccctcagaacaatccgattcacgtagggaaatgttaaggacttctgcagctatgcgcaatgtggcattggggggccgggcaggtcctgcccatgtgtcccctcactctgtcagccagccgccctgggctgtctgtcaccagctatctgtcatctctctggggccctgggcctcagttcaacctggtggcaccagatgcaacctcactatggtatgctggccagcaccctctcctgggggtggcaggcacacagcagccccccagcactaaggccgtgtctctgaggacgtcatcggaggctgggcccctgggatgggaccagggatgggggatgggccagggtttacccagtgggacagaggagcaaggtttaaatttgttattgtgtattatgttgttcaaatgcattttgggggtttttaatctttgtgacaggaaagccctcccccttccccttctgtgtcacagttcttggtgactgtcccaccgggagcctccccctcagatgatctctccacggtagcacttgaccttttcgacgcttaacctttccgctgtcgccccaggccctccctgactccctgtgggggtggccatccctgggcccctccacgcctcctggccagacgctgccgctgccgctgcaccacggcgtttttttacaacattcaactttagtatttttactattataatataatatggaaccttccctccaaattcttcaataaaagttgcttttcaaa

SEQ ID NO: 8739 - protein, 118 aa, Homo sapiens [sequence omitted]

SEQ ID NO: 8740 - DNA, 2833 bp, Homo sapiens
ggctccaggaggccccagctccccatgccctgcagccctgcctgccaggcttttgttgaggcccgggctctgtcctgcagaacctgttctggggacttggcccaggaggtatttactgtgaagggggccagggtccagccacttggttagttccaggtcactgtgtttggggacgattctcctgcagatggggcctttgctttaaaagcacagtcgcctgtggtggaaggcgggagggtgggtctcgcctgggagggtgtgtcctccctttgcgaaggccctggtgctgggagcactgtcccctgctgaggtcccaactcaccctggaggacctgagcccaggccaccttgctcacctttcaaacactccttggcacctcaggggctgccggggcccagcctgatggtggcgtggcatgaggcagtgtggtgtggggcagtgtggtgtggggcagcgtggcatgggggcagtgtgatgtgggggtgtatggtgtggggcagtgtgatggggtgtgtggtgtggggcagtgtggtatcgggcggtgtggtatcaggcagcgtggtgtcgggcagtgtggtgtggggctacgggcggtgtggtatcaggcgacgtggtatcaagcagcgtggtgtcgggcagcgtggtgcggggctgccgtcctgcctgtggggccgcagttccagctccccttccttgcaggccctgaagtactctttccagacccacgaccgcctctgctttgtcatggagtacgccaacgggggcgaggtaggggctggggctgcgggggatggacttcgcggcctgtgggccgcccatggtggggccggtccttcccggagcctcggctactctccatggcaccagacggtgctccctgctgggtgggtggtgtgatgcctgcccaggcagctgcctgctgtggggtgacttgttcctgctgagttagggcttctgagactttccaggcccccgtgccctctggtggctggtcccttccctgtgcaatgccgagacccggtctgagaaaccccagccctgcaggccatgggggcagaggcccgagccacggctgtgcctcaggttgcgcctcccgcagctgttcttccacctgtcccgggagcgtgtgttctccgaggaccgggcccgcttctatggcgctgagattgtgtcagccctggactacctgcactcggagaagaacgtggtgtaccgggacctcaagctggagaacctcatgctggacaaggacgggcacattaagatcacagacttcgggctgtgcaaggaggggatcaaggacggtgccaccatgaagaccttttgcggcacacctgagtacctggcccccgaggtgctggaggacaatgactacggccgtgcagtggactggtgggggctgggcgtggtcatgtacgagatgatgtgcggtcgcctgcccttctacaaccaggaccatgagaagctttttgagctcatcctcatggaggagatccgcttcccgcgcacgcttggtcccgaggccaagtccttgctttcagggctgctcaagaaggaccccaagcagaggcttggcgggggctccgaggacgccaaggagatcatgcagcatcgcttctttgccggtatcgtgtggcagcacgtgtacgagaagaagctcagcccacccttcaagccccaggtcacgtcggagactgacaccaggtattttgatgaggagttcacggcccagatgatcaccatcacaccacctgaccaagatgacagcatggagtgtgtggacagcgagcgcaggccccacttcccccagttctcctactcggccagcggcacggcctgaggcggcggtggactgcgctggacgatagcttggagggatggagaggcggcctcgtgccatgatctgtatttaatggtttttatttctcgggtgcatttgagagaagccacgctgtcctctcgagcccagatggaaagacgtttttgtgctgtgggcagcaccctcccccgcagcggggtagggaagaaaactatcctgcgggttttaatttatttcatccagtttgttctccgggtgtggcctcagccctcagaacaatccgattcacgtagggaaatgttaaggacttctgcagctatgcgcaatgtggcattggggggccgggcaggtcctgcccatgtgtcccctcactctgtcagccagccgccctgggctgtctgtcaccagctatctgtcatctctctggggccctgggcctcagttcaacctggtggcaccagatgcaacctcactatggtatgctggccagcaccctctcctgggggtggcaggcacacagcagccccccagcactaaggccgtgtctctgaggacgtcatcggaggctgggcccctgggatgggaccagggatgggggatgggccagggtttacccagtgggacagaggagcaaggtttaaatttgttattgtgtattatgttgttcaaatgcattttgggggtttttaatctttgtgacaggaaagccctcccccttccccttctgtgtcacagttcttggtgactgtcccaccgggagcctccccctcagatgatctctccacggtagcacttgaccttttcgacgcttaacctttccgctgtcgccccaggccctccctgactccctgtgggggtggccatccctgggcccctccacgcctcctggccagacgctgccgctgccgctgcaccacggcgtttttttacaacattcaactttagtatttttactattataatataatatggaaccttccctccaaattcttcaataaaagttgcttttcaaa

SEQ ID NO: 8741 - protein, 200 aa, Homo sapiens
MLDKDGHIKITDFGLCKEGIKDGATMKTFCGTPEYLAPEVLEDNDYGRAVDWWGLGVVMYEMMCGRLPFYNQDHEKLFELILMEEIRFPRTLGPEAKSLLSGLLKKDPKQRLGGGSEDAKEIMQHRFFAGIVWQHVYEKKLSPPFKPQVTSETDTRYFDEEFTAQMITITPPDQDDSMECVDSERRPHFPQFSYSASGTA

SEQ ID NO: 8742 - DNA, 3492 bp, Homo sapiens
atggataaagtgtgctcaggtgagggttggctggtgggccgctgcagggcgggggcctgtccagtgctcccccacttacttgctgcctcccgactgctgtaattatgggtctgtaaccaccctggactgggtgctcctcactgacggacttgtctgaacctctctttgtctccagcgcccagcactgggcctggcaaaacctgagacgcccggtacatgttggccaaatgaatgaaccagattcagaccggcaggggcgctgtggtttaggaggggcctggggtttctcccaggaggtttttgggcttgcgctggagggctctggactcccgtttgcgccagtggcctgcatcctggtcctgtcttcctcatgtttgaatttctttgctttcctagtctggggagcagggaggagccctgtgccctgtcccaggatccatgggtaggaacaccatggacagggagagcaaacggggccatctgtcaccaggggcttagggaaggccgagccagcctgggtcaaagaagtcaaaggggctgcctggaggaggcagcctgtcagctggtgcatcaggttagggaggctgggaaggccttttggggatgggggtgatttgtccaacggctgggggaggtgggaatggggaggtgagcaaggcagcagctctcagggcctggctgttgcgggtggtggtggcaggggctggaggctctaagcctagaataaggagaggcccaggtccagggaactgtgttcaattacatggatttgacacttggcagccctgagtgttttggggagagggaaggcaggcgggcagatgggggtcagagagcttagagggatggcagcccacctgggaaggcaggtgcgggtggagcccccaggcacgtgcagtgggtctctggctcacccagggcgaggagctgcccttagccaggcgtggcctcacattcagcttcctttgcttctcccagaggctgtggccaggccagctgggctcggggagcgccagcctgagaggagcgcgtgagcgtcgcgggagcctcgggcaccatgagcgacgtggctattgtgaaggagggttggctgcacaaacgaggggagtacatcaagacctggcggccacgctacttcctcctcaagaatgatggcaccttcattggctacaaggagcggccgcaggatgtggaccaacgtgaggctcccctcaacaacttctctgtggcgcagtgccagctgatgaagacggagcggccccggcccaacaccttcatcatccgctgcctgcagtggaccactgtcatcgaacgcaccttccatgtggagactcctgaggagcgggaggagtggacaaccgccatccagactgtggctgacggcctcaagaagcaggaggaggaggagatggacttccggtcgggctcacccagtgacaactcaggggctgaagagatggaggtgtccctggccaagcccaagcaccgcgtgaccatgaacgagtttgagtacctgaagctgctgggcaagggcactttcggcaaggtgatcctggtgaaggagaaggccacaggccgctactacgccatgaagatcctcaagaaggaagtcatcgtggccaaggacgaggtggcccacacactcaccgagaaccgcgtcctgcagaactccaggcaccccttcctcacagccctgaagtactctttccagacccacgaccgcctctgctttgtcatggagtacgccaacgggggcgagctgttcttccacctgtcccgggagcgtgtgttctccgaggaccgggcccgcttctatggcgctgagattgtgtcagccctggactacctgcactcggagaagaacgtggtgtaccgggacctcaagctggagaacctcatgctggacaaggacgggcacattaagatcacagacttcgggctgtgcaaggaggggatcaaggacggtgccaccatgaagaccttttgcggcacacctgagtacctggcccccgaggtgctggaggacaatgactacggccgtgcagtggactggtgggggctgggcgtggtcatgtacgagatgatgtgcggtcgcctgcccttctacaaccaggaccatgagaagctttttgagctcatcctcatggaggagatccgcttcccgcgcacgcttggtcccgaggccaagtccttgctttcagggctgctcaagaaggaccccaagcagaggcttggcgggggctccgaggacgccaaggagatcatgcagcatcgcttctttgccggtatcgtgtggcagcacgtgtacgagaagaagctcagcccacccttcaagccccaggtcacgtcggagactgacaccaggtattttgatgaggagttcacggcccagatgatcaccatcacaccacctgaccaagatgacagcatggagtgtgtggacagcgagcgcaggccccacttcccccagttctcctactcggccagcggcacggcctgaggcggcggtggactgcgctggacgatagcttggagggatggagaggcggcctcgtgccatgatctgtatttaatggtttttatttctcgggtgcatttgagagaagccacgctgtcctctcgagcccagatggaaagacgtttttgtgctgtgggcagcaccctcccccgcagcggggtagggaagaaaactatcctgcgggttttaatttatttcatccagtttgttctccgggtgtggcctcagccctcagaacaatccgattcacgtagggaaatgttaaggacttctgcagctatgcgcaatgtggcattggggggccgggcaggtcctgcccatgtgtcccctcactctgtcagccagccgccctgggctgtctgtcaccagctatctgtcatctctctggggccctgggcctcagttcaacctggtggcaccagatgcaacctcactatggtatgctggccagcaccctctcctgggggtggcaggcacacagcagccccccagcactaaggccgtgtctctgaggacgtcatcggaggctgggcccctgggatgggaccagggatgggggatgggccagggtttacccagtgggacagaggagcaaggtttaaatttgttattgtgtattatgttgttcaaatgcattttgggggtttttaatctttgtgacaggaaagccctcccccttccccttctgtgtcacagttcttggtgactgtcccaccgggagcctccccctcagatgatctctccacggtagcacttgaccttttcgacgcttaacctttccgctgtcgccccaggccctccctgactccctgtgggggtggccatccctgggcccctccacgcctcctggccagacgctgccgctgccgctgcaccacggcgtttttttacaacattcaactttagtatttttactattataatataatatggaaccttccctccaaattcttcaataaaagttgcttttcaaa

SEQ ID NO: 8743 - protein, 480 aa, Homo sapiens [sequence omitted]

SEQ ID NO: 8744 - DNA, 4492 bp, Homo sapiens
gtgccccggggttggagaaagactcgccgcggccggccttcaagtttgtgggagggccccggaaggagacttcgtttcccacggacgaaaagttgtacgtggtggcggggtacccaggctagccacaaaggactgtgaccctcctgggccccggaactgcttcctgtcttgggtgggccctggaggtcctgcccgcccatcccagaggccaaggcttggagggcagctggggcttgccccttagattgagtatcctggggcgctagcgagcttggtcctgtcgggacggcctctgagtgctgccttggtcagcgggtgagcttgggcccctgctctgcagccagaggccgccccacattcactcctgggtctctcggccttgctccaggtggccacttcttgactgctttgagtccctcatccgagcgaagggcggacggagtccgttggtgggggtccggttgcctctcccgggagctgtgtagacttctcatacaccagggttctggaggcagatggaggagccctttcgaaaacagagtatttttttttaagttgtgacttaataatagtagcaagaatatgtgcttatggtaaaggcaggcggcaggtacggaggctgtgggaagtcggggtccctccgcccccacaggcagccctgtgctggcctggtgtatacgtttctgtgcagacgtacaccaccctgtgtgagcacagatgtatttttacacatggctctggacagctgtctgactctgtcagcagcaggccttggaggggctcaggcccgtgtgggggtggggggacatccagaggtctttgagtccagccctctgcctccaggccacgcccactcagtgtcgtcagagccccctgtgcctgaggcgtgcgcggctcggagccctgccctcggagtcctgcggtgccttcctcgagtctggcctgctttccatcctgctaagtacttggggcatttccctctttgggtaaggtgtggtcttccctgtcctggcattagacacaaggcagtgggccttcctgccattctaagtgtagcttaagacaatcagtgcaaagcaaccctttgtgggtgtccagcccttgcctcgggaggccagaaaggtggcctggggggagagcgtctaagctggctgtggaaagacccatgttgggatccattccacagaggtcgtcaggggtctctgcctggcctggaggtcccagagaggaccctcctcccctcaggaaggcccatctggaagggtagcagaggactgctcacaggaagagcatgcgaagtgctctttctggggatgcctgtagttggtgatgtgggaactgggttttgagggatgcctaggagttcatccatcagaggggaaatgaggaagccatgcaggatcaatggataaagtgtgctcaggtgagggttggctggtgggccgctgcagggcgggggcctgtccagtgctcccccacttacttgctgcctcccgactgctgtaattatgggtctgtaaccaccctggactgggtgctcctcactgacggacttgtctgaacctctctttgtctccagcgcccagcactgggcctggcaaaacctgagacgcccggtacatgttggccaaatgaatgaaccagattcagaccggcaggggcgctgtggtttaggaggggcctggggtttctcccaggaggtttttgggcttgcgctggagggctctggactcccgtttgcgccagtggcctgcatcctggtcctgtcttcctcatgtttgaatttctttgctttcctagtctggggagcagggaggagccctgtgccctgtcccaggatccatgggtaggaacaccatggacagggagagcaaacggggccatctgtcaccaggggcttagggaaggccgagccagcctgggtcaaagaagtcaaaggggctgcctggaggaggcagcctgtcagctggtgcatcagaggctgtggccaggccagctgggctcggggagcgccagcctgagaggagcgcgtgagcgtcgcgggagcctcgggcaccatgagcgacgtggctattgtgaaggagggttggctgcacaaacgaggggagtacatcaagacctggcggccacgctacttcctcctcaagaatgatggcaccttcattggctacaaggagcggccgcaggatgtggaccaacgtgaggctcccctcaacaacttctctgtggcgcagtgccagctgatgaagacggagcggccccggcccaacaccttcatcatccgctgcctgcagtggaccactgtcatcgaacgcaccttccatgtggagactcctgaggagcgggaggagtggacaaccgccatccagactgtggctgacggcctcaagaagcaggaggaggaggagatggacttccggtcgggctcacccagtgacaactcaggggctgaagagatggaggtgtccctggccaagcccaagcaccgcgtgaccatgaacgagtttgagtacctgaagctgctgggcaagggcactttcggcaaggtgatcctggtgaaggagaaggccacaggccgctactacgccatgaagatcctcaagaaggaagtcatcgtggccaaggacgaggtggcccacacactcaccgagaaccgcgtcctgcagaactccaggcaccccttcctcacagccctgaagtactctttccagacccacgaccgcctctgctttgtcatggagtacgccaacgggggcgagctgttcttccacctgtcccgggagcgtgtgttctccgaggaccgggcccgcttctatggcgctgagattgtgtcagccctggactacctgcactcggagaagaacgtggtgtaccgggacctcaagctggagaacctcatgctggacaaggacgggcacattaagatcacagacttcgggctgtgcaaggaggggatcaaggacggtgccaccatgaagaccttttgcggcacacctgagtacctggcccccgaggtgctggaggacaatgactacggccgtgcagtggactggtgggggctgggcgtggtcatgtacgagatgatgtgcggtcgcctgcccttctacaaccaggaccatgagaagctttttgagctcatcctcatggaggagatccgcttcccgcgcacgcttggtcccgaggccaagtccttgctttcagggctgctcaagaaggaccccaagcagaggcttggcgggggctccgaggacgccaaggagatcatgcagcatcgcttctttgccggtatcgtgtggcagcacgtgtacgagaagaagctcagcccacccttcaagccccaggtcacgtcggagactgacaccaggtattttgatgaggagttcacggcccagatgatcaccatcacaccacctgaccaagatgacagcatggagtgtgtggacagcgagcgcaggccccacttcccccagttctcctactcggccagcggcacggcctgaggcggcggtggactgcgctggacgatagcttggagggatggagaggcggcctcgtgccatgatctgtatttaatggtttttatttctcgggtgcatttgagagaagccacgctgtcctctcgagcccagatggaaagacgtttttgtgctgtgggcagcaccctcccccgcagcggggtagggaagaaaactatcctgcgggttttaatttatttcatccagtttgttctccgggtgtggcctcagccctcagaacaatccgattcacgtagggaaatgttaaggacttctgcagctatgcgcaatgtggcattggggggccgggcaggtcctgcccatgtgtcccctcactctgtcagccagccgccctgggctgtctgtcaccagctatctgtcatctctctggggccctgggcctcagttcaacctggtggcaccagatgcaacctcactatggtatgctggccagcaccctctcctgggggtggcaggcacacagcagccccccagcactaaggccgtgtctctgaggacgtcatcggaggctgggcccctgggatgggaccagggatgggggatgggccagggtttacccagtgggacagaggagcaaggtttaaatttgttattgtgtattatgttgttcaaatgcattttgggggtttttaatctttgtgacaggaaagccctcccccttccccttctgtgtcacagttcttggtgactgtcccaccgggagcctccccctcagatgatctctccacggtagcacttgaccttttcgacgcttaacctttccgctgtcgccccaggccctccctgactccctgtgggggtggccatccctgggcccctccacgcctcctggccagacgctgccgctgccgctgcaccacggcgtttttttacaacattcaactttagtatttttactattataatataatatggaaccttccctccaaattcttcaataaaagttgcttttcaaa

SEQ ID NO: 8745 - protein, 480 aa, Homo sapiens [sequence omitted]

SEQ ID NO: 8746 - DNA, 2858 bp, Homo sapiens
cggcaggaccgagcgcggcaggcggctggcccagcgcacgcagcgcggcccgaagacgggagcaggcggccgagcaccgagcgctgggcaccgggcaccgagcggcggcggcacgcgaggcccggccccgagcagcgcccccgcccgccgcggcctccagcccggccccgcccagcgccggcccgcggggatgcggagcggcgggcgccggaggccgcggcccggctaggcccgcgctcgcgcccggacgcggcggcccggggcttagggaaggccgagccagcctgggtcaaagaagtcaaaggggctgcctggaggaggcagcctgtcagctggtgcatcagaggctgtggccaggccagctgggctcggggagcgccagcctgagaggagcgcgtgagcgtcgcgggagcctcgggcaccatgagcgacgtggctattgtgaaggagggttggctgcacaaacgaggggagtacatcaagacctggcggccacgctacttcctcctcaagaatgatggcaccttcattggctacaaggagcggccgcaggatgtggaccaacgtgaggctcccctcaacaacttctctgtggcgcagtgccagctgatgaagacggagcggccccggcccaacaccttcatcatccgctgcctgcagtggaccactgtcatcgaacgcaccttccatgtggagactcctgaggagcgggaggagtggacaaccgccatccagactgtggctgacggcctcaagaagcaggaggaggaggagatggacttccggtcgggctcacccagtgacaactcaggggctgaagagatggaggtgtccctggccaagcccaagcaccgcgtgaccatgaacgagtttgagtacctgaagctgctgggcaagggcactttcggcaaggtgatcctggtgaaggagaaggccacaggccgctactacgccatgaagatcctcaagaaggaagtcatcgtggccaaggacgaggtggcccacacactcaccgagaaccgcgtcctgcagaactccaggcaccccttcctcacagccctgaagtactctttccagacccacgaccgcctctgctttgtcatggagtacgccaacgggggcgagctgttcttccacctgtcccgggagcgtgtgttctccgaggaccgggcccgcttctatggcgctgagattgtgtcagccctggactacctgcactcggagaagaacgtggtgtaccgggacctcaagctggagaacctcatgctggacaaggacgggcacattaagatcacagacttcgggctgtgcaaggaggggatcaaggacggtgccaccatgaagaccttttgcggcacacctgagtacctggcccccgaggtgctggaggacaatgactacggccgtgcagtggactggtgggggctgggcgtggtcatgtacgagatgatgtgcggtcgcctgcccttctacaaccaggaccatgagaagctttttgagctcatcctcatggaggagatccgcttcccgcgcacgcttggtcccgaggccaagtccttgctttcagggctgctcaagaaggaccccaagcagaggcttggcgggggctccgaggacgccaaggagatcatgcagcatcgcttctttgccggtatcgtgtggcagcacgtgtacgagaagaagctcagcccacccttcaagccccaggtcacgtcggagactgacaccaggtattttgatgaggagttcacggcccagatgatcaccatcacaccacctgaccaagatgacagcatggagtgtgtggacagcgagcgcaggccccacttcccccagttctcctactcggccagcggcacggcctgaggcggcggtggactgcgctggacgatagcttggagggatggagaggcggcctcgtgccatgatctgtatttaatggtttttatttctcgggtgcatttgagagaagccacgctgtcctctcgagcccagatggaaagacgtttttgtgctgtgggcagcaccctcccccgcagcggggtagggaagaaaactatcctgcgggttttaatttatttcatccagtttgttctccgggtgtggcctcagccctcagaacaatccgattcacgtagggaaatgttaaggacttctgcagctatgcgcaatgtggcattggggggccgggcaggtcctgcccatgtgtcccctcactctgtcagccagccgccctgggctgtctgtcaccagctatctgtcatctctctggggccctgggcctcagttcaacctggtggcaccagatgcaacctcactatggtatgctggccagcaccctctcctgggggtggcaggcacacagcagccccccagcactaaggccgtgtctctgaggacgtcatcggaggctgggcccctgggatgggaccagggatgggggatgggccagggtttacccagtgggacagaggagcaaggtttaaatttgttattgtgtattatgttgttcaaatgcattttgggggtttttaatctttgtgacaggaaagccctcccccttccccttctgtgtcacagttcttggtgactgtcccaccgggagcctccccctcagatgatctctccacggtagcacttgaccttttcgacgcttaacctttccgctgtcgccccaggccctccctgactccctgtgggggtggccatccctgggcccctccacgcctcctggccagacgctgccgctgccgctgcaccacggcgtttttttacaacattcaactttagtatttttactattataatataatatggaaccttccctccaaattcttcaataaaagttgcttttcaaa

SEQ ID NO: 8747 - protein, 480 aa, Homo sapiens [sequence omitted]

SEQ ID NO: 8748 - DNA, 2780 bp, Homo sapiens
cggcggcggcaggaccgagcgcggcaggcggctggcccagcgcacgcagcgcggcccgaagacgggagcaggcggccgagcaccgagcgctgggcaccgggcaccgagcggcggcggcacgcgaggcccggccccgagcagcgcccccgcccgccgcggcctccagcccggccccgcccagcgccggcccgcggggatgcggagcggcgggcgccggaggccgcggcccggctaggcccgcgctcgcgcccggacgcggcggcccgaggctgtggccaggccagctgggctcggggagcgccagcctgagaggagcgcgtgagcgtcgcgggagcctcgggcaccatgagcgacgtggctattgtgaaggagggttggctgcacaaacgaggggagtacatcaagacctggcggccacgctacttcctcctcaagaatgatggcaccttcattggctacaaggagcggccgcaggatgtggaccaacgtgaggctcccctcaacaacttctctgtggcgcagtgccagctgatgaagacggagcggccccggcccaacaccttcatcatccgctgcctgcagtggaccactgtcatcgaacgcaccttccatgtggagactcctgaggagcgggaggagtggacaaccgccatccagactgtggctgacggcctcaagaagcaggaggaggaggagatggacttccggtcgggctcacccagtgacaactcaggggctgaagagatggaggtgtccctggccaagcccaagcaccgcgtgaccatgaacgagtttgagtacctgaagctgctgggcaagggcactttcggcaaggtgatcctggtgaaggagaaggccacaggccgctactacgccatgaagatcctcaagaaggaagtcatcgtggccaaggacgaggtggcccacacactcaccgagaaccgcgtcctgcagaactccaggcaccccttcctcacagccctgaagtactctttccagacccacgaccgcctctgctttgtcatggagtacgccaacgggggcgagctgttcttccacctgtcccgggagcgtgtgttctccgaggaccgggcccgcttctatggcgctgagattgtgtcagccctggactacctgcactcggagaagaacgtggtgtaccgggacctcaagctggagaacctcatgctggacaaggacgggcacattaagatcacagacttcgggctgtgcaaggaggggatcaaggacggtgccaccatgaagaccttttgcggcacacctgagtacctggcccccgaggtgctggaggacaatgactacggccgtgcagtggactggtgggggctgggcgtggtcatgtacgagatgatgtgcggtcgcctgcccttctacaaccaggaccatgagaagctttttgagctcatcctcatggaggagatccgcttcccgcgcacgcttggtcccgaggccaagtccttgctttcagggctgctcaagaaggaccccaagcagaggcttggcgggggctccgaggacgccaaggagatcatgcagcatcgcttctttgccggtatcgtgtggcagcacgtgtacgagaagaagctcagcccacccttcaagccccaggtcacgtcggagactgacaccaggtattttgatgaggagttcacggcccagatgatcaccatcacaccacctgaccaagatgacagcatggagtgtgtggacagcgagcgcaggccccacttcccccagttctcctactcggccagcggcacggcctgaggcggcggtggactgcgctggacgatagcttggagggatggagaggcggcctcgtgccatgatctgtatttaatggtttttatttctcgggtgcatttgagagaagccacgctgtcctctcgagcccagatggaaagacgtttttgtgctgtgggcagcaccctcccccgcagcggggtagggaagaaaactatcctgcgggttttaatttatttcatccagtttgttctccgggtgtggcctcagccctcagaacaatccgattcacgtagggaaatgttaaggacttctgcagctatgcgcaatgtggcattggggggccgggcaggtcctgcccatgtgtcccctcactctgtcagccagccgccctgggctgtctgtcaccagctatctgtcatctctctggggccctgggcctcagttcaacctggtggcaccagatgcaacctcactatggtatgctggccagcaccctctcctgggggtggcaggcacacagcagccccccagcactaaggccgtgtctctgaggacgtcatcggaggctgggcccctgggatgggaccagggatgggggatgggccagggtttacccagtgggacagaggagcaaggtttaaatttgttattgtgtattatgttgttcaaatgcattttgggggtttttaatctttgtgacaggaaagccctcccccttccccttctgtgtcacagttcttggtgactgtcccaccgggagcctccccctcagatgatctctccacggtagcacttgaccttttcgacgcttaacctttccgctgtcgccccaggccctccctgactccctgtgggggtggccatccctgggcccctccacgcctcctggccagacgctgccgctgccgctgcaccacggcgtttttttacaacattcaactttagtatttttactattataatataatatggaaccttccctccaaattcttcaataaaagttgcttttcaaa

SEQ ID NO: 8749 - protein, 480 aa, Homo sapiens [sequence omitted]

SEQ ID NO: 8750 - DNA, 953 bp, Homo sapiens
ggcagtgctctgagggcccaggtccctgtgtcaatctgtggggccctgtctcagtttcctggcagtatggcagcgtgctggccgtgctttaagaggttggcttcctactggagctgtgggtgggtggaggtggcagggaggtggggcaccggggtctgagctgtctacacccacagatgacagcatggagtgtgtggacagcgagcgcaggccccacttcccccagttctcctactcggccagcggcacggcctgaggcggcggtggactgcgctggacgatagcttggagggatggagaggcggcctcgtgccatgatctgtatttaatggtttttatttctcgggtgcatttgagagaagccacgctgtcctctcgagcccagatggaaagacgtttttgtgctgtgggcagcaccctcccccgcagcggggtagggaagaaaactatcctgcgggttttaatttatttcatccagtttgttctccgggtgtggcctcagccctcagaacaatccgattcacgtagggaaatgttaaggacttctgcagctatgcgcaatgtggcattggggggccgggcaggtcctgcccatgtgtcccctcactctgtcagccagccgccctgggctgtctgtcaccagctatctgtcatctctctggggccctgggcctcagttcaacctggtggcaccagatgcaacctcactatggtatgctggccagcaccctctcctgggggtggcaggcacacagcagccccccagcactaaggccgtgtctctgaggacgtcatcggaggctgggcccctgggcccctccacgcctcctggccagacgctgccgctgccgctgcaccacggcgtttttttacaacattcaactttagtatttttactattataatataatatggaaccttccctccaaattcttcaataaaagttgcttttc

SEQ ID NO: 8751 - protein, 114 aa, Homo sapiens
MWHWGAGQVLPMCPLTLSASRPGLSVTSYLSSLWGPGPQFNLVAPDATSLWYAGQHPLLGVAGTQQPPSTKAVSLRTSSEAGPLGPSTPPGQTLPLPLHHGVFLQHSTLVFLLL

SEQ ID NO: 8752 - DNA, 985 bp, Homo sapiens
ggcagtgctctgagggcccaggtccctgtgtcaatctgtggggccctgtctcagtttcctggcagtatggcagcgtgctggccgtgctttaagaggttggcttcctactggagctgtgggtgggtggaggtggcagggaggtggggcaccggggtctgagctgtctacacccacagatgacagcatggagtgtgtggacagcgagcgcaggccccacttcccccagttctcctactcggccagcggcacggcctgaggcggcggtggactgcgctggacgatagcttggagggatggagaggcggcctcgtgccatgatctgtatttaatggtttttatttctcgggtgcatttgagagaagccacgctgtcctctcgagcccagatggaaagacgtttttgtgctgtgggcagcaccctcccccgcagcggggtagggaagaaaactatcctgcgggttttaatttatttcatccagtttgttctccgggtgtggcctcagccctcagaacaatccgattcacgtagggaaatgttaaggacttctgcagctatgcgcaatgtggcattggggggccgggcaggtcctgcccatgtgtcccctcactctgtcagccagccgccctgggctgtctgtcaccagctatctgtcatctctctggggccctgggcctcagttcaacctggtggcaccagatgcaacctcactatggtatgctggccagcaccctctcctgggggtggcaggcacacagcagccccccagcactaaggccgtgtctctgaggacgtcatcggaggctgggcccctgggatgggaccagggatgggggatgggccagggtttacccagtgggacagaggagcaaggtttaaatttgttattgtgtattatgttgttcaaatgcattttgggggtttttaatctttgtgacaggaaagccctcccccttccctccaaattcttcaataaaagttgcttttc

SEQ ID NO: 8753 - protein, 140 aa, Homo sapiens
MWHWGAGQVLPMCPLTLSASRPGLSVTSYLSSLWGPGPQFNLVAPDATSLWYAGQHPLLGVAGTQQPPSTKAVSLRTSSEAGPLGWDQGWGMGQGLPSGTEEQGLNLLLCIMLFKCILGVFNLCDRKALPLPSKFFNKSC

SEQ ID NO: 8754 - DNA, 7492 bp, Homo sapiens
ccaccaggggctggccttaggttccatccccatgtgctgcatcggcccctcccctccaagtagctctgccctcctttctttgaggcctgcggtcctccgactcccttgaacttgctggacccccaggttctggtccagggtctgggaggaggttaaatgcagggaatccgtccccaggctgggcagggaaggactcccacccttggtgcctgcacgtataaggggaggtggggtcagtctggcaccctggctgctaggtggtctgtggccagcaaaccgtgccctgaagcttctagttgggaggggcagaggccttgccctgcaaagccccaggctgaggggctggggttggggtggggtttaccaggacctggttcctgtaagccgaggtctccttccctggctcttccagcctcaagccagcagtagcagggcagcctgatagagtagggcaccccaggggtgaggggagaccaggaaggcagacacccctgtctcctgacagcctcgtaaccatgcaggagactcactgtgacttgtcccacaccctccccagtgtctcctcggttggggctgggggcttcagggatcagggagaggctgggtgccagcagcgtgcctggtggcacctgggacagggccttgctgggggtgggtgctgtgggtgtgctcgccaggccgaggcattgggaaggaacgaggtggggagctctctggagaggcacacgggtgggtaccagctggaggtgttgcctgagcagctggcaaggctggggccttcagattaggccataggtgagtggcctggagcgcctggccaaggagcagagctgggcaggggccaggggctgtgctgggcctctgtccggggcttttctccggggaacggttccggggcagtgggctcgagactctggccctggggattgcatactggggcagatcggaccatccaggagcgagtgggaggtgggtgtgccggggcttcacaccggtttccacttctctggcctgtgttgacacaggccaccctccccaccaggctggtcccgagccccctcctggcccccaggcctggaagacagcttccttgctgcctggccaggcccccttgtggttgccagggcctcgatgctggaatgtcagaggccccccactggcccctcagcctcctcctgctttgcacaggctgggccagagcctgccacggagccccagcggctacacactccactcactcacacctctcagggccccgcacgttcccacagccctcagggtgtacgtgctgtaggtgtggctgtgccccaggtatgtgttccccaggtgtgcttgtgccccaggtgtggctgtgccccaggtgtgcgtgtgccccaggtgttcgtgtgccccagatgtggctaggtgtctagatgtgttctagatgtctgtgtattccagtgtggctgtgtcccaggtgtgcgtgtgccccaggtgtgtgcctcaggtgtgcgtgtgccccaggtgtggctttgcctccagtgtgtgtgtgccccagatgtatgtgtgccccaggtgtggctgtgccccaggtgtgcctgtgccccaggtgtggctgtgccccaggtgtgcctgtgccccaggtgtgggtgtgccccaggtgtgggtgtgctccaggtggctgtatttcccaggtactcagggtgaggttgggaaaaaagcaggacatttctacactaggtgggacaagcaggtttctggggtgcccccctcatgccagcccctctgtgggatctccatacccctcatcctctgaggcctggcgcacggcggggctcagagactgaaggaaggactgtaggagtggacgatggtgggggtttgacctgacgccgggccagatgccctgtgtggctgcctcagcctggagtagagtgtctgagctggaacaggggtcctagccccactctgtgaggcgagaaactgaggcttggagagaggaagagatggggcttcccaggacctggtgggtggtatgcaaggggagctggctggtgcagcgggggctgtggtgagggccctgggaggggcagggggatgcacgcagacagaggctctgcctgcccgcagagtgccagctgatgaagacggagcggccccggcccaacaccttcatcatccgctgcctgcagtggaccactgtcatcgaacgcaccttccatgtggagactcctgaggagcggtacgtgggctgtggcggccaggccaggcacttgggcagccccagcgcttaggagggacacggggatggcggggtgctggcacctctgcctgtagccatcctcactccccagtgctcccaggccctcctcagagcccagtttggaaactggcccagtcctgcctgtggggtttgggtggggaaactgaggctggagataaaaactggctagggaccgggtgcagtggctcacgtctataatctcggcactttgggaggccgaggtgcgcagatcacttgagaccaggagtttgagactagcctgccaacatggtgaaacccccgtctctactaaaaatataaaacttagctgggtgtggtggtgcacacctgtaatcccggctacttgggaggctgaggcacaagaatcgcttgaacccgagaggcagaggctgcaggagccgagattttaccactgcactccagccagggcgatagagcaagactccgtctcaaaaaaagaaaaacccggtggagagggccagtcctccttggggggcggagtcctgcttgggaggcggagtcctgcttggggggggcggagtcctgctggggggcggagtcctgctgggggttggagtccggttgtggggacagagtcctgctggggggctaagcctgggtgtcccccacgtccaagagggcttcgtgaccctgagtgtatgtggccagaccaggtcaagtggtggcctcctcagggctgtctctgggaaccccgacagctgtggaaccacgcttgtgaggctggcgggtgggtgaaagacgtggggtggagctcctgatctggtacaggcctgcagcctcacctgacctcctgcagggaggagtggacaaccgccatccagactgtggctgacggcctcaagaagcaggaggaggaggagatggacttccggtcgggctcacccagtgacaactcaggggctgaagagatggaggtgtccctggccaagcccaagcaccgcgtggtgaggcctgtccccacttctgcctgtgcctggggctgccttggactgtggagggctgggtgggtcatggggtcccagctcggcccaggagacactcagcactccacggcatctccacctaggccggttttccatgtagggcgcagctgcttcccaggtgggtcctcttccccatgtcagaggaaaactggggttgctgagccctgccaggcttgggcaatgttaccccacccttccctgaaccccatgctctgagctggggccgcagccatgtgttccctgtaagcctggactccccgctgagcccagtaggccaccaggtgtgaagtggacgcctctcctggctctgcctccgactctggggcccctcatgccaccccacgcatgccgaccagctgggcactgttggcagcgccgcttgctgaccctggtgcctgcccatagaccatgaacgagtttgagtacctgaagctgctgggcaagggcactttcggcaaggtgatcctggtgaaggagaaggccacaggccgctactacgccatgaagatcctcaagaaggaagtcatcgtggccaaggtggggccggggcggtggggcagggtggagatgagggtgcggggtggcagctcacccagccctgctttacaggacgaggtggcccacacactcaccgagaaccgcgtcctgcagaactccaggcaccccttcctcacagtgagtgggagcccagatggggctgaagggctggggccaggtagcgactcctggggctgtctctaggggacgatgtcctgtcttcttgggcacgtgagggctttacacaccgtggactccgccgctggtgagacaggcctgccctggagggtcaggctgtggaggtgcccagtgtgggctaggggctgtgctcgctgctcccgtgtgcgggcaggtgggtggggcaggtggccctggtcttccttgcactctgccgaggctccaggaggccccagctccccatgccctgcagccctgcctgccaggcttttgttgaggcccgggctctgtcctgcagaacctgttctggggacttggcccaggaggtatttactgtgaagggggccagggtccagccacttggttagttccaggtcactgtgtttggggacgattctcctgcagatggggcctttgctttaaaagcacagtcgcctgtggtggaaggcgggagggtgggtctcgcctgggagggtgtgtcctccctttgcgaaggccctggtgctgggagcactgtcccctgctgaggtcccaactcaccctggaggacctgagcccaggccaccttgctcacctttcaaacactccttggcacctcaggggctgccggggcccagcctgatggtggcgtggcatgaggcagtgtggtgtggggcagtgtggtgtggggcagcgtggcatgggggcagtgtgatgtgggggtgtatggtgtggggcagtgtgatggggtgtgtggtgtggggcagtgtggtatcgggcggtgtggtatcaggcagcgtggtgtcgggcagtgtggtgtggggctacgggcggtgtggtatcaggcgacgtggtatcaagcagcgtggtgtcgggcagcgtggtgcggggctgccgtcctgcctgtggggccgcagttccagctccccttccttgcaggccctgaagtactctttccagacccacgaccgcctctgctttgtcatggagtacgccaacgggggcgaggtaggggctggggctgcgggggatggacttcgcggcctgtgggccgcccatggtggggccggtccttcccggagcctcggctactctccatggcaccagacggtgctccctgctgggtgggtggtgtgatgcctgcccaggcagctgcctgctgtggggtgacttgttcctgctgagttagggcttctgagactttccaggcccccgtgccctctggtggctggtcccttccctgtgcaatgccgagacccggtctgagaaaccccagccctgcaggccatgggggcagaggcccgagccacggctgtgcctcaggttgcgcctcccgcagctgttcttccacctgtcccgggagcgtgtgttctccgaggaccgggcccgcttctatggcgctgagattgtgtcagccctggactacctgcactcggagaagaacgtggtgtaccgggacctcaagctggagaacctcatgctggacaaggacgggcacattaagatcacagacttcgggctgtgcaaggaggggatcaaggacggtgccaccatgaagaccttttgcggcacacctgagtacctggcccccgaggtgtgcgccccacctgcgtgcatacgcgttgctgcgtccccacgtcctgagcacacgcaatgctgtgtcctctctgtgccccaagcacgtcacacctcccccggcagtgtcccggacaccccttgatgccgagtcctgcccatctgccacccgtgcaggtgctggaggacaatgactacggccgtgcagtggactggtgggggctgggcgtggtcatgtacgagatgatgtgcggtcgcctgcccttctacaaccaggaccatgagaagctttttgagctcatcctcatggaggagatccgcttcccgcgcacgcttggtcccgaggccaagtccttgctttcagggctgctcaagaaggaccccaagcagaggcttggcgggggctccgaggacgccaaggagatcatgcagcatcgcttctttgccggtatcgtgtggcagcacgtgtacgagaagaaggtgcggctgctccccgcatattcacgcgcacgcatgctccccacatatccacactcacgcatgcacgtggcacgctcgccagatttcccacacactcgccctcacctcaggagcctgctgcagtcctggtacaaggagggccttgctgcaccaacctcagcgcctggtgctcagaggctctggcactgccgggttccaccaggaaactggcctggtcctcatttcctcctcccctcggaggtgtgtcacactctgagtttcctcctcccctcggaggtgtgtcacactctgagtgccagccttggggttcccttccctgacgctgtgcagtgaaggctggctggtggtggaccaggggtgctgccccttggcctccacgagttcctcctgtttgacctcaatcccttctgccgcaaggagagcccagccctatttctggctgtgcagggacagggacagcacctacttttctggcacatgggggagtccgccctggagggaggcagctctttctgcatgagtcgccatcctgggtgctcatctttcagggaccctaggagccctggccatcaccccagctgatggggtctgccagctgggttcggaagcctgcactctgagatgctgggtgccctgtcaccaggtgtgcttctgccccgttcccagcctgcccctcccctgaatgcctgtcctaggctgtgtgcagctggtcgggctgggcagccctgggacccagctgggcacctgttctcccattaacacagggtgccctggtcctggtccccgttcctgccttgaggcctgccaccctcctgccctgccctccaagggtatggggggcctgggcagtgctcaacctctgcccagccttgaccagagaccttgctaattgacaatggacaatgctggtgcccagcccagactctggggtggggcagtgcttgagggggtccttgactgtgggacctgaggggctctctggcagctcctcacgtgtgcacatcaccttatagtcacccttcatcctgggtcattgagagtcctgtctgcagccagatgccagcaggctgtggtcctgtagtccctgagccatggaggcagggtgggctcatcctgtgcaccttgttccacagtctccctctttcccaatttacaagaagaccaataagaaaaataagaaaacaagaaagaaaaaggaaaaataaagttatcacctcctggtagcagggagggtctctcagagctgggctgcactacctcctgtcgcctgctggggctgctgtgagggcagctttgcgtctcagctgttgagggttgtctccgtgctcctgcacccctcatgtccctccctcccagagctgcctctgtggggggctggtggcttgctgctctctgacatcagtcctgcctggagaccccttggagatccaggtgctttgaaggtcttgagcacacttgagggtgtgctgggagtggg

SEQ ID NO: 8755 - protein, 244 aa, Homo sapiens
MLCPLCAPSTSHLPRQCPGHPLMPSPAHLPPVQVLEDNDYGRAVDWWGLGVVMYEMMCGRLPFYNQDHEKLFELILMEEIRFPRTLGPEAKSLLSGLLKKDPKQRLGGGSEDAKEIMQHRFFAGIVWQHVYEKKVRLLPAYSRARMLPTYPHSRMHVARSPDFPHTRPHLRSLLQSWYKEGLAAPTSAPGAQRLWHCRVPPGNWPGPHFLLPSEVCHTLSFLLPSEVCHTLSASLGVPFPDAVQ

SEQ ID NO: 8756 - DNA, 592 bp, Homo sapiens
actccccgctgagcccagtaggccaccaggtgtgaagtggacgcctctcctggctctgcctccgactctggggcccctcatgccaccccacgcatgccgaccagctgggcactgttggcagcgccgcttgctgaccctggtgcctgcccatagaccatgaacgagtttgagtacctgaagctgctgggcaagggcactttcggcaaggtgatcctggtgaaggagaaggccacaggccgctactacgccatgaagatcctcaagaaggaagtcatcgtggccaaggacgaggtggcccacacactcaccgagaaccgcgtcctgcagaactccaggcaccccttcctcacagtgagtgggagcccagatggggctgaagggctggggccaggtagcgactcctggggctgtctctaggggacgatgtcctgtcttcttgggcacgtgagggctttacacaccgtggactccgccgctggtgagacaggcctgccctggagggtcaggctgtggaggtgcccagtgtgggctaggggctgtgctcgctgctcccgtgtgcgggcaggtgggtggggcaggtggccctggtctt

SEQ ID NO: 8757 - protein, 86 aa, Homo sapiens [sequence omitted]

SEQ ID NO: 8758 - DNA, 416 bp, Homo sapiens
cggcaggaccgagcgcggcaggcggctggcccagcgcacgcagcgcggcccgaagacgggagcaggcggccgagcaccgagcgctgggcaccgggcaccgagcggcggcggcacgcgaggcccggccccgagcagcgcccccgcccgccgcggcctccagcccggccccgcccagcgccggcccgcggggatgcggagcggcgggcgccggaggccgcggcccggctaggcccgcgctcgcgcccggacgcggcggcccgtctggggagcagggaggagccctgtgccctgtcccaggatccatgggtaggaacaccatggacagggagagcaaacggggccatctgtcaccaggggcttagggaaggccgagccagcctgggtcaaagaagtcaaaggggctgcctggaggaggc

SEQ ID NO: 8759 - protein, 137 aa, Homo sapiens
RQDRARQAAGPAHAARPEDGSRRPSTERWAPGTERRRHARPGPEQRPRPPRPPARPRPAPARGDAERRAPEAAARLGPRSRPDAAARLGSREEPCALSQDPWVGTPWTGRANGAICHQGLREGRASLGQRSQRGCLE

SEQ ID NO: 8760 - DNA, 783 bp, Homo sapiens
ccagtgctgggcgctggagacaaagagaggttcagacaagtccgtcagtgaggagcacccagtccagggtggttacagacccataattacagcagtcgggaggcagcaagtaagtgggggagcactggacaggcccccgccctgcagcggcccaccagccaaccctcacctgagcacactttatccattgatcctgcatggcttcctcatttcccctctgatggatgaactcctaggcatccctcaaaacccagttcccacatcaccaactacaggcatccccagaaagagcacttcgcatgctcttcctgtgagcagtcctctgctacccttccagatgggccttcctgaggggaggagggtcctctctgggacctccaggccaggcagagacccctgacgacctctgtggaatggatcccaacatgggtctttccacagccagcttagacgctctccccccaggccacctttctggcctcccgaggcaagggctggacacccacaaagggttgctttgcactgattgtcttaagctacacttagaatggcaggaaggcccactgccttgtgtctaatgccaggacagggaagaccacaccttacccaaagagggaaatgccccaagtacttagcaggatggaaagcaggccagactcgaggaaggcaccgcaggactccgagggcagggctccgagccgcgcacgcctcaggcacagggggctctgacgacactgagtgggcgtggcaacttttcgtccgtgggaaacgaagtctccttcc

SEQ ID NO: 8761 - protein, 77 aa, Homo sapiens
MAGRPTALCLMPGQGRPHLTQRGKCPKYLAGWKAGQTRGRHRRTPRAGLRAAHASGTGGSDDTEWAWQLFVRGKRSL

SEQ ID NO: 8762 - DNA, 6710 bp, Homo sapiens
gtgggctcggcccgggctgccacgagcgtgcgggcctcgccgggcatgtcctaggcggcggccccgcccagcgctcggccgggcgggcgggcgggcgcgagggcagggaccgagccgggccgagctggggaacaagccggggaccaagccggggaccaagccggggactaaggcgagccggagaccgagcccgaacagcagggccagacgggcccagccagcaccaagatgagtgccacgtcctggttcctggtgagcagcagcggcgcccgccaccggctccctcgggagctcatcttcgtggggcgtgaggagtgtgagctcatgctacagtcccgcagcgtggacaagcagcatgccgtcatcaactacgaccaggacagggacgagcactgggtgaaggacctgggcagcctcaatgggacgtttgtgaatgacatgcgcatcccggaccagaagtacgtcacgctgaagctcaacgatgtcatccgcttcggctacgattccaacatgtatgtgctggagcgtgtgcagcaccgagtcccggaggaggcactcaagcatgaaaagtacaccagccagctgcaggtgagcgtgaagggtttggcgcccaagaggagcgaggcactgccggaacacacaccatactgcgaggcctcgaaccccaggccggagaagggggaccggagaccaggaacagaggcagcctcttaccgcacacccctgtatgggcagccctcctggtggggtgaggacgatggtagcacgctgcctgacgcccagcgccagggagagccctacccagagcgccccaagggaccagtgcagcaggacggggagctccacggcttccgcgcccctgctgagcctcagggctgctcgttccggcgggagcccagctacttcgagatccccacgaaggagaccccgcagccgtcgcagccccccgaggtgccggcacacgagatgcccacgaaggatgcagaggcaggtgggggcggagcggcccctgtggtgcagagccacgcctccttcaccatcgagtttgatgactgcagccctggcaagatgaagatcaaggaccatatcaccaagttttccctgcgccagcggcggcccccgggcaaggaggccacacctggcgagatggtgtcggctgagaccaaggtggccgactggctggtgcagaatgacccgagcctgctgcaccgggttggccctggggatgaccgccacagcaccaagagcgacctgcctgtccacacccgcaccctgaagggccacaagcacgaggacggcacgcagagtgactcagaggaccccctggccaaggcggcctcggccgctggggtgcccttggaggccagcggggagcaggtgcggctgcagaggcagatcaagcgggacccccaggagctactacataaccagcaggcctttgtcatcgagttcttcgacgaggacacaccccgaaagaagcgctcccagtccttcacgcacagcccgtccggggaccccaaggccgacaagcgccgtggcccaacgccggccgatagggaccgccccagtgtcccagccccagtccaggcagggggccgcagctcggggccacagagggccggctcgctcaagcgggagaagacagaggaacggctgggcagcccctcgcccgcctcccgaacccctgcccgccccttcggaagcgtggggcgccgctcccgcctggcccaggacttcatggcccagtgtctgcgggagagctccccggccgcccggcccagccccgagaaggttcctccggtgctgcccgctcccctgacaccccatgggaccagccccgtgggccccccgaccccaccgcccgcccccacggacccccagctgaccaaggcacggaaacaggaggaggacgacagcctcagtgacgcagggacatacaccatcgagaccgaggcgcaggacacggaggtggaggaggcccggaagatgatcgaccaggtctttggggtgttggagtcccctgaactctccagggcatcttcggccacctttcgcccagtcatcagaggggacagagatgagtctgatgacgggggcgtggcccagcggatggcgctactgcaggagtttgcctcccggccactgggtgcggccccccaggcggagcaccagggcctcccggtgccgggctcccctgggggtcagaagtgggtgtcccgctgggccagcctggctgacagctactcagacccgggcctcacagaggatggcctgggacgtagaggcggggagccggaggggtccctgcctgtgcgcatgcggcgacggctccctcagctgcccagtgagagggctgacagccctgcgggcccagagagcagcaggaggagtgggcctgggccaccggagctggacagtgagcagcccagccgcctcttcggccaggaggagttggatcctgacagcctcagcgatgccagtgggtcggacgggggccgaggccccgagccaggggtggagccacaggacagcagacgcaggagcccccaggaggggcccacgtggagcaggggtcggcgctcaccaagggcccccggggagccaactcccgcctctttcttcattggggaccagaatggggacgctgtgttatctaggaaaccgcttgcggctccaggggatggggagggcctagggcagacagcccagcccagccccccagcacgggatggcgtctatgtcagtgccaatgggagaatggtcatccagctacggcctggacggtccccagaacccgacggccctgccccagcctttctccggcaagagagcttcactaaggagccagccagtggtcccccagcgcccggcaagcccccccacatctccagccacccgcttctacaggacctggccgctacccgggccgcacgcatggacttccactcccaggacacccacctgatcttgaaggagacggagacggccctggcggccctggaggcccgactcctctctaattctgtggatgccgagtgtgaggggggcagcaccccgaggccgccggaggacgccctgtctggggactcggacgtggacacagccagcaccgtcagcctgcgtagtggcaagagcgggcccagccccacaaccccccagcctctgcgggcacagaaggagatgtcgccatccccgccagctgcacaggacccgggaggcaccgccctggtcagtgcccgtgagcagtcctcagagaggcagcatcacccacttggcccgacggacatgggccgtggagagccggtacggcgctcagccataaggcgtggccacaggccccgagggtccctggattggcccagtgaggagcgtggccctgtcctcgcccacctacccagctcagatgtgatggcctccaaccacgaaacccctgaggccaccggggcaggacggctaggttctcgccggaaaccagcggccccaccgccatccccagctgcccgggaggagcagagccgtagctcagccagctcccagaaggggccgcaggccttgacccgctccaacagcctgtccacccctcgccccacacgggcctcccggctgaggcgggcccggctgggggacgcttcagacactgaggctgcggatggtgagcgggggtccctgggcaaccctgagcccgtgggccggccagctgctgagcaggccaagaagctgtcacgcctggacatcctggccatgccccggaagcgggccggctccttcacagggactagtgaccccgaggcagcccctgcccgcaccagcttctctggccgcagtgtggagttgtgctgtgccagccgcaagcccaccatggccgaagcacgggctgtctccaggaaggctgccaacacagccaccaccacgggtccccgccagcccttcagcagggcccgctcaggcagtgcccgatacacctccaccactcagaccccgagggctggcagctccagccgggctcgttcccgggcccccggcccccgggacacggacgacgatgaggaggagcctgacccttatggtttcatcgtgcagacggcagagattgcggagattgccaggctgagccagacgctggtgaaggacgtggccatcctagcccaggagatccacgatgtggctggggacggtgacacactgggctcctcggagcctgcccacagcgcctccctcagcaacatgcccagcacccccgcctcgaccatctctgcccgggaggagctggtgcagcgcatccccgaggccagcctcaacttccagaaggtgccgcccggctcgctgaactctcgggactttgaccagaacatgaacgacagctgtgaggacgccctggccaacaagacgcggcctcggaaccgagaggaggcacggtgatcttcgataacctgatgctgaacccggtgtcccagctgtcgcaggccatccgtgagaacacagagcaccttgccgagaagatgaagatcctctttcagaacacagggagagcttgggaggacctggaagccaggatcaacgccgagaacgaggtgcccatcctgaagacatctaacaaggaaatcagctccatcctgaaggaactgaggcgggtgcagaaacagctggaagttatcaatgccatcgtggaccccagtgggagcctggacctgctcacaggaaacaggagcttggccagctctgcacagccggggctggggaagggccgcgtggctgcccagagcccaccctcacccgcctcagccgaggccctgctgccagccctgcccctgaggaatttcccacagcgggccagctgtgggcctcccagcctcccggaccccaccttcctccctgatgccgagaggttcctgatctaggccccagacctggccaggccagcctccctgtgcgtgtgcgtctctgccttccgtccgccgcacacccgcctgcctggccgcaggtggttctccctgaagacccccacatgtgccatatccctgtgggcgggtgcctcccacgcccttgccccctcgtcagctcccagccagcaccctactcaccctgtccagccccatggccacccccacccctgcctcgccccctacaggcctctgggcccagctcctggccaggctgctgccaaggtcaagccctcaagggcattaccccgcctcctcttcatcactgttatttttgtctttagctttaaaggaaagagttgttggtgccattgcaggtgccccctccaggcctgactggctccgccaggcactaacctgccataaccctttgtgctggcctgcggccaggcagaggaagagaggtcgactgtggggtcatttggtgccaaacatggaggtgggcaggctcacctgttcctgggactgtctgagatggcagggcacttgccctggtggctcccacctgaccccaggccttttataggcaggagccccactgcttccagcctctggtgccaacacagttgccaaacccattgagcttggggctgccctgtggaggcctcctgggtatggaccaggggcttgttgagagctgagccatgcacacaggtgcagacaccccccaactcccatgcacacggctagtccaggcgcctccacgctgcaccgtgaggactgcagggcatgtccccgtgaggggctatgggcctctgtaggtgggcttccaaggtcctgggtgcagccgggtgcatggcagcccttctggcgggggtgagcgcacgaccaaagtcactggaagccgggtttccggaagctcgcagcttggcctgcaccacacgccctccccttttggcttcacgccatcaggcctcaagtgggcatgggggcagggacgggcccaggaactgttgttttctcaggattctttcagctgggaacatggcaggtgagcagagcttggtgcctctgccgtggcccctgctggggcagcccgtgttgccggagcctctaagccaaagagcccgttggccgtggttggtgggggtggacgtgggggtgtcccacctggaccagactggcgtgggtgagctccacaccctgcctggcaatggtatgagagtcggacctggacagggccagctgctgggggagcggcactggggactggaggctggaagcgggtggtgtgtgtcccctgtttacttttagctgagctggggttgggtgtacgggttctgttcctctgagcctgcggcccacctgatgtttacgtgtgtgtgtgagggggggcgggggtggcaggtgtccccccctggtccccgccccaagagcctgctgtctgtatggaggaggtgctagcccggtccaccgggctgctgcccacccctgcatgccccagttgcccaccccgcctgcccctggacatgaagtggtcacgcttcatccacggctccttcccacccctcggcagtggctgtgcaatgttttaagttcacaagttcctgctcctccccacactgagctcctttgttcctccccctccagcctttgcctgggaactggtccttgtttgccgggcttctcggagggttcactgtacattcgttctcaggtggtcttgtggctgtctttcggaaaatggttattttatatgatttgtcatggaatttgttctaataaatcattcttctatcacatggcagcacgctggagcctgtcaccttg

SEQ ID NO: 8763 - protein, 1396 aa, Homo sapiens
MSATSWFLVSSSGARHRLPRELIFVGREECELMLQSRSVDKQHAVINYDQDRDEHWVKDLGSLNGTFVNDMRIPDQKYVTLKLNDVIRFGYDSNMYVLERVQHRVPEEALKHEKYTSQLQVSVKGLAPKRSEALPEHTPYCEASNPRPEKGDRRPGTEAASYRTPLYGQPSWWGEDDGSTLPDAQRQGEPYPERPKGPVQQDGELHGFRAPAEPQGCSFRREPSYFEIPTKETPQPSQPPEVPAHEMPTKDAEAGGGGAAPVVQSHASFTIEFDDCSPGKMKIKDHITKFSLRQRRPPGKEATPGEMVSAETKVADWLVQNDPSLLHRVGPGDDRHSTKSDLPVHTRTLKGHKHEDGTQSDSEDPLAKAASAAGVPLEASGEQVRLQRQIKRDPQELLHNQQAFVIEFFDEDTPRKKRSQSFTHSPSGDPKADKRRGPTPADRDRPSVPAPVQAGGRSSGPQRAGSLKREKTEERLGSPSPASRTPARPFGSVGRRSRLAQDFMAQCLRESSPAARPSPEKVPPVLPAPLTPHGTSPVGPPTPPPAPTDPQLTKARKQEEDDSLSDAGTYTIETEAQDTEVEEARKMIDQVFGVLESPELSRASSATFRPVIRGDRDESDDGGVAQRMALLQEFASRPLGAAPQAEHQGLPVPGSPGGQKWVSRWASLADSYSDPGLTEDGLGRRGGEPEGSLPVRMRRRLPQLPSERADSPAGPESSRRSGPGPPELDSEQPSRLFGQEELDPDSLSDASGSDGGRGPEPGVEPQDSRRRSPQEGPTWSRGRRSPRAPGEPTPASFFIGDQNGDAVLSRKPLAAPGDGEGLGQTAQPSPPARDGVYVSANGRMVIQLRPGRSPEPDGPAPAFLRQESFTKEPASGPPAPGKPPHISSHPLLQDLAATRAARMDFHSQDTHLILKETETALAALEARLLSNSVDAECEGGSTPRPPEDALSGDSDVDTASTVSLRSGKSGPSPTTPQPLRAQKEMSPSPPAAQDPGGTALVSAREQSSERQHHPLGPTDMGRGEPVRRSAIRRGHRPRGSLDWPSEERGPVLAHLPSSDVMASNHETPEATGAGRLGSRRKPAAPPPSPAAREEQSRSSASSQKGPQALTRSNSLSTPRPTRASRLRRARLGDASDTEAADGERGSLGNPEPVGRPAAEQAKKLSRLDILAMPRKRAGSFTGTSDPEAAPARTSFSGRSVELCCASRKPTMAEARAVSRKAANTATTTGPRQPFSRARSGSARYTSTTQTPRAGSSSRARSRAPGPRDTDDDEEEPDPYGFIVQTAEIAEIARLSQTLVKDVAILAQEIHDVAGDGDTLGSSEPAHSASLSNMPSTPASTISAREELVQRIPEASLNFQKVPPGSLNSRDFDQNMNDSCEDALANKTRPRNREEAR

SEQ ID NO: 8764 - DNA, 6679 bp, Homo sapiens
gctcggcccgggctgccacgagcgtgcgggcctcgccgggcatgtcctaggcggcggccccgcccagcgctcggccgggcgggcgggcgggcgcgagggcagggaccgagccgggccgagctggggaacaagccggggaccaagccggggaccaagccggggactaaggcgagccggagaccgagcccgaacagcagtcccgcagcgtggacaagcagcatgccgtcatcaactacgaccaggacagggacgagcactgggtgaaggacctgggcagcctcaatgggacgtttgtgaatgacatgcgcatcccggaccagaagtacgtcacgctgaagctcaacgatgtcatccgcttcggctacgattccaacatgtatgtgctggagcgtgtgcagcaccgagtcccggaggaggcactcaagcatgaaaagtacaccagccagctgcaggtgagcgtgaagggtttggcgcccaagaggagcgaggcactgccggaacacacaccatactgcgaggcctcgaaccccaggccggagaagggggaccggagaccaggaacagaggcagcctcttaccgcacacccctgtatgggcagccctcctggtggggtgaggacgatggtagcacgctgcctgacgcccagcgccagggagagccctacccagagcgccccaagggaccagtgcagcaggacggggagctccacggcttccgcgcccctgctgagcctcagggctgctcgttccggcgggagcccagctacttcgagatccccacgaaggagaccccgcagccgtcgcagccccccgaggtgccggcacacgagatgcccacgaaggatgcagaggcaggtgggggcggagcggcccctgtggtgcagagccacgcctccttcaccatcgagtttgatgactgcagccctggcaagatgaagatcaaggaccatatcaccaagttttccctgcgccagcggcggcccccgggcaaggaggccacacctggcgagatggtgtcggctgagaccaaggtggccgactggctggtgcagaatgacccgagcctgctgcaccgggttggccctggggatgaccgccacagcaccaagagcgacctgcctgtccacacccgcaccctgaagggccacaagcacgaggacggcacgcagagtgactcagaggaccccctggccaaggcggcctcggccgctggggtgcccttggaggccagcggggagcaggtgcggctgcagaggcagatcaagcgggacccccaggagctactacataaccagcaggcctttgtcatcgagttcttcgacgaggacacaccccgaaagaagcgctcccagtccttcacgcacagcccgtccggggaccccaaggccgacaagcgccgtggcccaacgccggccgatagggaccgccccagtgtcccagccccagtccaggcagggggccgcagctcggggccacagagggccggctcgctcaagcgggagaagacagaggaacggctgggcagcccctcgcccgcctcccgaacccctgcccgccccttcggaagcgtggggcgccgctcccgcctggcccaggacttcatggcccagtgtctgcgggagagctccccggccgcccggcccagccccgagaaggttcctccggtgctgcccgctcccctgacaccccatgggaccagccccgtgggccccccgaccccaccgcccgcccccacggacccccagctgaccaaggcacggaaacaggaggaggacgacagcctcagtgacgcagggacatacaccatcgagaccgaggcgcaggacacggaggtggaggaggcccggaagatgatcgaccaggtctttggggtgttggagtcccctgaactctccagggcatcttcggccacctttcgcccagtcatcagaggggacagagatgagtctgatgacgggggcgtggcccagcggatggcgctactgcaggagtttgcctcccggccactgggtgcggccccccaggcggagcaccagggcctcccggtgccgggctcccctgggggtcagaagtgggtgtcccgctgggccagcctggctgacagctactcagacccgggcctcacagaggatggcctgggacgtagaggcggggagccggaggggtccctgcctgtgcgcatgcggcgacggctccctcagctgcccagtgagagggctgacagccctgcgggcccagagagcagcaggaggagtgggcctgggccaccggagctggacagtgagcagcccagccgcctcttcggccaggaggagttggatcctgacagcctcagcgatgccagtgggtcggacgggggccgaggccccgagccaggggtggagccacaggacagcagacgcaggagcccccaggaggggcccacgtggagcaggggtcggcgctcaccaagggcccccggggagccaactcccgcctctttcttcattggggaccagaatggggacgctgtgttatctaggaaaccgcttgcggctccaggggatggggagggcctagggcagacagcccagcccagccccccagcacgggatggcgtctatgtcagtgccaatgggagaatggtcatccagctacggcctggacggtccccagaacccgacggccctgccccagcctttctccggcaagagagcttcactaaggagccagccagtggtcccccagcgcccggcaagcccccccacatctccagccacccgcttctacaggacctggccgctacccgggccgcacgcatggacttccactcccaggacacccacctgatcttgaaggagacggagacggccctggcggccctggaggcccgactcctctctaattctgtggatgccgagtgtgaggggggcagcaccccgaggccgccggaggacgccctgtctggggactcggacgtggacacagccagcaccgtcagcctgcgtagtggcaagagcgggcccagccccacaaccccccagcctctgcgggcacagaaggagatgtcgccatccccgccagctgcacaggacccgggaggcaccgccctggtcagtgcccgtgagcagtcctcagagaggcagcatcacccacttggcccgacggacatgggccgtggagagccggtacggcgctcagccataaggcgtggccacaggccccgagggtccctggattggcccagtgaggagcgtggccctgtcctcgcccacctacccagctcagatgtgatggcctccaaccacgaaacccctgaggccaccggggcaggacggctaggttctcgccggaaaccagcggccccaccgccatccccagctgcccgggaggagcagagccgtagctcagccagctcccagaaggggccgcaggccttgacccgctccaacagcctgtccacccctcgccccacacgggcctcccggctgaggcgggcccggctgggggacgcttcagacactgaggctgcggatggtgagcgggggtccctgggcaaccctgagcccgtgggccggccagctgctgagcaggccaagaagctgtcacgcctggacatcctggccatgccccggaagcgggccggctccttcacagggactagtgaccccgaggcagcccctgcccgcaccagcttctctggccgcagtgtggagttgtgctgtgccagccgcaagcccaccatggccgaagcacgggctgtctccaggaaggctgccaacacagccaccaccacgggtccccgccagcccttcagcagggcccgctcaggcagtgcccgatacacctccaacacgaggcgccggcagcagggctcggattacacgtccacctctgaggaggagtacggctcccgccacggctcccccaaacacacacgctcccacacctcaacagccactcagaccccgagggctggcagctccagccgggctcgttcccgggcccccggcccccgggacacggacgacgatgaggaggagcctgacccttatggtttcatcgtgcagacggcagagattgcggagattgccaggctgagccagacgctggtgaaggacgtggccatcctagcccaggagatccacgatgtggctggggacggtgacacactgggctcctcggagcctgcccacagcgcctccctcagcaacatgcccagcacccccgcctcgaccatctctgcccgggaggagctggtgcagcgcatccccgaggccagcctcaacttccagaaggtgccgcccggctcgctgaactctcgggactttgaccagaacatgaacgacagctgtgaggacgccctggccaacaagacgcggcctcggaaccgagaggaggcacggtgatcttcgataacctgatgctgaacccggtgtcccagctgtcgcaggccatccgtgagaacacagagcaccttgccgagaagatgaagatcctctttcagaacacagggagagcttgggaggacctggaagccaggatcaacgccgagaacgaggtgcccatcctgaagacatctaacaaggaaatcagctccatcctgaaggaactgaggcgggtgcagaaacagctggaagttatcaatgccatcgtggaccccagtgggagcctggacctgctcacaggaaacaggagcttggccagctctgcacagccggggctggggaagggccgcgtggctgcccagagcccaccctcacccgcctcagccgaggccctgctgccagccctgcccctgaggaatttcccacagcgggccagctgtgggcctcccagcctcccggaccccaccttcctccctgatgccgagaggttcctgatctaggccccagacctggccaggccagcctccctgtgcgtgtgcgtctctgccttccgtccgccgcacacccgcctgcctggccgcaggtggttctccctgaagacccccacatgtgccatatccctgtgggcgggtgcctcccacgcccttgccccctcgtcagctcccagccagcaccctactcaccctgtccagccccatggccacccccacccctgcctcgccccctacaggcctctgggcccagctcctggccaggctgctgccaaggtcaagccctcaagggcattaccccgcctcctcttcatcactgttatttttgtctttagctttaaaggaaagagttgttggtgccattgcaggtgccccctccaggcctgactggctccgccaggcactaacctgccataaccctttgtgctggcctgcggccaggcagaggaagagaggtcgactgtggggtcatttggtgccaaacatggaggtgggcaggctcacctgttcctgggactgtctgagatggcagggcacttgccctggtggctcccacctgaccccaggccttttataggcaggagccccactgcttccagcctctggtgccaacacagttgccaaacccattgagcttggggctgccctgtggaggcctcctgggtatggaccaggggcttgttgagagctgagccatgcacacaggtgcagacaccccccaactcccatgcacacggctagtccaggcgcctccacgctgcaccgtgaggactgcagggcatgtccccgtgaggggctatgggcctctgtaggtgggcttccaaggtcctgggtgcagccgggtgcatggcagcccttctggcgggggtgagcgcacgaccaaagtcactggaagccgggtttccggaagctcgcagcttggcctgcaccacacgccctccccttttggcttcacgccatcaggcctcaagtgggcatgggggcagggacgggcccaggaactgttgttttctcaggattctttcagctgggaacatggcaggtgagcagagcttggtgcctctgccgtggcccctgctggggcagcccgtgttgccggagcctctaagccaaagagcccgttggccgtggttggtgggggtggacgtgggggtgtcccacctggaccagactggcgtgggtgagctccacaccctgcctggcaatggtatgagagtcggacctggacagggccagctgctgggggagcggcactggggactggaggctggaagcgggtggtgtgtgtcccctgtttacttttagctgagctggggttgggtgtacgggttctgttcctctgagcctgcggcccacctgatgtttacgtgtgtgtgtgagggggggcgggggtggcaggtgtccccccctggtccccgccccaagagcctgctgtctgtatggaggaggtgctagcccggtccaccgggctgctgcccacccctgcatgccccagttgcccaccccgcctgcccctggacatgaagtggtcacgcttcatccacggctccttcccacccctcggcagtggctgtgcaatgttttaagttcacaagttcctgctcctccccacactgagctcctttgttcctccccctccagcctttgcctgggaactggtccttgtttgccgggcttctcggagggttcactgtacattcgttctcaggtggtcttgtggctgtctttcggaaaatggttattttatatgatttgtcatggaatttgttctaataaatcattcttctatcacatggcagcacgctggagcctgtcaccttg

SEQ ID NO: 8765 - protein, 1361 aa, Homo sapiens
MRIPDQKYVTLKLNDVIRFGYDSNMYVLERVQHRVPEEALKHEKYTSQLQVSVKGLAPKRSEALPEHTPYCEASNPRPEKGDRRPGTEAASYRTPLYGQPSWWGEDDGSTLPDAQRQGEPYPERPKGPVQQDGELHGFRAPAEPQGCSFRREPSYFEIPTKETPQPSQPPEVPAHEMPTKDAEAGGGGAAPVVQSHASFTIEFDDCSPGKMKIKDHITKFSLRQRRPPGKEATPGEMVSAETKVADWLVQNDPSLLHRVGPGDDRHSTKSDLPVHTRTLKGHKHEDGTQSDSEDPLAKAASAAGVPLEASGEQVRLQRQIKRDPQELLHNQQAFVIEFFDEDTPRKKRSQSFTHSPSGDPKADKRRGPTPADRDRPSVPAPVQAGGRSSGPQRAGSLKREKTEERLGSPSPASRTPARPFGSVGRRSRLAQDFMAQCLRESSPAARPSPEKVPPVLPAPLTPHGTSPVGPPTPPPAPTDPQLTKARKQEEDDSLSDAGTYTIETEAQDTEVEEARKMIDQVFGVLESPELSRASSATFRPVIRGDRDESDDGGVAQRMALLQEFASRPLGAAPQAEHQGLPVPGSPGGQKWVSRWASLADSYSDPGLTEDGLGRRGGEPEGSLPVRMRRRLPQLPSERADSPAGPESSRRSGPGPPELDSEQPSRLFGQEELDPDSLSDASGSDGGRGPEPGVEPQDSRRRSPQEGPTWSRGRRSPRAPGEPTPASFFIGDQNGDAVLSRKPLAAPGDGEGLGQTAQPSPPARDGVYVSANGRMVIQLRPGRSPEPDGPAPAFLRQESFTKEPASGPPAPGKPPHISSHPLLQDLAATRAARMDFHSQDTHLILKETETALAALEARLLSNSVDAECEGGSTPRPPEDALSGDSDVDTASTVSLRSGKSGPSPTTPQPLRAQKEMSPSPPAAQDPGGTALVSAREQSSERQHHPLGPTDMGRGEPVRRSAIRRGHRPRGSLDWPSEERGPVLAHLPSSDVMASNHETPEATGAGRLGSRRKPAAPPPSPAAREEQSRSSASSQKGPQALTRSNSLSTPRPTRASRLRRARLGDASDTEAADGERGSLGNPEPVGRPAAEQAKKLSRLDILAMPRKRAGSFTGTSDPEAAPARTSFSGRSVELCCASRKPTMAEARAVSRKAANTATTTGPRQPFSRARSGSARYTSNTRRRQQGSDYTSTSEEEYGSRHGSPKHTRSHTSTATQTPRAGSSSRARSRAPGPRDTDDDEEEPDPYGFIVQTAEIAEIARLSQTLVKDVAILAQEIHDVAGDGDTLGSSEPAHSASLSNMPSTPASTISAREELVQRIPEASLNFQKVPPGSLNSRDFDQNMNDSCEDALANKTRPRNREEAR

SEQ ID NO: 8766 - DNA, 6574 bp, Homo sapiens
gctcggcccgggctgccacgagcgtgcgggcctcgccgggcatgtcctaggcggcggccccgcccagcgctcggccgggcgggcgggcgggcgcgagggcagggaccgagccgggccgagctggggaacaagccggggaccaagccggggaccaagccggggactaaggcgagccggagaccgagcccgaacagcagtcccgcagcgtggacaagcagcatgccgtcatcaactacgaccaggacagggacgagcactgggtgaaggacctgggcagcctcaatgggacgtttgtgaatgacatgcgcatcccggaccagaagtacgtcacgctgaagctcaacgatgtcatccgcttcggctacgattccaacatgtatgtgctggagcgtgtgcagcaccgagtcccggaggaggcactcaagcatgaaaagtacaccagccagctgcaggtgagcgtgaagggtttggcgcccaagaggagcgaggcactgccggaacacacaccatactgcgaggcctcgaaccccaggccggagaagggggaccggagaccaggaacagaggcagcctcttaccgcacacccctgtatgggcagccctcctggtggggtgaggacgatggtagcacgctgcctgacgcccagcgccagggagagccctacccagagcgccccaagggaccagtgcagcaggacggggagctccacggcttccgcgcccctgctgagcctcagggctgctcgttccggcgggagcccagctacttcgagatccccacgaaggagaccccgcagccgtcgcagccccccgaggtgccggcacacgagatgcccacgaaggatgcagaggcaggtgggggcggagcggcccctgtggtgcagagccacgcctccttcaccatcgagtttgatgactgcagccctggcaagatgaagatcaaggaccatatcaccaagttttccctgcgccagcggcggcccccgggcaaggaggccacacctggcgagatggtgtcggctgagaccaaggtggccgactggctggtgcagaatgacccgagcctgctgcaccgggttggccctggggatgaccgccacagcaccaagagcgacctgcctgtccacacccgcaccctgaagggccacaagcacgaggacggcacgcagagtgactcagaggaccccctggccaaggcggcctcggccgctggggtgcccttggaggccagcggggagcaggtgcggctgcagaggcagatcaagcgggacccccaggagctactacataaccagcaggcctttgtcatcgagttcttcgacgaggacacaccccgaaagaagcgctcccagtccttcacgcacagcccgtccggggaccccaaggccgacaagcgccgtggcccaacgccggccgatagggaccgccccagtgtcccagccccagtccaggcagggggccgcagctcggggccacagagggccggctcgctcaagcgggagaagacagaggaacggctgggcagcccctcgcccgcctcccgaacccctgcccgccccttcggaagcgtggggcgccgctcccgcctggcccaggacttcatggcccagtgtctgcgggagagctccccggccgcccggcccagccccgagaaggttcctccggtgctgcccgctcccctgacaccccatgggaccagccccgtgggccccccgaccccaccgcccgcccccacggacccccagctgaccaaggcacggaaacaggaggaggacgacagcctcagtgacgcagggacatacaccatcgagaccgaggcgcaggacacggaggtggaggaggcccggaagatgatcgaccaggtctttggggtgttggagtcccctgaactctccagggcatcttcggccacctttcgcccagtcatcagaggggacagagatgagtctgatgacgggggcgtggcccagcggatggcgctactgcaggagtttgcctcccggccactgggtgcggccccccaggcggagcaccagggcctcccggtgccgggctcccctgggggtcagaagtgggtgtcccgctgggccagcctggctgacagctactcagacccgggcctcacagaggatggcctgggacgtagaggcggggagccggaggggtccctgcctgtgcgcatgcggcgacggctccctcagctgcccagtgagagggctgacagccctgcgggcccagagagcagcaggaggagtgggcctgggccaccggagctggacagtgagcagcccagccgcctcttcggccaggaggagttggatcctgacagcctcagcgatgccagtgggtcggacgggggccgaggccccgagccaggggtggagccacaggacagcagacgcaggagcccccaggaggggcccacgtggagcaggggtcggcgctcaccaagggcccccggggagccaactcccgcctctttcttcattggggaccagaatggggacgctgtgttatctaggaaaccgcttgcggctccaggggatggggagggcctagggcagacagcccagcccagccccccagcacgggatggcgtctatgtcagtgccaatgggagaatggtcatccagctacggcctggacggtccccagaacccgacggccctgccccagcctttctccggcaagagagcttcactaaggagccagccagtggtcccccagcgcccggcaagcccccccacatctccagccacccgcttctacaggacctggccgctacccgggccgcacgcatggacttccactcccaggacacccacctgatcttgaaggagacggagacggccctggcggccctggaggcccgactcctctctaattctgtggatgccgagtgtgaggggggcagcaccccgaggccgccggaggacgccctgtctggggactcggacgtggacacagccagcaccgtcagcctgcgtagtggcaagagcgggcccagccccacaaccccccagcctctgcgggcacagaaggagatgtcgccatccccgccagctgcacaggacccgggaggcaccgccctggtcagtgcccgtgagcagtcctcagagaggcagcatcacccacttggcccgacggacatgggccgtggagagccggtacggcgctcagccataaggcgtggccacaggccccgagggtccctggattggcccagtgaggagcgtggccctgtcctcgcccacctacccagctcagatgtgatggcctccaaccacgaaacccctgaggccaccggggcaggacggctaggttctcgccggaaaccagcggccccaccgccatccccagctgcccgggaggagcagagccgtagctcagccagctcccagaaggggccgcaggccttgacccgctccaacagcctgtccacccctcgccccacacgggcctcccggctgaggcgggcccggctgggggacgcttcagacactgaggctgcggatggtgagcgggggtccctgggcaaccctgagcccgtgggccggccagctgctgagcaggccaagaagctgtcacgcctggacatcctggccatgccccggaagcgggccggctccttcacagggactagtgaccccgaggcagcccctgcccgcaccagcttctctggccgcagtgtggagttgtgctgtgccagccgcaagcccaccatggccgaagcacgggctgtctccaggaaggctgccaacacagccaccaccacgggtccccgccagcccttcagcagggcccgctcaggcagtgcccgatacacctccaccactcagaccccgagggctggcagctccagccgggctcgttcccgggcccccggcccccgggacacggacgacgatgaggaggagcctgacccttatggtttcatcgtgcagacggcagagattgcggagattgccaggctgagccagacgctggtgaaggacgtggccatcctagcccaggagatccacgatgtggctggggacggtgacacactgggctcctcggagcctgcccacagcgcctccctcagcaacatgcccagcacccccgcctcgaccatctctgcccgggaggagctggtgcagcgcatccccgaggccagcctcaacttccagaaggtgccgcccggctcgctgaactctcgggactttgaccagaacatgaacgacagctgtgaggacgccctggccaacaagacgcggcctcggaaccgagaggaggcacggtgatcttcgataacctgatgctgaacccggtgtcccagctgtcgcaggccatccgtgagaacacagagcaccttgccgagaagatgaagatcctctttcagaacacagggagagcttgggaggacctggaagccaggatcaacgccgagaacgaggtgcccatcctgaagacatctaacaaggaaatcagctccatcctgaaggaactgaggcgggtgcagaaacagctggaagttatcaatgccatcgtggaccccagtgggagcctggacctgctcacaggaaacaggagcttggccagctctgcacagccggggctggggaagggccgcgtggctgcccagagcccaccctcacccgcctcagccgaggccctgctgccagccctgcccctgaggaatttcccacagcgggccagctgtgggcctcccagcctcccggaccccaccttcctccctgatgccgagaggttcctgatctaggccccagacctggccaggccagcctccctgtgcgtgtgcgtctctgccttccgtccgccgcacacccgcctgcctggccgcaggtggttctccctgaagacccccacatgtgccatatccctgtgggcgggtgcctcccacgcccttgccccctcgtcagctcccagccagcaccctactcaccctgtccagccccatggccacccccacccctgcctcgccccctacaggcctctgggcccagctcctggccaggctgctgccaaggtcaagccctcaagggcattaccccgcctcctcttcatcactgttatttttgtctttagctttaaaggaaagagttgttggtgccattgcaggtgccccctccaggcctgactggctccgccaggcactaacctgccataaccctttgtgctggcctgcggccaggcagaggaagagaggtcgactgtggggtcatttggtgccaaacatggaggtgggcaggctcacctgttcctgggactgtctgagatggcagggcacttgccctggtggctcccacctgaccccaggccttttataggcaggagccccactgcttccagcctctggtgccaacacagttgccaaacccattgagcttggggctgccctgtggaggcctcctgggtatggaccaggggcttgttgagagctgagccatgcacacaggtgcagacaccccccaactcccatgcacacggctagtccaggcgcctccacgctgcaccgtgaggactgcagggcatgtccccgtgaggggctatgggcctctgtaggtgggcttccaaggtcctgggtgcagccgggtgcatggcagcccttctggcgggggtgagcgcacgaccaaagtcactggaagccgggtttccggaagctcgcagcttggcctgcaccacacgccctccccttttggcttcacgccatcaggcctcaagtgggcatgggggcagggacgggcccaggaactgttgttttctcaggattctttcagctgggaacatggcaggtgagcagagcttggtgcctctgccgtggcccctgctggggcagcccgtgttgccggagcctctaagccaaagagcccgttggccgtggttggtgggggtggacgtgggggtgtcccacctggaccagactggcgtgggtgagctccacaccctgcctggcaatggtatgagagtcggacctggacagggccagctgctgggggagcggcactggggactggaggctggaagcgggtggtgtgtgtcccctgtttacttttagctgagctggggttgggtgtacgggttctgttcctctgagcctgcggcccacctgatgtttacgtgtgtgtgtgagggggggcgggggtggcaggtgtccccccctggtccccgccccaagagcctgctgtctgtatggaggaggtgctagcccggtccaccgggctgctgcccacccctgcatgccccagttgcccaccccgcctgcccctggacatgaagtggtcacgcttcatccacggctccttcccacccctcggcagtggctgtgcaatgttttaagttcacaagttcctgctcctccccacactgagctcctttgttcctccccctccagcctttgcctgggaactggtccttgtttgccgggcttctcggagggttcactgtacattcgttctcaggtggtcttgtggctgtctttcggaaaatggttattttatatgatttgtcatggaatttgttctaataaatcattcttctatcacatggcagcacgctggagcctgtcaccttg

SEQ ID NO: 8767 - protein, 1326 aa, Homo sapiens
MRIPDQKYVTLKLNDVIRFGYDSNMYVLERVQHRVPEEALKHEKYTSQLQVSVKGLAPKRSEALPEHTPYCEASNPRPEKGDRRPGTEAASYRTPLYGQPSWWGEDDGSTLPDAQRQGEPYPERPKGPVQQDGELHGFRAPAEPQGCSFRREPSYFEIPTKETPQPSQPPEVPAHEMPTKDAEAGGGGAAPVVQSHASFTIEFDDCSPGKMKIKDHITKFSLRQRRPPGKEATPGEMVSAETKVADWLVQNDPSLLHRVGPGDDRHSTKSDLPVHTRTLKGHKHEDGTQSDSEDPLAKAASAAGVPLEASGEQVRLQRQIKRDPQELLHNQQAFVIEFFDEDTPRKKRSQSFTHSPSGDPKADKRRGPTPADRDRPSVPAPVQAGGRSSGPQRAGSLKREKTEERLGSPSPASRTPARPFGSVGRRSRLAQDFMAQCLRESSPAARPSPEKVPPVLPAPLTPHGTSPVGPPTPPPAPTDPQLTKARKQEEDDSLSDAGTYTIETEAQDTEVEEARKMIDQVFGVLESPELSRASSATFRPVIRGDRDESDDGGVAQRMALLQEFASRPLGAAPQAEHQGLPVPGSPGGQKWVSRWASLADSYSDPGLTEDGLGRRGGEPEGSLPVRMRRRLPQLPSERADSPAGPESSRRSGPGPPELDSEQPSRLFGQEELDPDSLSDASGSDGGRGPEPGVEPQDSRRRSPQEGPTWSRGRRSPRAPGEPTPASFFIGDQNGDAVLSRKPLAAPGDGEGLGQTAQPSPPARDGVYVSANGRMVIQLRPGRSPEPDGPAPAFLRQESFTKEPASGPPAPGKPPHISSHPLLQDLAATRAARMDFHSQDTHLILKETETALAALEARLLSNSVDAECEGGSTPRPPEDALSGDSDVDTASTVSLRSGKSGPSPTTPQPLRAQKEMSPSPPAAQDPGGTALVSAREQSSERQHHPLGPTDMGRGEPVRRSAIRRGHRPRGSLDWPSEERGPVLAHLPSSDVMASNHETPEATGAGRLGSRRKPAAPPPSPAAREEQSRSSASSQKGPQALTRSNSLSTPRPTRASRLRRARLGDASDTEAADGERGSLGNPEPVGRPAAEQAKKLSRLDILAMPRKRAGSFTGTSDPEAAPARTSFSGRSVELCCASRKPTMAEARAVSRKAANTATTTGPRQPFSRARSGSARYTSTTQTPRAGSSSRARSRAPGPRDTDDDEEEPDPYGFIVQTAEIAEIARLSQTLVKDVAILAQEIHDVAGDGDTLGSSEPAHSASLSNMPSTPASTISAREELVQRIPEASLNFQKVPPGSLNSRDFDQNMNDSCEDALANKTRPRNREEAR

SEQ ID NO: 8768 - DNA, 490 bp, Homo sapiens
gtgcatccctgccccttctgggtacccgtaggcgctcccgggcgctggcggcggcggaggagagggagcagcgtcacgggcgcccggcccgttaaaacgctgctggctggagccacctccctccctgcagcccgcaacgggaatggagtaaagggagacccgtcgacctggccacggggatcagcgatggaattaaagcaatctttgtccacccatctggaagccgagaagcctctgaggcgctatggggcggtggaggagacggcttggaaaacggagagactggggagaaatcagctggacatcatctccatggcggagacaaccatgatgccagaggagattgagctggagatggcaaaaattcagcgtctccgggaagtcttggtccgccgggagtctgagctcaggttcatgatggatgacatccagctctgcaaggacatcatggacttgaagcaggagctgcagaacttggtcgccatcccag

SEQ ID NO: 8769 - protein, 100 aa, Homo sapiens
MELKQSLSTHLEAEKPLRRYGAVEETAWKTERLGRNQLDIISMAETTMMPEEIELEMAKIQRLREVLVRRESELRFMMDDIQLCKDIMDLKQELQNLVAI

SEQ ID NO: 8770 - DNA, 1145 bp, Homo sapiens
gtgcatccctgccccttctgggtacccgtaggcgctcccgggcgctggcggcggcggaggagagggagcagcgtcacgggcgcccggcccgttaaaacgctgctggctggagccacctccctccctgcagcccgcaacgggaatggagtaaagggagacccgtcgacctggccacggggatcagcgatggaattaaagcaatctttgtccacccatctggaagccgagaagcctctgaggcgctatggggcggtggaggagacggcttggaaaacggagagactggggagaaatcagctggacatcatctccatggcggagacaaccatgatgccagaggagattgagctggagatggcaaaaattcagcgtctccgggaagtcttggtccgccgggagtctgagctcaggttcatgatggatgacatccagctctgcaaggacatcatggacttgaagcaggagctgcagaacttggtcgccatcccagaaaaagaaaaaaccaaactgcagaagcagagagaggatgagctaatccagaagatccacaaactggtgcagaagagagacttcctggtggacgatgcggaggtcgagcggttaaggtgagtgcactgcgggtacccgatcactgggctgcaggacagcaaccttctgcttccttccagaacccatcttctgctcctgggactcacagccttgcctaacaggcatggccttgatccacagtctctggacactgaatcccaaggaaccccagccttctggcttgagaattcattttgtatataagagaatttcaaatctgtgcctcttgagggaatgttgttccaggaagtgaccagggaggagtcacatcccataatacatggcagagcttccttcacatcctgtcactcctgaaggcaatgtcttgaaacttctgctatcagtttctaccgaaactctgccacctgaactgacttgctcccaacctctgtcctcccaacctcccagctttgttctcccctttcccttccccttagtggcgccaatgcccttttctaagtatcagggtcttctctttgcatctgctgccttgacctcgacaaccacagccctggagctgcagtgtaaaaacatgttgtaaatgttgaaaatgtgga

SEQ ID NO: 8771 - protein, 140 aa, Homo sapiens
MELKQSLSTHLEAEKPLRRYGAVEETAWKTERLGRNQLDIISMAETTMMPEEIELEMAKIQRLREVLVRRESELRFMMDDIQLCKDIMDLKQELQNLVAIPEKEKTKLQKQREDELIQKIHKLVQKRDFLVDDAEVERLR

SEQ ID NO: 8772 - DNA, 1364 bp, Homo sapiens
gtgcatccctgccccttctgggtacccgtaggcgctcccgggcgctggcggcggcggaggagagggagcagcgtcacgggcgcccggcccgttaaaacgctgctggctggagccacctccctccctgcagcccgcaacgggaatggagtaaagggagacccgtcgacctggccacggggatcagcgatggaattaaagcaatctttgtccacccatctggaagccgagaagcctctgaggcgctatggggcggtggaggagacggcttggaaaacggagagactggggagaagtgactctccaaggcagaaggggttgaaggcaagcccgtgactgtcaccagaggccatgggcacggcaggcgggcctggccaccctgtacagagtgtagcagtagggagtctctcaccgtcgcatggtcctccccagagcatgccgaacccaggagtctgtctcactgtttatccaaacaccaggaaaggtcctccctcaaaaaagcatatctccacttctctctagctgtatctaacccaccgtgtgaatgaactgggagaggggcatgctccccagctgtgtgtagtcgtgacttctcaacaatctagcaccatgtcggacacgttccccatccaccctcctagctctgctctcagagctaggcacatgggcacaggtcccctcccgtctgtcctctcccagcaactgtgccctggagggctccacatggcccccgtgtctctcgggcaccacccatatagcagtcccagagggcccatctgtaaagatcgagcttgtgtgtggtgtcgtggtcacatctcccgcttccccccatcctgtgtctgggcacagttcacatcaggacagcgtccattgtgctctcagtctgcctcaggtgtgtgcctggagggggcctggactggcatggatccagtgtgcagaagagccagcagggaaccggaagctctgatgtcaaggccagagcagttgagaatgggacccagagtagatgctgacctgggcactccaccattccggggccaccacagagatgccagcaggatgccactttgccagcccgacacacggacctttgtaaagaacagcaacaggcaggagaggcagcgtgtgaccagattgtgtcccgtcattgggtggcatatgttaactagctgccaaacaacttcaacccgtgtaattcatgtacatttgcaacagccagcccggtacagcctgtgtgacttctctgtatgtgtgtgtgtgtcgtgaccagcctaagtagttagcataactcaagatgctgatgtgcagtcacccatcagagaaaataaaaatggaaaccacgttcacagcattttaaaagtttttac

SEQ ID NO: 8773 - protein, 48 aa, Homo sapiens
MELKQSLSTHLEAEKPLRRYGAVEETAWKTERLGRSDSPRQKGLKASP

SEQ ID NO: 8774 - DNA, 1952 bp, Homo sapiens
gtgcatccctgccccttctgggtacccgtaggcgctcccgggcgctggcggcggcggaggagagggagcagcgtcacgggcgcccggcccgttaaaacgctgctggctggagccacctccctccctgcagcccgcaacgggaatggagtaaagggagacccgtcgacctggccacggggatcagcgatggaattaaagcaatctttgtccacccatctggaagccgagaagcctctgaggcgctatggggcggtggaggagacggcttggaaaacggagagactggggagaaatcagctggacatcatctccatggcggagacaaccatgatgccagaggagattgagctggagatggcaaaaattcagcgtctccgggaagtcttggtccgccgggagtctgagctcaggttcatgatggatgacatccagctctgcaaggacatcatggacttgaagcaggagctgcagaacttggtcgccatcccagaaaaagaaaaaaccaaactgcagaagcagagagaggatgagctaatccagaagatccacaaactggtgcagaagagagacttcctggtggacgatgcggaggtcgagcggttaagggagcaagaagaagacaaggaaatggctgatttcctgagaatcaagttaaaacctctagacaaagtaaccaaatctccagccagctcccgggcagagaagaaagcagagcccccacctagcaagcccacggtggccaagacggggctggcactgatcaaggattgttgcggggccacccagtgcaacatcatgtagcccccacgtggggtgccctgggccatggggacccccccccaccctcttgtctttatagcccccatttcaccggggcccaagagctctccaaggcagaaggggttgaaggcaagcccgtgactgtcaccagaggccatgggcacggcaggcgggcctggccaccctgtacagagtgtagcagtagggagtctctcaccgtcgcatggtcctccccagagcatgccgaacccaggagtctgtctcactgtttatccaaacaccaggaaaggtcctccctcaaaaaagcatatctccacttctctctagctgtatctaacccaccgtgtgaatgaactgggagaggggcatgctccccagctgtgtgtagtcgtgacttctcaacaatctagcaccatgtcggacacgttccccatccaccctcctagctctgctctcagagctaggcacatgggcacaggtcccctcccgtctgtcctctcccagcaactgtgccctggagggctccacatggcccccgtgtctctcgggcaccacccatatagcagtcccagagggcccatctgtaaagatcgagcttgtgtgtggtgtcgtggtcacatctcccgcttccccccatcctgtgtctgggcacagttcacatcaggacagcgtccattgtgctctcagtctgcctcaggtgtgtgcctggagggggcctggactggcatggatccagtgtgcagaagagccagcagggaaccggaagctctgatgtcaaggccagagcagttgagaatgggacccagagtagatgctgacctgggcactccaccattccggggccaccacagagatgccagcaggatgccactttgccagcccgacacacggacctttgtaaagaacagcaacaggcaggagaggcagcgtgtgaccagattgtgtcccgtcattgggtggcatatgttaactagctgccaaacaacttcaacccgtgtaattcatgtacatttgcaacagccagcccggtacagcctgtgtgacttctctgtatgtgtgtgtgtgtcgtgaccagcctaagtagttagcataactcaagatgctgatgtgcagtcacccatcagagaaaataaaaatggaaaccacgttcacagcattttaaaagtttttac

SEQ ID NO: 8775 - protein, 204 aa, Homo sapiens; identical to SEQ ID NO: 1080

SEQ ID NO: 8776 - DNA, 2232 bp, Homo sapiens
gtgcatccctgccccttctgggtacccgtaggcgctcccgggcgctggcggcggcggaggagagggagcagcgtcacgggcgcccggcccgttaaaacgctgctggctggagccacctccctccctgcagcccgcaacgggaatggagtaaagggagacccgtcgacctggccacggggatcagcgatggaattaaagcaatctttgtccacccatctggaagccgagaagcctctgaggcgctatggggcggtggaggagacggcttggaaaacggagagactggggagaaatcagctggacatcatctccatggcggagacaaccatgatgccagaggagattgagctggagatggcaaaaattcagcgtctccgggaagtcttggtccgccgggagtctgagctcaggttcatgatggatgacatccagctctgcaaggacatcatggacttgaagcaggagctgcagaacttggtcgccatcccagaaaaagaaaaaaccaaactgcagaagcagagagaggatgagctaatccagaagatccacaaactggtgcagaagagagacttcctggtggacgatgcggaggtcgagcggttaagggagcaagaagaagacaaggaaatggctgatttcctgagaatcaagttaaaacctctagacaaagtaaccaaatctccagccagctcccgggcagagaagaaagcagagcccccacctagcaagcccacggtggccaagacggggctggcactgatcaaggattgttgcggggccacccagtgcaacatcatgtagcccccacgtggggtgccctgggccatggggacccccccccaccctcttgtctttatagcccccatttcaccggggcccaagagctctccaaggcagaaggggttgaaggcaagcccgtgactgtcaccagaggccatgggcacggcaggcgggcctggccaccctgtacagagtgtagcagtagggagtctctcaccgtcgcatggtcctccccagagcatgccgaacccaggagtctgtctcactgtttatccaaacaccaggaaaggtcctccctcaaaaaagcatatctccacttctctctagctgtatctaacccaccgtgtgaatgaactgggagaggggcatgctccccagctgtgtgtagtcgtgacttctcaacaatctagcaccatgtcggacacgttccccatccaccctcctagctctgctctcagagctaggcacatgggcacaggtcccctcccgtctgtcctctcccagcaactgtgccctggagggctccacatggcccccgtgtctctcgggcaccacccatatagcagtcccagagggcccatctgtaaagatcgagcttgtgtgtggtgtcgtggtcacatctcccgcttccccccatcctgtgtctgggcacagttcacatcaggacagcgtccattgtgctctcagtctgcctcaggtgtgtgcctggagggggcctggactggcatggatccagtgtgcagaagagccagcagggaaccggaagctctgatgtcaaggccagagcagttgagaatgggacccagagtagatgctgacctgggcactccaccattccggggccaccacagagatgccagcaggatgccactttgccagcccgacacacggacctttgtaaagaacagcaacaggcaggagaggcagcgtgtgaccagattgtgtcccgtcattgggtggcatatgttaactagctgccaaacaacttcaacccgtgtaattcatgtacatttgcaacagccagcccggtacagcctgtgtgacttctctgtatgtgtgtgtgtgtcgtgaccagcctaagtagttagcataactcaagatgctgatgtgcagtcacccatcagagaaaataaaaatggaaaccacgttcacagcattttaaaagtttttactttttttcttgattatggaagtaatccatgtacatagtaaatcattttaaaagtacaaaaagtatgaagaagtttgtcttaaaaaaaaaaaaaattattcctccaactagagaccactctgatgtttcgacgttttaaaaaagtctttttttgtgcattttttcatcgttgacatcatattgtggtatcatttataaccagttttttcctacttattataccaccatcttccacatcattaaaagctctttgtaaacattaaacactcttcataaatcat

SEQ ID NO: 8777 - protein, 204 aa, Homo sapiens; identical to SEQ ID NO: 1080

SEQ ID NO: 8778 - DNA, 1644 bp, Homo sapiens
gtgcatccctgccccttctgggtacccgtaggcgctcccgggcgctggcggcggcggaggagagggagcagcgtcacgggcgcccggcccgttaaaacgctgctggctggagccacctccctccctgcagcccgcaacgggaatggagtaaagggagacccgtcgacctggccacggggatcagcgatggaattaaagcaatctttgtccacccatctggaagccgagaagcctctgaggcgctatggggcggtggaggagacggcttggaaaacggagagactggggagaagtgactctccaaggcagaaggggttgaaggcaagcccgtgactgtcaccagaggccatgggcacggcaggcgggcctggccaccctgtacagagtgtagcagtagggagtctctcaccgtcgcatggtcctccccagagcatgccgaacccaggagtctgtctcactgtttatccaaacaccaggaaaggtcctccctcaaaaaagcatatctccacttctctctagctgtatctaacccaccgtgtgaatgaactgggagaggggcatgctccccagctgtgtgtagtcgtgacttctcaacaatctagcaccatgtcggacacgttccccatccaccctcctagctctgctctcagagctaggcacatgggcacaggtcccctcccgtctgtcctctcccagcaactgtgccctggagggctccacatggcccccgtgtctctcgggcaccacccatatagcagtcccagagggcccatctgtaaagatcgagcttgtgtgtggtgtcgtggtcacatctcccgcttccccccatcctgtgtctgggcacagttcacatcaggacagcgtccattgtgctctcagtctgcctcaggtgtgtgcctggagggggcctggactggcatggatccagtgtgcagaagagccagcagggaaccggaagctctgatgtcaaggccagagcagttgagaatgggacccagagtagatgctgacctgggcactccaccattccggggccaccacagagatgccagcaggatgccactttgccagcccgacacacggacctttgtaaagaacagcaacaggcaggagaggcagcgtgtgaccagattgtgtcccgtcattgggtggcatatgttaactagctgccaaacaacttcaacccgtgtaattcatgtacatttgcaacagccagcccggtacagcctgtgtgacttctctgtatgtgtgtgtgtgtcgtgaccagcctaagtagttagcataactcaagatgctgatgtgcagtcacccatcagagaaaataaaaatggaaaccacgttcacagcattttaaaagtttttactttttttcttgattatggaagtaatccatgtacatagtaaatcattttaaaagtacaaaaagtatgaagaagtttgtcttaaaaaaaaaaaaaattattcctccaactagagaccactctgatgtttcgacgttttaaaaaagtctttttttgtgcattttttcatcgttgacatcatattgtggtatcatttataaccagttttttcctacttattataccaccatcttccacatcattaaaagctctttgtaaacattaaacactcttcataaatcat

SEQ ID NO: 8779 - protein, 48 aa, Homo sapiens; identical to SEQ ID NO: 8773

SEQ ID NO: 8780 - DNA, 1272 bp, Homo sapiens
ggcgctcccgggcgctggcggcggcggaggagagggagcagcgtcacgggcgcccggcccgttaaaacgctgctggctggagccacctccctccctgcagcccgcaacgggaatggagtaaagggagacccgtcgacctggccacggggatcagcgatggaattaaagcaatcttttagcccccatttcaccggggcccaagagctctccaaggcagaaggggttgaaggcaagcccgtgactgtcaccagaggccatgggcacggcaggcgggcctggccaccctgtacagagtgtagcagtagggagtctctcaccgtcgcatggtcctccccagagcatgccgaacccaggagtctgtctcactgtttatccaaacaccaggaaaggtcctccctcaaaaaagcatatctccacttctctctagctgtatctaacccaccgtgtgaatgaactgggagaggggcatgctccccagctgtgtgtagtcgtgacttctcaacaatctagcaccatgtcggacacgttccccatccaccctcctagctctgctctcagagctaggcacatgggcacaggtcccctcccgtctgtcctctcccagcaactgtgccctggagggctccacatggcccccgtgtctctcgggcaccacccatatagcagtcccagagggcccatctgtaaagatcgagcttgtgtgtggtgtcgtggtcacatctcccgcttccccccatcctgtgtctgggcacagttcacatcaggacagcgtccattgtgctctcagtctgcctcaggtgtgtgcctggagggggcctggactggcatggatccagtgtgcagaagagccagcagggaaccggaagctctgatgtcaaggccagagcagttgagaatgggacccagagtagatgctgacctgggcactccaccattccggggccaccacagagatgccagcaggatgccactttgccagcccgacacacggacctttgtaaagaacagcaacaggcaggagaggcagcgtgtgaccagattgtgtcccgtcattgggtggcatatgttaactagctgccaaacaacttcaacccgtgtaattcatgtacatttgcaacagccagcccggtacagcctgtgtgacttctctgtatgtgtgtgtgtgtcgtgaccagcctaagtagttagcataactcaagatgctgatgtgcagtcacccatcagagaaaataaaaatggaaaccacgttcacagcattttaaaagtttttac

SEQ ID NO: 8781 - protein, 98 aa, Homo sapiens [sequence omitted]

SEQ ID NO: 8782 - DNA, 1552 bp, Homo sapiens
ggcgctcccgggcgctggcggcggcggaggagagggagcagcgtcacgggcgcccggcccgttaaaacgctgctggctggagccacctccctccctgcagcccgcaacgggaatggagtaaagggagacccgtcgacctggccacggggatcagcgatggaattaaagcaatcttttagcccccatttcaccggggcccaagagctctccaaggcagaaggggttgaaggcaagcccgtgactgtcaccagaggccatgggcacggcaggcgggcctggccaccctgtacagagtgtagcagtagggagtctctcaccgtcgcatggtcctccccagagcatgccgaacccaggagtctgtctcactgtttatccaaacaccaggaaaggtcctccctcaaaaaagcatatctccacttctctctagctgtatctaacccaccgtgtgaatgaactgggagaggggcatgctccccagctgtgtgtagtcgtgacttctcaacaatctagcaccatgtcggacacgttccccatccaccctcctagctctgctctcagagctaggcacatgggcacaggtcccctcccgtctgtcctctcccagcaactgtgccctggagggctccacatggcccccgtgtctctcgggcaccacccatatagcagtcccagagggcccatctgtaaagatcgagcttgtgtgtggtgtcgtggtcacatctcccgcttccccccatcctgtgtctgggcacagttcacatcaggacagcgtccattgtgctctcagtctgcctcaggtgtgtgcctggagggggcctggactggcatggatccagtgtgcagaagagccagcagggaaccggaagctctgatgtcaaggccagagcagttgagaatgggacccagagtagatgctgacctgggcactccaccattccggggccaccacagagatgccagcaggatgccactttgccagcccgacacacggacctttgtaaagaacagcaacaggcaggagaggcagcgtgtgaccagattgtgtcccgtcattgggtggcatatgttaactagctgccaaacaacttcaacccgtgtaattcatgtacatttgcaacagccagcccggtacagcctgtgtgacttctctgtatgtgtgtgtgtgtcgtgaccagcctaagtagttagcataactcaagatgctgatgtgcagtcacccatcagagaaaataaaaatggaaaccacgttcacagcattttaaaagtttttactttttttcttgattatggaagtaatccatgtacatagtaaatcattttaaaagtacaaaaagtatgaagaagtttgtcttaaaaaaaaaaaaaattattcctccaactagagaccactctgatgtttcgacgttttaaaaaagtctttttttgtgcattttttcatcgttgacatcatattgtggtatcatttataaccagttttttcctacttattataccaccatcttccacatcattaaaagctctttgtaaacattaaacactcttcataaatcat

SEQ ID NO: 8783 - protein, 98 aa, Homo sapiens [sequence omitted]

SEQ ID NO: 8784 - DNA, 1793 bp, Homo sapiens
tcccgggcgctggcggcggcggaggagagggagcagcgtcacgggcgcccggcccgttaaaacgctgctggctggagccacctccctccctgcagcccgcaacgggaatggagtaaagggagacccgtcgacctggccacggggatcagcgatggaattaaagcaatctttgtccacccatctggaagccgagaagcctctgaggcgctatggggcggtggaggagacggcttggaaaacggagagactggggagaagatggatgacatccagctctgcaaggacatcatggacttgaagcaggagctgcagaacttggtcgccatcccagaaaaagaaaaaaccaaactgcagaagcagagagaggatgagctaatccagaagatccacaaactggtgcagaagagagacttcctggtggacgatgcggaggtcgagcggttaagggagcaagaagaagacaaggaaatggctgatttcctgagaatcaagttaaaacctctagacaaagtaaccaaatctccagccagctcccgggcagagaagaaagcagagcccccacctagcaagcccacggtggccaagacggggctggcactgatcaaggattgttgcggggccacccagtgcaacatcatgtagcccccacgtggggtgccctgggccatggggacccccccccaccctcttgtctttatagcccccatttcaccggggcccaagagctctccaaggcagaaggggttgaaggcaagcccgtgactgtcaccagaggccatgggcacggcaggcgggcctggccaccctgtacagagtgtagcagtagggagtctctcaccgtcgcatggtcctccccagagcatgccgaacccaggagtctgtctcactgtttatccaaacaccaggaaaggtcctccctcaaaaaagcatatctccacttctctctagctgtatctaacccaccgtgtgaatgaactgggagaggggcatgctccccagctgtgtgtagtcgtgacttctcaacaatctagcaccatgtcggacacgttccccatccaccctcctagctctgctctcagagctaggcacatgggcacaggtcccctcccgtctgtcctctcccagcaactgtgccctggagggctccacatggcccccgtgtctctcgggcaccacccatatagcagtcccagagggcccatctgtaaagatcgagcttgtgtgtggtgtcgtggtcacatctcccgcttccccccatcctgtgtctgggcacagttcacatcaggacagcgtccattgtgctctcagtctgcctcaggtgtgtgcctggagggggcctggactggcatggatccagtgtgcagaagagccagcagggaaccggaagctctgatgtcaaggccagagcagttgagaatgggacccagagtagatgctgacctgggcactccaccattccggggccaccacagagatgccagcaggatgccactttgccagcccgacacacggacctttgtaaagaacagcaacaggcaggagaggcagcgtgtgaccagattgtgtcccgtcattgggtggcatatgttaactagctgccaaacaacttcaacccgtgtaattcatgtacatttgcaacagccagcccggtacagcctgtgtgacttctctgtatgtgtgtgtgtgtcgtgaccagcctaagtagttagcataactcaagatgctgatgtgcagtcacccatcagagaaaataaaaatggaaaccacgttcacagcattttaaaagtttttac

SEQ ID NO: 8785 - protein, 127 aa, Homo sapiens
MDDIQLCKDIMDLKQELQNLVAIPEKEKTKLQKQREDELIQKIHKLVQKRDFLVDDAEVERLREQEEDKEMADFLRIKLKPLDKVTKSPASSRAEKKAEPPPSKPTVAKTGLALIKDCCGATQCNIM

SEQ ID NO: 8786 - DNA, 2073 bp, Homo sapiens
tcccgggcgctggcggcggcggaggagagggagcagcgtcacgggcgcccggcccgttaaaacgctgctggctggagccacctccctccctgcagcccgcaacgggaatggagtaaagggagacccgtcgacctggccacggggatcagcgatggaattaaagcaatctttgtccacccatctggaagccgagaagcctctgaggcgctatggggcggtggaggagacggcttggaaaacggagagactggggagaagatggatgacatccagctctgcaaggacatcatggacttgaagcaggagctgcagaacttggtcgccatcccagaaaaagaaaaaaccaaactgcagaagcagagagaggatgagctaatccagaagatccacaaactggtgcagaagagagacttcctggtggacgatgcggaggtcgagcggttaagggagcaagaagaagacaaggaaatggctgatttcctgagaatcaagttaaaacctctagacaaagtaaccaaatctccagccagctcccgggcagagaagaaagcagagcccccacctagcaagcccacggtggccaagacggggctggcactgatcaaggattgttgcggggccacccagtgcaacatcatgtagcccccacgtggggtgccctgggccatggggacccccccccaccctcttgtctttatagcccccatttcaccggggcccaagagctctccaaggcagaaggggttgaaggcaagcccgtgactgtcaccagaggccatgggcacggcaggcgggcctggccaccctgtacagagtgtagcagtagggagtctctcaccgtcgcatggtcctccccagagcatgccgaacccaggagtctgtctcactgtttatccaaacaccaggaaaggtcctccctcaaaaaagcatatctccacttctctctagctgtatctaacccaccgtgtgaatgaactgggagaggggcatgctccccagctgtgtgtagtcgtgacttctcaacaatctagcaccatgtcggacacgttccccatccaccctcctagctctgctctcagagctaggcacatgggcacaggtcccctcccgtctgtcctctcccagcaactgtgccctggagggctccacatggcccccgtgtctctcgggcaccacccatatagcagtcccagagggcccatctgtaaagatcgagcttgtgtgtggtgtcgtggtcacatctcccgcttccccccatcctgtgtctgggcacagttcacatcaggacagcgtccattgtgctctcagtctgcctcaggtgtgtgcctggagggggcctggactggcatggatccagtgtgcagaagagccagcagggaaccggaagctctgatgtcaaggccagagcagttgagaatgggacccagagtagatgctgacctgggcactccaccattccggggccaccacagagatgccagcaggatgccactttgccagcccgacacacggacctttgtaaagaacagcaacaggcaggagaggcagcgtgtgaccagattgtgtcccgtcattgggtggcatatgttaactagctgccaaacaacttcaacccgtgtaattcatgtacatttgcaacagccagcccggtacagcctgtgtgacttctctgtatgtgtgtgtgtgtcgtgaccagcctaagtagttagcataactcaagatgctgatgtgcagtcacccatcagagaaaataaaaatggaaaccacgttcacagcattttaaaagtttttactttttttcttgattatggaagtaatccatgtacatagtaaatcattttaaaagtacaaaaagtatgaagaagtttgtcttaaaaaaaaaaaaaattattcctccaactagagaccactctgatgtttcgacgttttaaaaaagtctttttttgtgcattttttcatcgttgacatcatattgtggtatcatttataaccagttttttcctacttattataccaccatcttccacatcattaaaagctctttgtaaacattaaacactcttcataaatcat

SEQ ID NO: 8787 - protein, 127 aa, Homo sapiens; identical to SEQ ID NO: 8785

SEQ ID NO: 8788 - DNA, 1831 bp, Homo sapiens
ggctggggaaacagaaactcgcagaagttaaaaaaatgtgcttgaggtgccactggagaataacaatcatagccaggatgtgaagcctgtcagtttcctcagccgcaaattcttccatgtggggcgacctcacagagacgggatgtatgggacggcggagtgcaaagaaagatcagctggacatcatctccatggcggagacaaccatgatgccagaggagattgagctggagatggcaaaaattcagcgtctccgggaagtcttggtccgccgggagtctgagctcaggttcatgatggatgacatccagctctgcaaggacatcatggacttgaagcaggagctgcagaacttggtcgccatcccagaaaaagaaaaaaccaaactgcagaagcagagagaggatgagctaatccagaagatccacaaactggtgcagaagagagacttcctggtggacgatgcggaggtcgagcggttaagggagcaagaagaagacaaggaaatggctgatttcctgagaatcaagttaaaacctctagacaaagtaaccaaatctccagccagctcccgggcagagaagaaagcagagcccccacctagcaagcccacggtggccaagacggggctggcactgatcaaggattgttgcggggccacccagtgcaacatcatgtagcccccacgtggggtgccctgggccatggggacccccccccaccctcttgtctttatagcccccatttcaccggggcccaagagctctccaaggcagaaggggttgaaggcaagcccgtgactgtcaccagaggccatgggcacggcaggcgggcctggccaccctgtacagagtgtagcagtagggagtctctcaccgtcgcatggtcctccccagagcatgccgaacccaggagtctgtctcactgtttatccaaacaccaggaaaggtcctccctcaaaaaagcatatctccacttctctctagctgtatctaacccaccgtgtgaatgaactgggagaggggcatgctccccagctgtgtgtagtcgtgacttctcaacaatctagcaccatgtcggacacgttccccatccaccctcctagctctgctctcagagctaggcacatgggcacaggtcccctcccgtctgtcctctcccagcaactgtgccctggagggctccacatggcccccgtgtctctcgggcaccacccatatagcagtcccagagggcccatctgtaaagatcgagcttgtgtgtggtgtcgtggtcacatctcccgcttccccccatcctgtgtctgggcacagttcacatcaggacagcgtccattgtgctctcagtctgcctcaggtgtgtgcctggagggggcctggactggcatggatccagtgtgcagaagagccagcagggaaccggaagctctgatgtcaaggccagagcagttgagaatgggacccagagtagatgctgacctgggcactccaccattccggggccaccacagagatgccagcaggatgccactttgccagcccgacacacggacctttgtaaagaacagcaacaggcaggagaggcagcgtgtgaccagattgtgtcccgtcattgggtggcatatgttaactagctgccaaacaacttcaacccgtgtaattcatgtacatttgcaacagccagcccggtacagcctgtgtgacttctctgtatgtgtgtgtgtgtcgtgaccagcctaagtagttagcataactcaagatgctgatgtgcagtcacccatcagagaaaataaaaatggaaaccacgttcacagcattttaaaagtttttac

SEQ ID NO: 8789 - protein, 187 aa, Homo sapiens
MWGDLTETGCMGRRSAKKDQLDIISMAETTMMPEEIELEMAKIQRLREVLVRRESELRFMMDDIQLCKDIMDLKQELQNLVAIPEKEKTKLQKQREDELIQKIHKLVQKRDFLVDDAEVERLREQEEDKEMADFLRIKLKPLDKVTKSPASSRAEKKAEPPPSKPTVAKTGLALIKDCCGATQCNIM

SEQ ID NO: 8790 - DNA, 2111 bp, Homo sapiens
ggctggggaaacagaaactcgcagaagttaaaaaaatgtgcttgaggtgccactggagaataacaatcatagccaggatgtgaagcctgtcagtttcctcagccgcaaattcttccatgtggggcgacctcacagagacgggatgtatgggacggcggagtgcaaagaaagatcagctggacatcatctccatggcggagacaaccatgatgccagaggagattgagctggagatggcaaaaattcagcgtctccgggaagtcttggtccgccgggagtctgagctcaggttcatgatggatgacatccagctctgcaaggacatcatggacttgaagcaggagctgcagaacttggtcgccatcccagaaaaagaaaaaaccaaactgcagaagcagagagaggatgagctaatccagaagatccacaaactggtgcagaagagagacttcctggtggacgatgcggaggtcgagcggttaagggagcaagaagaagacaaggaaatggctgatttcctgagaatcaagttaaaacctctagacaaagtaaccaaatctccagccagctcccgggcagagaagaaagcagagcccccacctagcaagcccacggtggccaagacggggctggcactgatcaaggattgttgcggggccacccagtgcaacatcatgtagcccccacgtggggtgccctgggccatggggacccccccccaccctcttgtctttatagcccccatttcaccggggcccaagagctctccaaggcagaaggggttgaaggcaagcccgtgactgtcaccagaggccatgggcacggcaggcgggcctggccaccctgtacagagtgtagcagtagggagtctctcaccgtcgcatggtcctccccagagcatgccgaacccaggagtctgtctcactgtttatccaaacaccaggaaaggtcctccctcaaaaaagcatatctccacttctctctagctgtatctaacccaccgtgtgaatgaactgggagaggggcatgctccccagctgtgtgtagtcgtgacttctcaacaatctagcaccatgtcggacacgttccccatccaccctcctagctctgctctcagagctaggcacatgggcacaggtcccctcccgtctgtcctctcccagcaactgtgccctggagggctccacatggcccccgtgtctctcgggcaccacccatatagcagtcccagagggcccatctgtaaagatcgagcttgtgtgtggtgtcgtggtcacatctcccgcttccccccatcctgtgtctgggcacagttcacatcaggacagcgtccattgtgctctcagtctgcctcaggtgtgtgcctggagggggcctggactggcatggatccagtgtgcagaagagccagcagggaaccggaagctctgatgtcaaggccagagcagttgagaatgggacccagagtagatgctgacctgggcactccaccattccggggccaccacagagatgccagcaggatgccactttgccagcccgacacacggacctttgtaaagaacagcaacaggcaggagaggcagcgtgtgaccagattgtgtcccgtcattgggtggcatatgttaactagctgccaaacaacttcaacccgtgtaattcatgtacatttgcaacagccagcccggtacagcctgtgtgacttctctgtatgtgtgtgtgtgtcgtgaccagcctaagtagttagcataactcaagatgctgatgtgcagtcacccatcagagaaaataaaaatggaaaccacgttcacagcattttaaaagtttttactttttttcttgattatggaagtaatccatgtacatagtaaatcattttaaaagtacaaaaagtatgaagaagtttgtcttaaaaaaaaaaaaaattattcctccaactagagaccactctgatgtttcgacgttttaaaaaagtctttttttgtgcattttttcatcgttgacatcatattgtggtatcatttataaccagttttttcctacttattataccaccatcttccacatcattaaaagctctttgtaaacattaaacactcttcataaatcat

SEQ ID NO: 8791 - protein, 187 aa, Homo sapiens; identical to SEQ ID NO: 8789

SEQ ID NO: 8792 - DNA, 386 bp, Homo sapiens
gcagaagttaaaaaaatgtgcttgaggtgccactggagaataacaatcatagccaggatgtgaagcctgtcagtttcctcagccgcaaattcttccatgtggggcgacctcacagagacgggatgtatgggacggcggagtgcaaagaaagatcagctggacatcatctccatggcggagacaaccatgatgccagaggagattgagctggagatggcaaaaattcagcgtctccgggaagtcttggtccgccgggagtctgagctcaggttcatgtgagtgttttggggatgtggccaaggaaagaagtgtgtggaggagagaggaaaacctaatatttgttgatcgtctactgtgtgccaggcactgagataaaggcattatgc

SEQ ID NO: 8793 - protein, 60 aa, Homo sapiens
MWGDLTETGCMGRRSAKKDQLDIISMAETTMMPEEIELEMAKIQRLREVLVRRESELRFM

SEQ ID NO: 8794 - DNA, 462 bp, Homo sapiens
ttaaatagccatgcatccagtatctcgcagggtggtcatgaggagtaaaagagatcaagcatattaagtgctcagtccagtgcctgctaccaccctttacagaagtagccagaagttggaggcaatgtgtccatcttgcaccaggccaacatccccccatgcttccgcgtctcagccttgactgcctattgcaatcacatggagaactttaaagaaaatgctggggcctggtcttacagccagagtcttgtctagttgttccaaggcatagcctggtcattgagagtcttagaagcaggtaggctgatgccccctcacctcccacggcacagacatcccctcacctcttcgctggctgaaatagaagaaccctagtgtccatcagctgcttatagatgactcatcttcttaatcctttcttgacgaaaacttgcttcagatgttaataaaaagtacaaaatc

SEQ ID NO: 8795 - DNA, 387 bp, Homo sapiens
tgtgcctggccataatttttttatatcatacatacagaaaagagcagtattagtagttgttattgtaagaaaaatgaaaactaaggcagtctagaaagcccttggaagagagaagaataaactgcgcttgaggaagttgacatttgggaagctgaggcgggtggatcacctgaggtcaggagttcgagaccagcctggccaacatagtgaaatcccctctctaccaaaatacaaaaatttgctgggcatggtggcaagtgcctgttatctcagctacttgggaggctgaggcaggagaatcgcctgaacctgggaggtgaggttgcagtgagccaagatcccgccattgcactacagcctggacgacaagagcgaaactccatctca

SEQ ID NO: 8796 - protein, 58 aa, Homo sapiens
NPLSTKIQKFAGHGGKCLLSQLLGRLRQENRLNLGGEVAVSQDPAIALQPGRQERNSI

SEQ ID NO: 8797 - DNA, 1557 bp, Homo sapiens
ggctggcaaagagaagggagcgtggagccgccattttgaacatacctagaccaggtggccttttcctatgggcacagctgccagcattcacccgtaaaaagaaaaaaccaaactgcagaagcagagagaggatgagctaatccagaagatccacaaactggtgcagaagagagacttcctggtggacgatgcggaggtcgagcggttaagggagcaagaagaagacaaggaaatggctgatttcctgagaatcaagttaaaacctctagacaaagtaaccaaatctccagccagctcccgggcagagaagaaagcagagcccccacctagcaagcccacggtggccaagacggggctggcactgatcaaggattgttgcggggccacccagtgcaacatcatgtagcccccacgtggggtgccctgggccatggggacccccccccaccctcttgtctttatagcccccatttcaccggggcccaagagctctccaaggcagaaggggttgaaggcaagcccgtgactgtcaccagaggccatgggcacggcaggcgggcctggccaccctgtacagagtgtagcagtagggagtctctcaccgtcgcatggtcctccccagagcatgccgaacccaggagtctgtctcactgtttatccaaacaccaggaaaggtcctccctcaaaaaagcatatctccacttctctctagctgtatctaacccaccgtgtgaatgaactgggagaggggcatgctccccagctgtgtgtagtcgtgacttctcaacaatctagcaccatgtcggacacgttccccatccaccctcctagctctgctctcagagctaggcacatgggcacaggtcccctcccgtctgtcctctcccagcaactgtgccctggagggctccacatggcccccgtgtctctcgggcaccacccatatagcagtcccagagggcccatctgtaaagatcgagcttgtgtgtggtgtcgtggtcacatctcccgcttccccccatcctgtgtctgggcacagttcacatcaggacagcgtccattgtgctctcagtctgcctcaggtgtgtgcctggagggggcctggactggcatggatccagtgtgcagaagagccagcagggaaccggaagctctgatgtcaaggccagagcagttgagaatgggacccagagtagatgctgacctgggcactccaccattccggggccaccacagagatgccagcaggatgccactttgccagcccgacacacggacctttgtaaagaacagcaacaggcaggagaggcagcgtgtgaccagattgtgtcccgtcattgggtggcatatgttaactagctgccaaacaacttcaacccgtgtaattcatgtacatttgcaacagccagcccggtacagcctgtgtgacttctctgtatgtgtgtgtgtgtcgtgaccagcctaagtagttagcataactcaagatgctgatgtgcagtcacccatcagagaaaataaaaatggaaaccacgttcacagcattttaaaagtttttac

SEQ ID NO: 8798 - protein, 57 aa, Homo sapiens
MADFLRIKLKPLDKVTKSPASSRAEKKAEPPPSKPTVAKTGLALIKDCCGATQCNIM

SEQ ID NO: 8799 - DNA, 1837 bp, Homo sapiens
ggctggcaaagagaagggagcgtggagccgccattttgaacatacctagaccaggtggccttttcctatgggcacagctgccagcattcacccgtaaaaagaaaaaaccaaactgcagaagcagagagaggatgagctaatccagaagatccacaaactggtgcagaagagagacttcctggtggacgatgcggaggtcgagcggttaagggagcaagaagaagacaaggaaatggctgatttcctgagaatcaagttaaaacctctagacaaagtaaccaaatctccagccagctcccgggcagagaagaaagcagagcccccacctagcaagcccacggtggccaagacggggctggcactgatcaaggattgttgcggggccacccagtgcaacatcatgtagcccccacgtggggtgccctgggccatggggacccccccccaccctcttgtctttatagcccccatttcaccggggcccaagagctctccaaggcagaaggggttgaaggcaagcccgtgactgtcaccagaggccatgggcacggcaggcgggcctggccaccctgtacagagtgtagcagtagggagtctctcaccgtcgcatggtcctccccagagcatgccgaacccaggagtctgtctcactgtttatccaaacaccaggaaaggtcctccctcaaaaaagcatatctccacttctctctagctgtatctaacccaccgtgtgaatgaactgggagaggggcatgctccccagctgtgtgtagtcgtgacttctcaacaatctagcaccatgtcggacacgttccccatccaccctcctagctctgctctcagagctaggcacatgggcacaggtcccctcccgtctgtcctctcccagcaactgtgccctggagggctccacatggcccccgtgtctctcgggcaccacccatatagcagtcccagagggcccatctgtaaagatcgagcttgtgtgtggtgtcgtggtcacatctcccgcttccccccatcctgtgtctgggcacagttcacatcaggacagcgtccattgtgctctcagtctgcctcaggtgtgtgcctggagggggcctggactggcatggatccagtgtgcagaagagccagcagggaaccggaagctctgatgtcaaggccagagcagttgagaatgggacccagagtagatgctgacctgggcactccaccattccggggccaccacagagatgccagcaggatgccactttgccagcccgacacacggacctttgtaaagaacagcaacaggcaggagaggcagcgtgtgaccagattgtgtcccgtcattgggtggcatatgttaactagctgccaaacaacttcaacccgtgtaattcatgtacatttgcaacagccagcccggtacagcctgtgtgacttctctgtatgtgtgtgtgtgtcgtgaccagcctaagtagttagcataactcaagatgctgatgtgcagtcacccatcagagaaaataaaaatggaaaccacgttcacagcattttaaaagtttttactttttttcttgattatggaagtaatccatgtacatagtaaatcattttaaaagtacaaaaagtatgaagaagtttgtcttaaaaaaaaaaaaaattattcctccaactagagaccactctgatgtttcgacgttttaaaaaagtctttttttgtgcattttttcatcgttgacatcatattgtggtatcatttataaccagttttttcctacttattataccaccatcttccacatcattaaaagctctttgtaaacattaaacactcttcataaatcat

SEQ ID NO: 8800 - protein, 57 aa, Homo sapiens; identical to SEQ ID NO: 8798

SEQ ID NO: 8801 - DNA, 1416 bp, Homo sapiens
ataagggctatagagagatttttacaagtcagattttttgttccccaaatcttttaaatgaagccagtgactcccagttctcaacacatggccccagtcaagacagaacaccatggaaaaaaccctgtaagtattatggcactctccgaatcctcctgaaggcatttcctctacagacatagtgttacaggaagtgaaatgcaaatgtgcaattttttttaaaggagcttttaaacaaagtaataataattggtgttgagaacatcagttgccttattctaagatttcataaggctgagtttgcacgcttggacttcagttctgctagcatgtaaagagtggtggactttaaaaccgtaagaggtatcattacaagtcacctggaacagactcaaagaacaggttctttgggcaacagacaaagaagaatcaagttctgtgctgtcccgtgagtgtgtctgagtaccattcactggagttgctgcttaggtctgggacgtgtgtgtgactcttaacaattgctgtctgaaaatgagagagaagacttcggaagcacattgtgttcataatgtactccacaatggccagtccaattgctatctatttttttatccagaggcttaattaaatgatgtggtaaaatgatgtttgagcattaagacaatgtaattctttatttctgggtggaaagatataccggattaaatttatctgtttaaaaaaatgacaaaagttatcaccaaaaccccctttcccatcttgcactgtttgttttggattgggtttgggggaaagagatgtttttcttagttgtctactttgtttgaacacttttgttgtggttcaagtgctgttttgtgtgttgggaccaaacagttgtcaataaactttacaagcgagcatctattttgagtttcccaagtgagtggttttgtctgtctgtctgtctgtggggaggaattacaaaccaatacagttctgccatctttcattttgggtctcctcaacttctctccccttctggaaatagaattgtgaggtggagagtaaatccgtctacatcttagaggccttttaaactcacaccctctggcaagaatttaaaaggacccagaagagacttgagtaaattgcttcttgatgacatttttttcaagttcagcaatgttaaaagctgctaaagacctttccaaacatttcacgatggcaaatttgtgcagaaaaagttgagtagccatcgtgccccttttgagcggcgtcaggaggtcttgttaggtgtggactggggctggaacggtggctttgcatttatctttgtttgtttcccacctaggaaggtgattcagaggtgggggcctagaagacagctgtctgggggagagcagacctgtccgtagcagagggggctgcgctgat

SEQ ID NO: 8802 - protein, 33 aa, Homo sapiens
MKPVTPSSQHMAPVKTEHHGKNPVSIMALSESS

SEQ ID NO: 8803 - DNA, 2100 bp, Homo sapiens
aaaatggagattccaataccaggaaagagcaaaactctgacctctgactccagctcgtcctgcatctcagcagctgtccccgtgcctccctgcccctcctcggaaacctccgagtcactgctcagcaaggaccccgtggaaagcccggccaaaaagcaacccaaaaatagagtcaaattggcagccaacttttccttagcacctataaccaagctttaactcccatttggaatatagaattaggatgggaaaacactgtctgattctgcacacaaaagtgggtttcaaaaatacatccttttctgtgtcatgaaaaccccccgaagccattgacttcatcttacctgtgttctatcatgtttttcttttccattgaacacagctttgagctgaagtctttcttttcttcttcctttttctttcttttttcaattatttgaagaacttgtggcatttgttaaagaatccttaatatattttaccaaatttttagtaactattatgaaatacaatggtgttccaaaagaagaaagcactaaaaactcaactagcaggaagcggttttgcttccattgagccacgtcggtggtgtcatcctacatgtagcataatagagtctctcagcctttgcttactggtgtttccgacagtattaacccagtgcgtggcatgtctttgaagcaaagcctgtcccgctagcctgtgtgttcacacaccaaaggagaagggtaggcgaggggttcggagtgtattttcaggttggaatgtgaaggttcctggcttccatgtgacttgtaagtgtgccttgttttttatttaaactatgtctgtagttgacaaaagtggcttcatcacaaatttttttaaacgtttctatgttggaagcatctctgggtttcttgtggcgtctggtgtggaatggccttcctctctaggtgcctgaggtgtccgctgacgggtggcctctcacccccctctagagaaacctgacatttacaatggattgtatttgtccggcaaaaaaggcggattcattcatagagcagaaagaacctgttggcgtaaggtcttccactagttagatggtttcttttggggaaatgtttatatttggtaacttctagaaagccagaaaatggactctgatttcatagcattttgataaaatgccacaaaataagggctatagagagatttttacaagtcagattttttgttccccaaatcttttaaatgaagccagtgactcccagttctcaacacatggccccagtcaagacagaacaccatggaaaaaaccctgtaagtattatggcactctccgaatcctcctgaaggcatttcctctacagacatagtgttacaggaagtgaaatgcaaatgtgcaattttttttaaaggagcttttaaacaaagtaataataattggtgttgagaacatcagttgccttattctaagatttcataaggctgagtttgcacgcttggacttcagttctgctagcatgtaaagagtggtggactttaaaaccgtaagaggtatcattacaagtcacctggaacagactcaaagaacaggttctttgggcaacagacaaagaagaatcaagttctgtgctgtcccgtgagtgtgtctgagtaccattcactggagttgctgcttaggtctgggacgtgtgtgtgactcttaacaattgctgtctgaaaatgagagagaagacttcggaagcacattgtgttcataatgtactccacaatggccagtccaattgctatctatttttttatccagaggcttaattaaatgatgtggtaaaatgatgtttgagcattaagacaatgtaattctttatttctgggtggaaagatataccggattaaatttatctgtttaaaaaaatgacaaaagttatcaccaaaaccccctttcccatcttgcactgtttgttttggattgggtttgggggaaagagatgtttttcttagttgtctactttgtttgaacacttttgttgtggttcaagtgctgttttgtgtgttgggaccaaacagttgtcaataaactttacaagcgagcatctattttgagtttcccaagtg

SEQ ID NO: 8804 - protein, 39 aa, Homo sapiens
MSVVDKSGFITNFFKRFYVGSISGFLVASGVEWPSSLGA

SEQ ID NO: 8805 - DNA, 2887 bp, Homo sapiens
tttttttttttttttttaataccttaaatacttcttgactctcttatctttaaggcttagaaggaaaacttcaggtgtgagcccagggtgtgtgctgggggtgggcgtggaggtcctgtggtgtcacggccctccttgtttgcccagggcccagtcacacagagcaggagcttctccgcctgaccgacgactcccccgtcgacctcctgtgtgcgcctgtcccctcgtgcctgccgtcccctcagctgagaccagaccccgttatcctccaatctgctgatctcattcagtttgaggagcgccctcaagagccttctgaaattatgattttaaaccaagaagaaaaaatggagattccaataccaggaaagagcaaaactctgacctctgactccagctcgtcctgcatctcagcagctgtccccgtgcctccctgcccctcctcggaaacctccgagtcactgctcagcaaggaccccgtggaaagcccggccaaaaagcaacccaaaaatagagtcaaattggcagccaacttttccttagcacctataaccaagctttaactcccatttggaatatagaattaggatgggaaaacactgtctgattctgcacacaaaagtgggtttcaaaaatacatccttttctgtgtcatgaaaaccccccgaagccattgacttcatcttacctgtgttctatcatgtttttcttttccattgaacacagctttgagctgaagtctttcttttcttcttcctttttctttcttttttcaattatttgaagaacttgtggcatttgttaaagaatccttaatatattttaccaaatttttagtaactattatgaaatacaatggtgttccaaaagaagaaagcactaaaaactcaactagcaggaagcggttttgcttccattgagccacgtcggtggtgtcatcctacatgtagcataatagagtctctcagcctttgcttactggtgtttccgacagtattaacccagtgcgtggcatgtctttgaagcaaagcctgtcccgctagcctgtgtgttcacacaccaaaggagaagggtaggcgaggggttcggagtgtattttcaggttggaatgtgaaggttcctggcttccatgtgacttgtaagtgtgccttgttttttatttaaactatgtctgtagttgacaaaagtggcttcatcacaaatttttttaaacgtttctactttggggttccatttaggagctttctagaaagttgaggatgtttgaagcttcccttctgtgttccagtttgatatgggttaggttaaggaaaaggagatggtctcgatgtcatggatttaaagtcagcatttggattacaacacacattattgtgtgtcgagaggcagcattggaaagagcctgattttctaaaatatgcatcaagtgcataaattacaaatcagagctgagtggggaggtgcttcagcagcagcgggatcaatacgatttccactgggaagagacaggaattctacctacacataggaaggccaaggttgatccacttaaccttgttattgtaattttaaagctggtatcggtagctgggaagctttatgtgtgtgtatgtcagctcagcatcttttaatcgtgtctgattttactctcgttacttctcgctgttggaagcatctctgggtttcttgtggcgtctggtgtggaatggccttcctctctaggtgcctgaggtgtccgctgacgggtggcctctcacccccctctagagaaacctgacatttacaatggattgtatttgtccggcaaaaaaggcggattcattcatagagcagaaagaacctgttggcgtaaggtcttccactagttagatggtttcttttggggaaatgtttatatttggtaacttctagaaagccagaaaatggactctgatttcatagcattttgataaaatgccacaaaataagggctatagagagatttttacaagtcagattttttgttccccaaatcttttaaatgaagccagtgactcccagttctcaacacatggccccagtcaagacagaacaccatggaaaaaaccctgtaagtattatggcactctccgaatcctcctgaaggcatttcctctacagacatagtgttacaggaagtgaaatgcaaatgtgcaattttttttaaaggagcttttaaacaaagtaataataattggtgttgagaacatcagttgccttattctaagatttcataaggctgagtttgcacgcttggacttcagttctgctagcatgtaaagagtggtggactttaaaaccgtaagaggtatcattacaagtcacctggaacagactcaaagaacaggttctttgggcaacagacaaagaagaatcaagttctgtgctgtcccgtgagtgtgtctgagtaccattcactggagttgctgcttaggtctgggacgtgtgtgtgactcttaacaattgctgtctgaaaatgagagagaagacttcggaagcacattgtgttcataatgtactccacaatggccagtccaattgctatctatttttttatccagaggcttaattaaatgatgtggtaaaatgatgtttgagcattaagacaatgtaattctttatttctgggtggaaagatataccggattaaatttatctgtttaaaaaaatgacaaaagttatcaccaaaaccccctttcccatcttgcactgtttgttttggattgggtttgggggaaagagatgtttttcttagttgtctactttgtttgaacacttttgttgtggttcaagtgctgttttgtgtgttgggaccaaacagttgtcaataaactttacaagcgagcatctattttgagtttcccaagtg

SEQ ID NO: 8806 - protein, 79 aa, Homo sapiens
MILNQEEKMEIPIPGKSKTLTSDSSSSCISAAVPVPPCPSSETSESLLSKDPVESPAKKQPKNRVKLAANFSLAPITKL

SEQ ID NO: 8807 - DNA, 2866 bp, Homo sapiens
cctcggaactcaagcttggagctgacggcagtggcttagaaggaaaacttcaggtgtgagcccagggtgtgtgctgggggtgggcgtggaggtcctgtggtgtcacggccctccttgtttgcccagggcccagtcacacagagcaggagcttctccgcctgaccgacgactcccccgtcgacctcctgtgtgcgcctgtcccctcgtgcctgccgtcccctcagctgagaccagaccccgttatcctccaatctgctgatctcattcagtttgaggagcgccctcaagagccttctgaaattatgattttaaaccaagaagaaaaaatggagattccaataccaggaaagagcaaaactctgacctctgactccagctcgtcctgcatctcagcagctgtccccgtgcctccctgcccctcctcggaaacctccgagtcactgctcagcaaggaccccgtggaaagcccggccaaaaagcaacccaaaaatagagtcaaattggcagccaacttttccttagcacctataaccaagctttaactcccatttggaatatagaattaggatgggaaaacactgtctgattctgcacacaaaagtgggtttcaaaaatacatccttttctgtgtcatgaaaaccccccgaagccattgacttcatcttacctgtgttctatcatgtttttcttttccattgaacacagctttgagctgaagtctttcttttcttcttcctttttctttcttttttcaattatttgaagaacttgtggcatttgttaaagaatccttaatatattttaccaaatttttagtaactattatgaaatacaatggtgttccaaaagaagaaagcactaaaaactcaactagcaggaagcggttttgcttccattgagccacgtcggtggtgtcatcctacatgtagcataatagagtctctcagcctttgcttactggtgtttccgacagtattaacccagtgcgtggcatgtctttgaagcaaagcctgtcccgctagcctgtgtgttcacacaccaaaggagaagggtaggcgaggggttcggagtgtattttcaggttggaatgtgaaggttcctggcttccatgtgacttgtaagtgtgccttgttttttatttaaactatgtctgtagttgacaaaagtggcttcatcacaaatttttttaaacgtttctactttggggttccatttaggagctttctagaaagttgaggatgtttgaagcttcccttctgtgttccagtttgatatgggttaggttaaggaaaaggagatggtctcgatgtcatggatttaaagtcagcatttggattacaacacacattattgtgtgtcgagaggcagcattggaaagagcctgattttctaaaatatgcatcaagtgcataaattacaaatcagagctgagtggggaggtgcttcagcagcagcgggatcaatacgatttccactgggaagagacaggaattctacctacacataggaaggccaaggttgatccacttaaccttgttattgtaattttaaagctggtatcggtagctgggaagctttatgtgtgtgtatgtcagctcagcatcttttaatcgtgtctgattttactctcgttacttctcgctgttggaagcatctctgggtttcttgtggcgtctggtgtggaatggccttcctctctaggtgcctgaggtgtccgctgacgggtggcctctcacccccctctagagaaacctgacatttacaatggattgtatttgtccggcaaaaaaggcggattcattcatagagcagaaagaacctgttggcgtaaggtcttccactagttagatggtttcttttggggaaatgtttatatttggtaacttctagaaagccagaaaatggactctgatttcatagcattttgataaaatgccacaaaataagggctatagagagatttttacaagtcagattttttgttccccaaatcttttaaatgaagccagtgactcccagttctcaacacatggccccagtcaagacagaacaccatggaaaaaaccctgtaagtattatggcactctccgaatcctcctgaaggcatttcctctacagacatagtgttacaggaagtgaaatgcaaatgtgcaattttttttaaaggagcttttaaacaaagtaataataattggtgttgagaacatcagttgccttattctaagatttcataaggctgagtttgcacgcttggacttcagttctgctagcatgtaaagagtggtggactttaaaaccgtaagaggtatcattacaagtcacctggaacagactcaaagaacaggttctttgggcaacagacaaagaagaatcaagttctgtgctgtcccgtgagtgtgtctgagtaccattcactggagttgctgcttaggtctgggacgtgtgtgtgactcttaacaattgctgtctgaaaatgagagagaagacttcggaagcacattgtgttcataatgtactccacaatggccagtccaattgctatctatttttttatccagaggcttaattaaatgatgtggtaaaatgatgtttgagcattaagacaatgtaattctttatttctgggtggaaagatataccggattaaatttatctgtttaaaaaaatgacaaaagttatcaccaaaaccccctttcccatcttgcactgtttgttttggattgggtttgggggaaagagatgtttttcttagttgtctactttgtttgaacacttttgttgtggttcaagtgctgttttgtgtgttgggaccaaacagttgtcaataaactttacaagcgagcatctattttgagtttcccaagtg

SEQ ID NO: 8808 - protein, 79 aa, Homo sapiens; identical to SEQ ID NO: 8806

SEQ ID NO: 8809 - DNA, 4462 bp, Homo sapiens
tttgcaaagaatgtgcggtctttacttcatacttaccactaccagcagattttccttcatgagttttccatggcctataccaagtatgtcggagaaactctgcagcccaagacctacggccacagcagcgtggaggagctcttgggagcaattccacaggtgggcatttttctcagcttccgggagagcatcttctgaacagccacaggctaactgtcctgaacagaaaaataaaatgctgccagaataatggaacggcaggcattttgaattgatcctttcaaaacatactgttggtctaaagtaaatgattttagcatttctccttgattctttctgtaaacctttattaaatccctatatgccaggtgagtaagtttcaggctgtaactctagaaaggtgttggttaatgggagagtcaagacccccaagcaggcaactagtcagggcggtcagggcagtgggcgcgctgaggagggccgtgtcagggcccacttcccaagcctggggagcctgttgcaaaaccttcaaggatgtgcctgagggaagcacgtgacaaggaggggagagagcattctgggcaaaggggatgatgacatgagcagatgcagggttgtgacaagtggcatggagtgtcgagaggctaagagggagctgagagctcggttagggagggcgtggctcctccaggtaaggagggaggactgtgttggagagagctggagcccaggtttgcatttgaaaagcaccccagtggtgctgtccatggtagagccgagagaagcaggcatggagaagggaactgggctaggatcctggccactgcagaggtctgggtcagtgttagatggagggattgagccagagtaaaaatagtagaatagaggaagtaggaaggacccaggcaaagcttgcctgggagctgagatcagtgacctggcgacggtgtgcacatgtagggggcctgggagcctagctccactactaccactctgcttggctgagatggagagcggcaccatcagggagaggactttaagatgctgataatgaacttagtttaaagggtctgagagattgctcttaattcttttaggtggttgttcagtttctgcaaaaaaatggcaaagagctctcatgtgagaactaccttaatttatatgccaaagctggtgtttggaagacagtctttttaagaattataaaggatatttctgaaactgtgtctcatgatttttgaactactctgctttttataggggtatgtttctgtcagcttctgttgctttaaaagctaaggagagagtagagaaacatgcttcttggcagtaactcagctcctaaattctagcctaaggcaggctccgtaggtcacactcttcctgaatgttagggcttctgtcccctccttttccgctgcttaaccagtagtatgtcttgtgtgcaggtggtctggataaaaggacatggtcataagagaattgtagtgttaaaaaatgacatgaaaagtaagtaagcacccatcccctccccccttaaaaaatcacggttctctcactgacatttctctctgacgggtgctctttgtcctgtaggtcgtttgagttcactcagtctctcccctgccaatcatgaaaaccagccctcggagggcgagcgcatcctggaggtgcccgaatcgcacacagcctcggaactcaagcttggagctgacggcagtgggcccagtcacacagagcaggagcttctccgcctgaccgacgactcccccgtcgacctcctgtgtgcgcctgtcccctcgtgcctgccgtcccctcagctgagaccagaccccgttatcctccaatctgctgatctcattcagtttgaggagcgccctcaagagccttctgaaattatgattttaaaccaagaagaaaaaatggagattccaataccaggaaagagcaaaactctgacctctgactccagctcgtcctgcatctcagcagctgtccccgtgcctccctgcccctcctcggaaacctccgagtcactgctcagcaaggaccccgtggaaagcccggccaaaaagcaacccaaaaatagagtcaaattggcagccaacttttccttagcacctataaccaagctttaactcccatttggaatatagaattaggatgggaaaacactgtctgattctgcacacaaaagtgggtttcaaaaatacatccttttctgtgtcatgaaaaccccccgaagccattgacttcatcttacctgtgttctatcatgtttttcttttccattgaacacagctttgagctgaagtctttcttttcttcttcctttttctttcttttttcaattatttgaagaacttgtggcatttgttaaagaatccttaatatattttaccaaatttttagtaactattatgaaatacaatggtgttccaaaagaagaaagcactaaaaactcaactagcaggaagcggttttgcttccattgagccacgtcggtggtgtcatcctacatgtagcataatagagtctctcagcctttgcttactggtgtttccgacagtattaacccagtgcgtggcatgtctttgaagcaaagcctgtcccgctagcctgtgtgttcacacaccaaaggagaagggtaggcgaggggttcggagtgtattttcaggttggaatgtgaaggttcctggcttccatgtgacttgtaagtgtgccttgttttttatttaaactatgtctgtagttgacaaaagtggcttcatcacaaatttttttaaacgtttctactttggggttccatttaggagctttctagaaagttgaggatgtttgaagcttcccttctgtgttccagtttgatatgggttaggttaaggaaaaggagatggtctcgatgtcatggatttaaagtcagcatttggattacaacacacattattgtgtgtcgagaggcagcattggaaagagcctgattttctaaaatatgcatcaagtgcataaattacaaatcagagctgagtggggaggtgcttcagcagcagcgggatcaatacgatttccactgggaagagacaggaattctacctacacataggaaggccaaggttgatccacttaaccttgttattgtaattttaaagctggtatcggtagctgggaagctttatgtgtgtgtatgtcagctcagcatcttttaatcgtgtctgattttactctcgttacttctcgctgttggaagcatctctgggtttcttgtggcgtctggtgtggaatggccttcctctctaggtgcctgaggtgtccgctgacgggtggcctctcacccccctctagagaaacctgacatttacaatggattgtatttgtccggcaaaaaaggcggattcattcatagagcagaaagaacctgttggcgtaaggtcttccactagttagatggtttcttttggggaaatgtttatatttggtaacttctagaaagccagaaaatggactctgatttcatagcattttgataaaatgccacaaaataagggctatagagagatttttacaagtcagattttttgttccccaaatcttttaaatgaagccagtgactcccagttctcaacacatggccccagtcaagacagaacaccatggaaaaaaccctgtaagtattatggcactctccgaatcctcctgaaggcatttcctctacagacatagtgttacaggaagtgaaatgcaaatgtgcaattttttttaaaggagcttttaaacaaagtaataataattggtgttgagaacatcagttgccttattctaagatttcataaggctgagtttgcacgcttggacttcagttctgctagcatgtaaagagtggtggactttaaaaccgtaagaggtatcattacaagtcacctggaacagactcaaagaacaggttctttgggcaacagacaaagaagaatcaagttctgtgctgtcccgtgagtgtgtctgagtaccattcactggagttgctgcttaggtctgggacgtgtgtgtgactcttaacaattgctgtctgaaaatgagagagaagacttcggaagcacattgtgttcataatgtactccacaatggccagtccaattgctatctatttttttatccagaggcttaattaaatgatgtggtaaaatgatgtttgagcattaagacaatgtaattctttatttctgggtggaaagatataccggattaaatttatctgtttaaaaaaatgacaaaagttatcaccaaaaccccctttcccatcttgcactgtttgttttggattgggtttgggggaaagagatgtttttcttagttgtctactttgtttgaacacttttgttgtggttcaagtgctgttttgtgtgttgggaccaaacagttgtcaataaactttacaagcgagcatctattttgagtttcccaagtg

SEQ ID NO: 8810 - protein, 41 aa, Homo sapiens
MKTSPRRASASWRCPNRTQPRNSSLELTAVGPVTQSRSFSA

SEQ ID NO: 8811 - DNA, 2083 bp, Homo sapiens
aaaatggagattccaataccaggaaagagcaaaactctgacctctgactccagctcgtcctgcatctcagcagctgtccccgtgcctccctgcccctcctcggaaacctccgagtcactgctcagcaaggaccccgtggaaagcccggccaaaaagcaacccaaaaatagagtcaaattggcagccaacttttccttagcacctataaccaagctttaactcccatttggaatatagaattaggatgggaaaacactgtctgattctgcacacaaaagtgggtttcaaaaatacatccttttctgtgtcatgaaaaccccccgaagccattgacttcatcttacctgtgttctatcatgtttttcttttccattgaacacagctttgagctgaagtctttcttttcttcttcctttttctttcttttttcaattatttgaagaacttgtggcatttgttaaagaatccttaatatattttaccaaatttttagtaactattatgaaatacaatggtgttccaaaagaagaaagcactaaaaactcaactagcaggaagcggttttgcttccattgagccacgtcggtggtgtcatcctacatgtagcataatagagtctctcagcctttgcttactggtgtttccgacagtattaacccagtgcgtggcatgtctttgaagcaaagcctgtcccgctagcctgtgtgttcacacaccaaaggagaagggtaggcgaggggttcggagtgtattttcaggttggaatgtgaaggttcctggcttccatgtgacttgtaagtgtgccttgttttttatttaaactatgtctgtagttgacaaaagtggcttcatcacaaatttttttaaacgtttctatgttggaagcatctctgggtttcttgtggcgtctggtgtggaatggccttcctctctaggtgcctgaggtgtccgctgacgggtggcctctcacccccctctagagaaacctgacatttacaatggattgtatttgtccggcaaaaaaggcggattcattcatagagcagaaagaacctgttggcgtaaggtcttccactagttagatggtttcttttggggaaatgtttatatttggtaacttctagaaagccagaaaatggactctgatttcatagcattttgataaaatgccacaaaataagggctatagagagatttttacaagtcagattttttgttccccaaatcttttaaatgaagccagtgactcccagttctcaacacatggccccagtcaagacagaacaccatggaaaaaaccctgtaagtattatggcactctccgaatcctcctgaaggcatttcctctacagacatagtgttacaggaagtgaaatgcaaatgtgcaattttttttaaaggagcttttaaacaaagtaataataattggtgttgagaacatcagttgccttattctaagatttcataaggctgagtttgcacgcttggacttcagttctgctagcatgtaaagagtggtggactttaaaaccgtaagaggtatcattacaagtcacctggaacagactcaaagaacaggttctttgggcaacagacaaagaagaatcaagttctgtgctgtcccgtgagtgtgtctgagtaccattcactggagttgctgcttaggtctgggacgtgtgtgtgactcttaacaattgctgtctgaaaatgagagagaagacttcggaagcacattgtgttcataatgtactccacaatggccagtccaattgctatctatttttttatccagaggcttaattaaatgatgtggtaaaatgatgtttgagcattaagacaatgtaattctttatttctgggtggaaagatataccggattaaatttatctgtttaaaaaaatgacaaaagttatcaccaaaaccccctttcccatcttgcactgtttgttttggattgggtttgggggaaagagatgtttttcttagttgtctactttgtttgaacacttttgttgtggttcaagtgctgttttgtgtgttgggaccaaacagttgtcaataaactttacaagcgagcatctat

SEQ ID NO: 8812 - protein, 39 aa, Homo sapiens; identical to SEQ ID NO: 8804

SEQ ID NO: 8813 - DNA, 2870 bp, Homo sapiens
tttttttttttttttttaataccttaaatacttcttgactctcttatctttaaggcttagaaggaaaacttcaggtgtgagcccagggtgtgtgctgggggtgggcgtggaggtcctgtggtgtcacggccctccttgtttgcccagggcccagtcacacagagcaggagcttctccgcctgaccgacgactcccccgtcgacctcctgtgtgcgcctgtcccctcgtgcctgccgtcccctcagctgagaccagaccccgttatcctccaatctgctgatctcattcagtttgaggagcgccctcaagagccttctgaaattatgattttaaaccaagaagaaaaaatggagattccaataccaggaaagagcaaaactctgacctctgactccagctcgtcctgcatctcagcagctgtccccgtgcctccctgcccctcctcggaaacctccgagtcactgctcagcaaggaccccgtggaaagcccggccaaaaagcaacccaaaaatagagtcaaattggcagccaacttttccttagcacctataaccaagctttaactcccatttggaatatagaattaggatgggaaaacactgtctgattctgcacacaaaagtgggtttcaaaaatacatccttttctgtgtcatgaaaaccccccgaagccattgacttcatcttacctgtgttctatcatgtttttcttttccattgaacacagctttgagctgaagtctttcttttcttcttcctttttctttcttttttcaattatttgaagaacttgtggcatttgttaaagaatccttaatatattttaccaaatttttagtaactattatgaaatacaatggtgttccaaaagaagaaagcactaaaaactcaactagcaggaagcggttttgcttccattgagccacgtcggtggtgtcatcctacatgtagcataatagagtctctcagcctttgcttactggtgtttccgacagtattaacccagtgcgtggcatgtctttgaagcaaagcctgtcccgctagcctgtgtgttcacacaccaaaggagaagggtaggcgaggggttcggagtgtattttcaggttggaatgtgaaggttcctggcttccatgtgacttgtaagtgtgccttgttttttatttaaactatgtctgtagttgacaaaagtggcttcatcacaaatttttttaaacgtttctactttggggttccatttaggagctttctagaaagttgaggatgtttgaagcttcccttctgtgttccagtttgatatgggttaggttaaggaaaaggagatggtctcgatgtcatggatttaaagtcagcatttggattacaacacacattattgtgtgtcgagaggcagcattggaaagagcctgattttctaaaatatgcatcaagtgcataaattacaaatcagagctgagtggggaggtgcttcagcagcagcgggatcaatacgatttccactgggaagagacaggaattctacctacacataggaaggccaaggttgatccacttaaccttgttattgtaattttaaagctggtatcggtagctgggaagctttatgtgtgtgtatgtcagctcagcatcttttaatcgtgtctgattttactctcgttacttctcgctgttggaagcatctctgggtttcttgtggcgtctggtgtggaatggccttcctctctaggtgcctgaggtgtccgctgacgggtggcctctcacccccctctagagaaacctgacatttacaatggattgtatttgtccggcaaaaaaggcggattcattcatagagcagaaagaacctgttggcgtaaggtcttccactagttagatggtttcttttggggaaatgtttatatttggtaacttctagaaagccagaaaatggactctgatttcatagcattttgataaaatgccacaaaataagggctatagagagatttttacaagtcagattttttgttccccaaatcttttaaatgaagccagtgactcccagttctcaacacatggccccagtcaagacagaacaccatggaaaaaaccctgtaagtattatggcactctccgaatcctcctgaaggcatttcctctacagacatagtgttacaggaagtgaaatgcaaatgtgcaattttttttaaaggagcttttaaacaaagtaataataattggtgttgagaacatcagttgccttattctaagatttcataaggctgagtttgcacgcttggacttcagttctgctagcatgtaaagagtggtggactttaaaaccgtaagaggtatcattacaagtcacctggaacagactcaaagaacaggttctttgggcaacagacaaagaagaatcaagttctgtgctgtcccgtgagtgtgtctgagtaccattcactggagttgctgcttaggtctgggacgtgtgtgtgactcttaacaattgctgtctgaaaatgagagagaagacttcggaagcacattgtgttcataatgtactccacaatggccagtccaattgctatctatttttttatccagaggcttaattaaatgatgtggtaaaatgatgtttgagcattaagacaatgtaattctttatttctgggtggaaagatataccggattaaatttatctgtttaaaaaaatgacaaaagttatcaccaaaaccccctttcccatcttgcactgtttgttttggattgggtttgggggaaagagatgtttttcttagttgtctactttgtttgaacacttttgttgtggttcaagtgctgttttgtgtgttgggaccaaacagttgtcaataaactttacaagcgagcatctat

SEQ ID NO: 8814 - protein, 79 aa, Homo sapiens; identical to SEQ ID NO: 8806

SEQ ID NO: 8815 - DNA, 2849 bp, Homo sapiens
cctcggaactcaagcttggagctgacggcagtggcttagaaggaaaacttcaggtgtgagcccagggtgtgtgctgggggtgggcgtggaggtcctgtggtgtcacggccctccttgtttgcccagggcccagtcacacagagcaggagcttctccgcctgaccgacgactcccccgtcgacctcctgtgtgcgcctgtcccctcgtgcctgccgtcccctcagctgagaccagaccccgttatcctccaatctgctgatctcattcagtttgaggagcgccctcaagagccttctgaaattatgattttaaaccaagaagaaaaaatggagattccaataccaggaaagagcaaaactctgacctctgactccagctcgtcctgcatctcagcagctgtccccgtgcctccctgcccctcctcggaaacctccgagtcactgctcagcaaggaccccgtggaaagcccggccaaaaagcaacccaaaaatagagtcaaattggcagccaacttttccttagcacctataaccaagctttaactcccatttggaatatagaattaggatgggaaaacactgtctgattctgcacacaaaagtgggtttcaaaaatacatccttttctgtgtcatgaaaaccccccgaagccattgacttcatcttacctgtgttctatcatgtttttcttttccattgaacacagctttgagctgaagtctttcttttcttcttcctttttctttcttttttcaattatttgaagaacttgtggcatttgttaaagaatccttaatatattttaccaaatttttagtaactattatgaaatacaatggtgttccaaaagaagaaagcactaaaaactcaactagcaggaagcggttttgcttccattgagccacgtcggtggtgtcatcctacatgtagcataatagagtctctcagcctttgcttactggtgtttccgacagtattaacccagtgcgtggcatgtctttgaagcaaagcctgtcccgctagcctgtgtgttcacacaccaaaggagaagggtaggcgaggggttcggagtgtattttcaggttggaatgtgaaggttcctggcttccatgtgacttgtaagtgtgccttgttttttatttaaactatgtctgtagttgacaaaagtggcttcatcacaaatttttttaaacgtttctactttggggttccatttaggagctttctagaaagttgaggatgtttgaagcttcccttctgtgttccagtttgatatgggttaggttaaggaaaaggagatggtctcgatgtcatggatttaaagtcagcatttggattacaacacacattattgtgtgtcgagaggcagcattggaaagagcctgattttctaaaatatgcatcaagtgcataaattacaaatcagagctgagtggggaggtgcttcagcagcagcgggatcaatacgatttccactgggaagagacaggaattctacctacacataggaaggccaaggttgatccacttaaccttgttattgtaattttaaagctggtatcggtagctgggaagctttatgtgtgtgtatgtcagctcagcatcttttaatcgtgtctgattttactctcgttacttctcgctgttggaagcatctctgggtttcttgtggcgtctggtgtggaatggccttcctctctaggtgcctgaggtgtccgctgacgggtggcctctcacccccctctagagaaacctgacatttacaatggattgtatttgtccggcaaaaaaggcggattcattcatagagcagaaagaacctgttggcgtaaggtcttccactagttagatggtttcttttggggaaatgtttatatttggtaacttctagaaagccagaaaatggactctgatttcatagcattttgataaaatgccacaaaataagggctatagagagatttttacaagtcagattttttgttccccaaatcttttaaatgaagccagtgactcccagttctcaacacatggccccagtcaagacagaacaccatggaaaaaaccctgtaagtattatggcactctccgaatcctcctgaaggcatttcctctacagacatagtgttacaggaagtgaaatgcaaatgtgcaattttttttaaaggagcttttaaacaaagtaataataattggtgttgagaacatcagttgccttattctaagatttcataaggctgagtttgcacgcttggacttcagttctgctagcatgtaaagagtggtggactttaaaaccgtaagaggtatcattacaagtcacctggaacagactcaaagaacaggttctttgggcaacagacaaagaagaatcaagttctgtgctgtcccgtgagtgtgtctgagtaccattcactggagttgctgcttaggtctgggacgtgtgtgtgactcttaacaattgctgtctgaaaatgagagagaagacttcggaagcacattgtgttcataatgtactccacaatggccagtccaattgctatctatttttttatccagaggcttaattaaatgatgtggtaaaatgatgtttgagcattaagacaatgtaattctttatttctgggtggaaagatataccggattaaatttatctgtttaaaaaaatgacaaaagttatcaccaaaaccccctttcccatcttgcactgtttgttttggattgggtttgggggaaagagatgtttttcttagttgtctactttgtttgaacacttttgttgtggttcaagtgctgttttgtgtgttgggaccaaacagttgtcaataaactttacaagcgagcatctat

SEQ ID NO: 8816 - protein, 79 aa, Homo sapiens; identical to SEQ ID NO: 8806

SEQ ID NO: 8817 - DNA, 4445 bp, Homo sapiens
tttgcaaagaatgtgcggtctttacttcatacttaccactaccagcagattttccttcatgagttttccatggcctataccaagtatgtcggagaaactctgcagcccaagacctacggccacagcagcgtggaggagctcttgggagcaattccacaggtgggcatttttctcagcttccgggagagcatcttctgaacagccacaggctaactgtcctgaacagaaaaataaaatgctgccagaataatggaacggcaggcattttgaattgatcctttcaaaacatactgttggtctaaagtaaatgattttagcatttctccttgattctttctgtaaacctttattaaatccctatatgccaggtgagtaagtttcaggctgtaactctagaaaggtgttggttaatgggagagtcaagacccccaagcaggcaactagtcagggcggtcagggcagtgggcgcgctgaggagggccgtgtcagggcccacttcccaagcctggggagcctgttgcaaaaccttcaaggatgtgcctgagggaagcacgtgacaaggaggggagagagcattctgggcaaaggggatgatgacatgagcagatgcagggttgtgacaagtggcatggagtgtcgagaggctaagagggagctgagagctcggttagggagggcgtggctcctccaggtaaggagggaggactgtgttggagagagctggagcccaggtttgcatttgaaaagcaccccagtggtgctgtccatggtagagccgagagaagcaggcatggagaagggaactgggctaggatcctggccactgcagaggtctgggtcagtgttagatggagggattgagccagagtaaaaatagtagaatagaggaagtaggaaggacccaggcaaagcttgcctgggagctgagatcagtgacctggcgacggtgtgcacatgtagggggcctgggagcctagctccactactaccactctgcttggctgagatggagagcggcaccatcagggagaggactttaagatgctgataatgaacttagtttaaagggtctgagagattgctcttaattcttttaggtggttgttcagtttctgcaaaaaaatggcaaagagctctcatgtgagaactaccttaatttatatgccaaagctggtgtttggaagacagtctttttaagaattataaaggatatttctgaaactgtgtctcatgatttttgaactactctgctttttataggggtatgtttctgtcagcttctgttgctttaaaagctaaggagagagtagagaaacatgcttcttggcagtaactcagctcctaaattctagcctaaggcaggctccgtaggtcacactcttcctgaatgttagggcttctgtcccctccttttccgctgcttaaccagtagtatgtcttgtgtgcaggtggtctggataaaaggacatggtcataagagaattgtagtgttaaaaaatgacatgaaaagtaagtaagcacccatcccctccccccttaaaaaatcacggttctctcactgacatttctctctgacgggtgctctttgtcctgtaggtcgtttgagttcactcagtctctcccctgccaatcatgaaaaccagccctcggagggcgagcgcatcctggaggtgcccgaatcgcacacagcctcggaactcaagcttggagctgacggcagtgggcccagtcacacagagcaggagcttctccgcctgaccgacgactcccccgtcgacctcctgtgtgcgcctgtcccctcgtgcctgccgtcccctcagctgagaccagaccccgttatcctccaatctgctgatctcattcagtttgaggagcgccctcaagagccttctgaaattatgattttaaaccaagaagaaaaaatggagattccaataccaggaaagagcaaaactctgacctctgactccagctcgtcctgcatctcagcagctgtccccgtgcctccctgcccctcctcggaaacctccgagtcactgctcagcaaggaccccgtggaaagcccggccaaaaagcaacccaaaaatagagtcaaattggcagccaacttttccttagcacctataaccaagctttaactcccatttggaatatagaattaggatgggaaaacactgtctgattctgcacacaaaagtgggtttcaaaaatacatccttttctgtgtcatgaaaaccccccgaagccattgacttcatcttacctgtgttctatcatgtttttcttttccattgaacacagctttgagctgaagtctttcttttcttcttcctttttctttcttttttcaattatttgaagaacttgtggcatttgttaaagaatccttaatatattttaccaaatttttagtaactattatgaaatacaatggtgttccaaaagaagaaagcactaaaaactcaactagcaggaagcggttttgcttccattgagccacgtcggtggtgtcatcctacatgtagcataatagagtctctcagcctttgcttactggtgtttccgacagtattaacccagtgcgtggcatgtctttgaagcaaagcctgtcccgctagcctgtgtgttcacacaccaaaggagaagggtaggcgaggggttcggagtgtattttcaggttggaatgtgaaggttcctggcttccatgtgacttgtaagtgtgccttgttttttatttaaactatgtctgtagttgacaaaagtggcttcatcacaaatttttttaaacgtttctactttggggttccatttaggagctttctagaaagttgaggatgtttgaagcttcccttctgtgttccagtttgatatgggttaggttaaggaaaaggagatggtctcgatgtcatggatttaaagtcagcatttggattacaacacacattattgtgtgtcgagaggcagcattggaaagagcctgattttctaaaatatgcatcaagtgcataaattacaaatcagagctgagtggggaggtgcttcagcagcagcgggatcaatacgatttccactgggaagagacaggaattctacctacacataggaaggccaaggttgatccacttaaccttgttattgtaattttaaagctggtatcggtagctgggaagctttatgtgtgtgtatgtcagctcagcatcttttaatcgtgtctgattttactctcgttacttctcgctgttggaagcatctctgggtttcttgtggcgtctggtgtggaatggccttcctctctaggtgcctgaggtgtccgctgacgggtggcctctcacccccctctagagaaacctgacatttacaatggattgtatttgtccggcaaaaaaggcggattcattcatagagcagaaagaacctgttggcgtaaggtcttccactagttagatggtttcttttggggaaatgtttatatttggtaacttctagaaagccagaaaatggactctgatttcatagcattttgataaaatgccacaaaataagggctatagagagatttttacaagtcagattttttgttccccaaatcttttaaatgaagccagtgactcccagttctcaacacatggccccagtcaagacagaacaccatggaaaaaaccctgtaagtattatggcactctccgaatcctcctgaaggcatttcctctacagacatagtgttacaggaagtgaaatgcaaatgtgcaattttttttaaaggagcttttaaacaaagtaataataattggtgttgagaacatcagttgccttattctaagatttcataaggctgagtttgcacgcttggacttcagttctgctagcatgtaaagagtggtggactttaaaaccgtaagaggtatcattacaagtcacctggaacagactcaaagaacaggttctttgggcaacagacaaagaagaatcaagttctgtgctgtcccgtgagtgtgtctgagtaccattcactggagttgctgcttaggtctgggacgtgtgtgtgactcttaacaattgctgtctgaaaatgagagagaagacttcggaagcacattgtgttcataatgtactccacaatggccagtccaattgctatctatttttttatccagaggcttaattaaatgatgtggtaaaatgatgtttgagcattaagacaatgtaattctttatttctgggtggaaagatataccggattaaatttatctgtttaaaaaaatgacaaaagttatcaccaaaaccccctttcccatcttgcactgtttgttttggattgggtttgggggaaagagatgtttttcttagttgtctactttgtttgaacacttttgttgtggttcaagtgctgttttgtgtgttgggaccaaacagttgtcaataaactttacaagcgagcatctat

SEQ ID NO: 8818 - protein, 41 aa, Homo sapiens; identical to SEQ ID NO: 8810

SEQ ID NO: 8819 - DNA, 7736 bp, Homo sapiens
gcggtgcggaagcggaagtgaagggtgcgcttggcggcggcggcgggagctgcggagtcgggaatcaaaacaaagggcctggggggggcggggggaaggcggcggggccggaatgtgagcggaggtggagccggcggcagagggtggaagaatgaaagaaaagaaagatgaaaggatgttgaatcactttgcatggctgtatgatggaaggaaacggaactgagaactcctgcagtagaacacgtggatggcttcaacaagataatgatgctaagccatggctttggaaattctctaattgcttttctcgtcctgagcagacgctgccacatagtccccaaacgaaagagtacatggagaacaagaaagttgctgtggaactaaaggatgtaccatcaccccttcatgctggctctaagctttttccagcagtcccacttcctgatattcgttctcttcagcagcctaaaatacagctttcttctgtccccaaagtaagctgctgtgctcattgccctaatgaaccctccacttcgccaatgcgttttggtggtggtggtggcggtagcggaggtaccagtagcttgattcacccgggcgcactgttagactcgcaaagcaccaggacaatcacgtgtcaggtagggtcagggtttgctttccagtctgcatcttcactccagaatgcctcagctaggaacaatttggcaggcattgcaagtgactttcccagcatgtgtctagagagtaacctgtcttcctgcaaacacctgccctgttgtggaaaactccacttccagtcatgtcatggtaatgtgcacaagctgcatcagtttccgagtctgcagggctgcacctccgctggctatttcccctgttctgatttcacaagcggggctccagggcatttggaagagcacatttcacagtcggagctaacgcctcacttgtgcaccaactctttgcaccttaatgtggtacctccggtttgtttaaagggctcactttactgcgaagactgtctaaacaagccagcaagaaatagcataatcgatgcggctaaagtctggccaaatataccacctccaaatactcaacctgcacctcttgctgtccctctgtgtaatggctgtggaaccaaaggaacagggaaggagaccacgttgttattggcgaccagtctaggcaaagctgcttcaaaatttgggtcaccagaagttgcagtagctggacaggtgctagaaaacttaccccccattggagttttttgggatattgaaaactgctccgttccctctggccggtcagcaactgctgttgtgcaaagaatccgtgagaagttttttaaaggccacagagaagcagaattcatctgtgtatgtgacatcagtaaagaaaacaaggaagttattcaagagctgaataattgccaggtaaccgttgcccacatcaatgctactgcaaagaatgccgctgatgataaactgcggcagagtctccgcagatttgcaaatacacacactgctccagccacagtggttcttgtgtcaactgatgtcaattttgcattggaacttagtgacctgagacacaggcatggtttccacattattttggtccataaaaaccaggcctcagaagcactgctgcatcatgctaacgagctgatcagatttgaagagttcatttccgacttgccccccaggttaccactaaaaatgccacagtgccacactctgctctatgtttataacctaccagcaaataaggatggcaagagcgtcagcaacaggctcagacgcctgtccgataattgtggtgggaaagtgctgagtatcacaggctgcagtgcaattctccgcttcataaaccaagatagtgcagagcgcgctcagaagcgaatggaaaacgaagatgtctttggtaataggatcattgtgtcatttactccaaaaaatagagaactctgtgaaacaaagagttcaaatgcaattgctgataaagtgaagtctcccaaaaaacttaagaatccaaaattgtgcctcatcaaagatgcaagtgaacaatcttccagtgccaaagccacgcctggaaaagggtcacaggcaaattctggatctgctacaaaaaatacaaatgttaaaagtttacaggagctgtgccgcatggagtcaaaaactggtcatagaaacagtgagcaccagcaaggtcacctgaggctggtcgtacccactcacggtaactcaagtgctgcagtgtcgacgccgaaaaactcgggggtggcagaacccgtttacaaaaccagtcagaaaaaggagaacctcagtgcccgaagtgttaccagttctcctgtagagaaaaaagataaagaggagactgtattccaagtgagttacccgtctgcttttagcaagttagttgcatccaggcaagtcagtcctctgctcgcatctcagtcttggtcttctaggagtatgtctccaaaccttttaaacagagcatccccgcttgctttcaacattgcaaattcgagcagcgaagccgactgcccagacccatttgcaaatggtgctgatgtccaagtcagcaacatagactacagattatcccggaaggagctgcagcagctcctgcaggaagcatttgccaggcatggcaaggtgaagagtgttgagctcagcccccatacagattatcaactcaaggctgttgtgcaaatggaaaacttacaagatgcgatcggtgcagtgaatagcctccacagatacaaaattggcagcaaaaagatcctggtctcacttgccaccggggctgccagcaaatcactctctttactgagtgcagaaacaatgtctgttcttcaggatgcccctgcctgttgcctgcctctgtttaaatttacagatatctatgaaaaaaagtttggacacaagttgaatgtgtcagatctatataaattaacagacacggtcgcaatccgtgaacaaggaaacggacggctggtgtgtctcctacccagcagtcaggcccgccagagccccttggggtcttcccagtcacacgacggctcctccacgaattgcagcccaattatatttgaagagttagaatatcacgagcctgtctgcagacagcattgttccaataaggatttcagcgaacatgaatttgatccagactcttacaagattccttttgtgattctttctttgaagacatttgcgccccaggttcacagtcttctccagacccacgagggcaccgtgcctttattgagctttccagattgttacattgcagagtttggcgatctagaagtagtgcaagaaaaccaaggaggtgttcccttagaacacttcattacctgtgttccaggtgtaaacattgccactgctcagaatggcatcaaagtggttaaatggattcacaacaagcccccgcctcccaacactgacccttggcttctgcgttcgaagagtcctgtaggtaacccccagctgatccagttcagtagagaagtgattgacttgctgaaaagccagccatcttgtgtcatacccatcagtcatttcatcccatcctatcaccatcattttgcaaagcagtgccgagtgtcagactacggatactccaagctgattgagttattagaagcagtgcctcatgtattgcagattcttggaatgggctccaaacgtctgctgacccttacccacagggcccaggtgaagcgctttactcaggatttactaaaacttctcaaatcccaggccagcaaacaggtcattgtgagagaattctcacaggcttatcactggtgtttctcaaaggactgggatgtcactgaatatggtgtttgtgagttgattgacatcgtatcagagattccagacacaaccatctgcttgtcccaacaagataatgaaatggtgatttgtatccccaaaagagaacgcactcaggatgaaatagaaaggacaaaacagttctccaaggatgtcgttgatttgctgcgtcaccaaccccatttccggatgccctttaataaatttatcccttcttaccatcaccactttggccggcagtgcaaacttgcgtactatgggtttaccaaactacttgaactttttgaagccatacctgatactttacaagtattggaatgtggagaagaaaagatccttactctgacagaggtggagcggttcaaagctctagctgcccagtttgttaaactccttcggtcccaaaaagataactgccttatgatgacagatctccttacagaatatgctaaaacttttggttatacatttcgtctccaagactatgatgtcagttccatttcggctttaactcagaaactctgccatgtcgtgaaggttgccgatatagaatctggcagacagattcagctgatcaaccgaaagtctctgcgatctctcactgcccagttgctggtattgttgatgtcttgggaaggaaccacccatctttctgttgaggagctcaagagacattacgaaagtacccacaacactccccttaacccctgtgaatatggattcatgaccttgaccgaactgctgaagagcctgccatacttggttgaggttttcactaatgataagatggaagaatgtgtgaagctcacaagtctgtatttgtttgcaaagaatgtgcggtctttacttcatacttaccactaccagcagattttccttcatgagttttccatggcctataccaagtatgtcggagaaactctgcagcccaagacctacggccacagcagcgtggaggagctcttgggagcaattccacaggtggtctggataaaaggacatggtcataagagaattgtagtgttaaaaaatgacatgaaaagtcgtttgagttcactcagtctctcccctgccaatcatgaaaaccagccctcggagggcgagcgcatcctggaggtgcccgaatcgcacacagcctcggaactcaagcttggagctgacggcagtgggcccagtcacacagagcaggagcttctccgcctgaccgacgactcccccgtcgacctcctgtgtgcgcctgtcccctcgtgcctgccgtcccctcagctgagaccagaccccgttatcctccaatctgctgatctcattcagtttgaggagcgccctcaagagccttctgaaattatgattttaaaccaagaagaaaaaatggagattccaataccaggaaagagcaaaactctgacctctgactccagctcgtcctgcatctcagcagctgtccccgtgcctccctgcccctcctcggaaacctccgagtcactgctcagcaaggaccccgtggaaagcccggccaaaaagcaacccaaaaatagagtcaaattggcagccaacttttccttagcacctataaccaagctttaactcccatttggaatatagaattaggatgggaaaacactgtctgattctgcacacaaaagtgggtttcaaaaatacatccttttctgtgtcatgaaaaccccccgaagccattgacttcatcttacctgtgttctatcatgtttttcttttccattgaacacagctttgagctgaagtctttcttttcttcttcctttttctttcttttttcaattatttgaagaacttgtggcatttgttaaagaatccttaatatattttaccaaatttttagtaactattatgaaatacaatggtgttccaaaagaagaaagcactaaaaactcaactagcaggaagcggttttgcttccattgagccacgtcggtggtgtcatcctacatgtagcataatagagtctctcagcctttgcttactggtgtttccgacagtattaacccagtgcgtggcatgtctttgaagcaaagcctgtcccgctagcctgtgtgttcacacaccaaaggagaagggtaggcgaggggttcggagtgtattttcaggttggaatgtgaaggttcctggcttccatgtgacttgtaagtgtgccttgttttttatttaaactatgtctgtagttgacaaaagtggcttcatcacaaatttttttaaacgtttctactttggggttccatttaggagctttctagaaagttgaggatgtttgaagcttcccttctgtgttccagtttgatatgggttaggttaaggaaaaggagatggtctcgatgtcatggatttaaagtcagcatttggattacaacacacattattgtgtgtcgagaggcagcattggaaagagcctgattttctaaaatatgcatcaagtgcataaattacaaatcagagctgagtggggaggtgcttcagcagcagcgggatcaatacgatttccactgggaagagacaggaattctacctacacataggaaggccaaggttgatccacttaaccttgttattgtaattttaaagctggtatcggtagctgggaagctttatgtgtgtgtatgtcagctcagcatcttttaatcgtgtctgattttactctcgttacttctcgctgttggaagcatctctgggtttcttgtggcgtctggtgtggaatggccttcctctctaggtgcctgaggtgtccgctgacgggtggcctctcacccccctctagagaaacctgacatttacaatggattgtatttgtccggcaaaaaaggcggattcattcatagagcagaaagaacctgttggcgtaaggtcttccactagttagatggtttcttttggggaaatgtttatatttggtaacttctagaaagccagaaaatggactctgatttcatagcattttgataaaatgccacaaaataagggctatagagagatttttacaagtcagattttttgttccccaaatcttttaaatgaagccagtgactcccagttctcaacacatggccccagtcaagacagaacaccatggaaaaaaccctgtaagtattatggcactctccgaatcctcctgaaggcatttcctctacagacatagtgttacaggaagtgaaatgcaaatgtgcaattttttttaaaggagcttttaaacaaagtaataataattggtgttgagaacatcagttgccttattctaagatttcataaggctgagtttgcacgcttggacttcagttctgctagcatgtaaagagtggtggactttaaaaccgtaagaggtatcattacaagtcacctggaacagactcaaagaacaggttctttgggcaacagacaaagaagaatcaagttctgtgctgtcccgtgagtgtgtctgagtaccattcactggagttgctgcttaggtctgggacgtgtgtgtgactcttaacaattgctgtctgaaaatgagagagaagacttcggaagcacattgtgttcataatgtactccacaatggccagtccaattgctatctatttttttatccagaggcttaattaaatgatgtggtaaaatgatgtttgagcattaagacaatgtaattctttatttctgggtggaaagatataccggattaaatttatctgtttaaaaaaatgacaaaagttatcaccaaaaccccctttcccatcttgcactgtttgttttggattgggtttgggggaaagagatgtttttcttagttgtctactttgtttgaacacttttgttgtggttcaagtgctgttttgtgtgttgggaccaaacagttgtcaataaactttacaagcgagcatctat

SEQ ID NO: 8820 - protein, 1742 aa, Homo sapiens; identical to SEQ ID NO: 1082

SEQ ID NO: 8821 - DNA, 644 bp, Homo sapiens
tgtataaccaaaagttttagcatattctgtaaggagatctgtcatcataaggcagttatctttttgggaccgaaggagtttaacaaactgggcagctagagctttgaaccgctccacctctgtcagagtaaggatcttttcttctccacattccaatacctttgaaaacacacggggggaggaaagggaaaataaacaaatcacgggtgtttacagaatagcaaaaaaagtatgcagctagtaatgaaaaaacaagtcagcgttactgaatgggtataaagtttcagttgtgtaagatgaaaaagttcagaagatcggttgcataacaatgtgaatgtgctgaccactactggacaggagatataaagatagttacgaaggagcaccgtttaagaaccagataatagaaggaggatacgaccatacagtcaccccttggtgttctcaagggatcgggtccaggaccctgcctggataccaaaatccgcacctactcaagtcttgcggtctgccccgcggaaactgcagacacgaaaaattggcccccagtatccatgagtttcgcatccctcaaatactgtactttctacccgtaactggacctgtgcagttctgacttcaactattaaaatttgaaaggcaaa

SEQ ID NO: 8822 - protein, 90 aa, Homo sapiens
PLLDRRYKDSYEGAPFKNQIIEGGYDHTVTPWCSQGIGSRTLPGYQNPHLLKSCGLPRGNCRHEKLAPSIHEFRIPQILYFLPVTGPVQF

SEQ ID NO: 8823 - DNA, 565 bp, Homo sapiens
ctttcaacattgcaaattcgagcagcgaagccgactgcccagacccatttgcaaatggtgctgatgtccaagtcagcaacatagactacagattatcccggaaggagctgcagcagctcctgcaggaagcatttgccaggcatggcaaggtgaagagtgttgagctcagcccccatacagattatcaactcaaggctgttgtgcaaatggaaaacttacaagatgcgatcggtgcagtgaatagcctccacagatacaaaattggcagcaaaaagatcctggtctcacttgccaccggggctgccagcaaatcactctctttactgaggtaagaaacaagcaagctgtttatttcaggaaataacatttgacccagaaacaattttagaaataataaaaatagattcaatcacattcccacccccttgtgatgattgcatgtggaataatgcttattctagattgatacagttagaaacaagccatttgactcttgtctaagtcattaatcaaagctggaatacagcttaaacttgacaggcacttgggagtaaaataatacgca

SEQ ID NO: 8824 - protein, 41 aa, Homo sapiens
MENLQDAIGAVNSLHRYKIGSKKILVSLATGAASKSLSLLR

SEQ ID NO: 8825 - DNA, 2364 bp, Homo sapiens
gggcggtgcggtgcggaagcggaagtgaagggtgcgcttggcggcggcggcgggagctgcggagtcgggaatcaaaacaaagggcctggggggggcggggggaaggcggcggggccggaatgtgagcggaggtggagccggcggcagagggtggaagaatgaaagaaaagaaagatgaaaggatgttgaatcactttgcatggctgtatgatggaaggaaacggaactgagaactcctgcagtagaacacgtggatggcttcaacaagataatgatgctaagccatggctttggaaattctctaattgcttttctcgtcctgagcagacgctgccacatagtccccaaacgaaagagtacatggagaacaagaaagttgctgtggaactaaaggatgtaccatcaccccttcatgctggctctaagctttttccagcagtcccacttcctgatattcgttctcttcagcagcctaaaatacagctttcttctgtccccaaagtaagctgctgtgctcattgccctaatgaaccctccacttcgccaatgcgttttggtggtggtggtggcggtagcggaggtaccagtagcttgattcacccgggcgcactgttagactcgcaaagcaccaggacaatcacgtgtcaggtagggtcagggtttgctttccagtctgcatcttcactccagaatgcctcagctaggaacaatttggcaggcattgcaagtgactttcccagcatgtgtctagagagtaacctgtcttcctgcaaacacctgccctgttgtggaaaactccacttccagtcatgtcatggtaatgtgcacaagctgcatcagtttccgagtctgcagggctgcacctccgctggctatttcccctgttctgatttcacaagcggggctccagggcatttggaagagcacatttcacagtcggagctaacgcctcacttgtgcaccaactctttgcaccttaatgtggtacctccggtttgtttaaagggctcactttactgcgaagactgtctaaacaagccagcaagaaatagcataatcgatgcggctaaagtctggccaaatataccacctccaaatactcaacctgcacctcttgctgtccctctgtgtaatggctgtggaaccaaaggaacagggaaggagaccacgttgttattggcgaccagtctaggcaaagctgcttcaaaatttgggtcaccagaagttgcagtagctggacaggtgctagaaaacttaccccccattggagttttttgggatattgaaaactgctccgttccctctggccggtcagcaactgctgttgtgcaaagaatccgtgagaagttttttaaaggccacagagaagcagaattcatctgtgtatgtgacatcagtaaagaaaacaaggaagttattcaagagctgaataattgccaggtaaccgttgcccacatcaatgctactgcaaagaatgccgctgatgataaactgcggcagagtctccgcagatttgcaaatacacacactgctccagccacagtggttcttgtgtcaactgatgtcaattttgcattggaacttagtgacctgagacacaggcatggtttccacattattttggtccataaaaaccaggcctcagaagcactgctgcatcatgctaacgagctgatcagatttgaagagttcatttccgacttgccccccaggttaccactaaaaatgccacagtgccacactctgctctatgtttataacctaccagcaaataaggatggcaagagcgtcagcaacaggctcagacgcctgtccgataattgtggtgggaaagtgctgagtatcacaggctgcagtgcaattctccgcttcataaaccaagatagtgcagagcgcgctcagaagcgaatggaaaacgaagatgtctttggtaataggatcattgtgtcatttactccaaaaaatagagaactctgtgaaacaaagagttcaaatgcaattgctgataaagtgaagtctcccaaaaaacttaagaatccaaaattgtgcctcatcaaagatgcaagtgaacaatcttccagtgccaaagccacgcctggaaaagggtcacaggcaaattctggatctgctacaaaaaatacaaatgttaaaagtttacaggagctgtgccgcatggagtcaaaaactggtcatagaaacagtgagcaccagcaaggtcacctgaggctggtcgtacccactcacggtaactcaagtgctgcagtgtcgacgccgaaaaactcgggggtggcagaacccgtttacaaaaccagtcagaaaaaggagaacctcagtgcccgaagtgttaccagttctcctgtagag

SEQ ID NO: 8826 - protein, 718 aa, Homo sapiens
MMEGNGTENSCSRTRGWLQQDNDAKPWLWKFSNCFSRPEQTLPHSPQTKEYMENKKVAVELKDVPSPLHAGSKLFPAVPLPDIRSLQQPKIQLSSVPKVSCCAHCPNEPSTSPMRFGGGGGGSGGTSSLIHPGALLDSQSTRTITCQVGSGFAFQSASSLQNASARNNLAGIASDFPSMCLESNLSSCKHLPCCGKLHFQSCHGNVHKLHQFPSLQGCTSAGYFPCSDFTSGAPGHLEEHISQSELTPHLCTNSLHLNVVPPVCLKGSLYCEDCLNKPARNSIIDAAKVWPNIPPPNTQPAPLAVPLCNGCGTKGTGKETTLLLATSLGKAASKFGSPEVAVAGQVLENLPPIGVFWDIENCSVPSGRSATAVVQRIREKFFKGHREAEFICVCDISKENKEVIQELNNCQVTVAHINATAKNAADDKLRQSLRRFANTHTAPATVVLVSTDVNFALELSDLRHRHGFHIILVHKNQASEALLHHANELIRFEEFISDLPPRLPLKMPQCHTLLYVYNLPANKDGKSVSNRLRRLSDNCGGKVLSITGCSAILRFINQDSAERAQKRMENEDVFGNRIIVSFTPKNRELCETKSSNAIADKVKSPKKLKNPKLCLIKDASEQSSSAKATPGKGSQANSGSATKNTNVKSLQELCRMESKTGHRNSEHQQGHLRLVVPTHGNSSAAVSTPKNSGVAEPVYKTSQKKENLSARSVTSSPV

SEQ ID NO: 8827 - DNA, 863 bp, Homo sapiens
tgggcttaaagttacttgacttttagatttgtcttctcctgaaaaacagaaataatctcttagagtgatactttttgacagcttgattgcttattaggtcaaccagtgaggttggtagccttaaaacttggcattcattaataatttagtttttctaccactgagaatgataggtagtttattatcttattgtaacttgccatttattttccactacaagtaattgaaaatgttaacatttcttaagggtcaccagaagttgcagtagctggacaggtgctagaaaacttaccccccattggagttttttgggatattgaaaactgctccgttccctctggccggtcagcaactgctgttgtgcaaagaatccgtgagaagttttttaaaggccacagagaagcagaattcatctgtgtatgtgacatcagtaaagaaaacaaggaagttattcaagagctgaataattgccaggtaaccgttgcccacatcaatgctactgcaaagaatgccgctgatgataaactgcggcagagtctccgcagatttgcaaatacacacactgctccagccacagtggttcttgtgtcaactgatgtcaattttgcattggaacttagtgacctgagacacaggcatggtttccacattattttggtccataaaaaccaggcctcagaagcactgctgcatcatgctaacgagctgatcagatttgaagagttcatttccgacttgccccccaggttaccactaaaaatgccagtaagtgggtttgcgttatttttgccattttccaatattacattgtggaggctgaaagacagcccataataagggggttgccaggcccagatggggct

SEQ ID NO: 8828 - protein, 44 aa, Homo sapiens
MLLQRMPLMINCGRVSADLQIHTLLQPQWFLCQLMSILHWNLVT

SEQ ID NO: 8829 - DNA, 3936 bp, Homo sapiens
ggggggggcggggcctcgcggccctgcagcctcgtcaggctcagtcccctcccgataaacccctaaatagggactttcccggggggtgaccctggcttttttggcgaaaacccccagtttaaggaggccttccccctggcttcacgttgtggagtcgaaaggaaccttgaagcggagaatgagctcgtgacgtggacccgaggaaaaaacctgccaaccaggatttaatagaattcagctctttcaggctttggagggaaggcgatttgaacgggatttcaatgaaaaaccctgtcccttcggctttttttttttcctctctcgggtctcgtcacgtgatggtcctactttatttttaaaaattaaatggcgcatattccccagcatcctaaatctagtgcaacctagtggcaagtggagaaaaaaataactgccaacctggcttcctacgaggtcccccggagttctcgcaaagttgcgacccagttggcaaaaatacagtgtgtgcaaagactcaactggacattgccaccaagaatcaagagatttttggggactttagcaagaaaacgttatttttaaaagccctgctccaaagctggttacaaatgaatactgcgtttccagtgacaggttgggcgagcagaaaggaaatcttacgacggagtcttgccctgtcgcctaggctagagtgcagtggtgtgatctcggctcactgcaaccgccacctcccggtttcccgtgattctcctgcctcagcctcctgagtagctgggattacagacaccatgccacaaggagagtgatctcttcccctgttttcacaatggaggactccggaaagactttcagctccgaggaggaagaagctaactattggaaagatctggcgatgacctacaaacagagggcagaaaatacgcaagaggaactccgagaattccaggagggaagccgagaatatgaagctgaattggagacgcagctgcaacaaattgaaaccaggaacagagacctcctgtccgaaaataaccgccttcgcatggagctggaaaccatcaaggagaagtttgaagtgcagcactctgaaggctaccggcagatctcagccttggaggatgacctcgcgcagaccaaagccattaaagaccaattgcagaaatacatcagagagctggagcaagcaaatgacgacctggaaagagccaagcgcgccacgatcatgtctctcgaagactttgagcagcgcttgaatcaggccatcgaaagaaatgccttcctggaaagtgaacttgatgaaaaagagaatctcctggaatctgttcagagactgaaggatgaagccagagatttgcggcaggaactggccgtgcagcagaagcaggagaaacccaggacccccatgcccagctcagtggaagctgagaggacagacacagctgtgcaggccacgggctccgtgccgtccacgcccattgctcaccgaggacccagctcaagtttaaacacacctgggagcttcagacgtggcctggacgactccaccggggggacccccctcacacctgcggcccggatatcagccctcaacattgtgggagacctactgcggaaagtcggggcactggagtccaaactcgcttcctgccggaacctcgtgtacgatcagtccccaaaccgaacaggtggcccagcctctgggcggagcagcaagaacagagatggcggggagagacggccaagcagcaccagcgtgcctttgggtgataaggggttggacacgagttgccgctggttgtccaaatcaacaaccaggtcgtccagctcctgctgaagcctgttcttggtcttttccagtttatcataagcggccgccttctcctcgtactgctgggtgaggttctcgatctccttctggaacctcttcttcccctcttccagagcttccacggtgctggcaaagtcctgcagcttcttcttcgagtcggagagctacaaggacagcgtccagggtagggtgagagggggaccatgagtggcccctgtccctggccccacagactctgagaagcgaagaccatgtctcctcgttggagaaacccaatagcaggggaagctggggggtcaagcaccatcgcaccaacactccaccgcgatctgcctgcgggggatctcagcgcagagaagttgagaggacccatgaaggaagcaaggacacggggcaggcacctggatgttgagagtggagatgtggcgctccaggttctgcttggcctccatctcctcgtccagctggtcttgcaggctgttccgctcctcctccagctggcgcagcttcgtagacacgttgagcttctgccgggtttcttcttgaagcagctcctgcaaaagggatgcaaagaggtcccagggacctgccccgaggaaggccaccccccaggtcccctggatgatgtggcaggacactcacctgggtgtcctggagctgggaactgagggacgccacgtccttggccagcttaatggccttcccctcggcctcgttaagcatccctgtgacgctctcaacttcattctaagggtgccaagagactggttagtcaaagcctctagaaggggatcctcgttgaaaggagccctttttactcaaaacacatgggctagtacttgaggtgttcactgattgagaaaatacccgtgaggtatgggactctgataaaaaaaaaaaaaaacacacacacacacaaaaaaaacagaatctgtggcttgaagggaactccgtcacctatgagttgggaccctggccctagactctgtggttctaagaacttatttgagccccaatggtattgactgggacctgatcccactaaatggatcctagatccctgccaaggttggtagagacaaagcagcaggtctgagagtccagacgaggtgctctggctggtccactctctaaggctggagaagggagaccaggatggtacttgaacgtcccagggatgctgtcccatcccttccttcctcactcctactctttgaccctgatggccaaagccagagacgcaggccctaaaggtaaaaacgtcctctctgtattctctggcttttactccctagtgtctctgcataagtccctttgaggctgttagcctacccctccatctcttccattgacaaggaggatatgaatgatcttgacactgcttatatgagggcggcaaaagccctgctctcaactgcatgtgagaaaaaaacatctcacttaattcttccctcgccccttggtccctggctgtggacatgttaaacatttgtgaaaactttggccacgtccccatgagtggcaaggcagggtaaatggctatgccaagtgaaagaagaccaaagacaaaaagaccatgtcattcagcagcttaaaacccctcaacagcttcacattgcccagagtaaggatcaacatacatgtaataggttctcaaaagccctacatcatctgggtacaagctccccctccaaccccactctgtactatctccccctacccccaaccccagctgggcactccagctctactggctgtatgtctctctcctaatttttctacttaccacagggcctttgcacacgctgttccctctgcctggtagacttatccatgctccttagggaagcctttcgtggctcctcctcccccaggttaggccccctggttatttacacttgggcatcatgtgccttccctttgctgcatcatttgacattcatttgtgtgattattcatgtctttcccttcccttcccttccccttactcggctggagtcctactggggcagcgacagtgtctcttcttccttgctgttggatctcaggattaagcacagtgcctggcatacagcaggtgctcaataaatacttatcaaattggaaaa

SEQ ID NO: 8830 - protein, 335 aa, Homo sapiens; identical to SEQ ID NO: 1084

SEQ ID NO: 8831 - DNA, 909 bp, Homo sapiens
cggggccgcaccgcccttcgcagccgcctctgccgccgccgccgcgttggcctcgccgcccctgctcggacaccatgccacaaggagagtgatctcttcccctgttttcacaatggaggactccggaaagactttcagctccgaggaggaagaagctaactattggaaagatctggcgatgacctacaaacagagggcagaaaatacgcaagaggaactccgagaattccaggagggaagccgagaatatgaagctgaattggagacgcagctgcaacaaattgaaaccaggaacagagacctcctgtccgaaaataaccgccttcgcatggagctggaaaccatcaaggagaagtttgaagtgcagcactctgaaggctaccggcagatctcagccttggaggatgacctcgcgcagaccaaagccattaaagaccaattgcagaaatacatcagagagctggagcaagcaaatgacgacctggaaagagccaagcgcgccacgatcatgtctctcgaagactttgagcagcgcttgaatcaggccatcgaaagaaatgccttcctggaaagtgaacttgatgaaaaagagaatctcctggaatctgttcagagactgaaggatgaagccagagatttgcggcaggaactggccgtgcagcagaagcaggagaaacccaggacccccatgcccagctcagtggaagctgagaggacagacacagctgtgcaggccacgggctccgtgccgtccacgcccattgctcaccgaggacccagctcaagtttaaacacacctgggagcttcagacgtggcctggacgactccaccggggggacccccctcacacctgcggcccggatatcagccctcaacattgtgggagacctactgcggaaagtcggggt

SEQ ID NO: 8832 - protein, 264 aa, Homo sapiens
MEDSGKTFSSEEEEANYWKDLAMTYKQRAENTQEELREFQEGSREYEAELETQLQQIETRNRDLLSENNRLRMELETIKEKFEVQHSEGYRQISALEDDLAQTKAIKDQLQKYIRELEQANDDLERAKRATIMSLEDFEQRLNQAIERNAFLESELDEKENLLESVQRLKDEARDLRQELAVQQKQEKPRTPMPSSVEAERTDTAVQATGSVPSTPIAHRGPSSSLNTPGSFRRGLDDSTGGTPLTPAARISALNIVGDLLRKV

SEQ ID NO: 8833 - DNA, 3222 bp, Homo sapiens
cggggccgcaccgcccttcgcagccgcctctgccgccgccgccgcgttggcctcgccgcccctgctcggacaccatgccacaaggagagtgatctcttcccctgttttcacaatggaggactccggaaagactttcagctccgaggaggaagaagctaactattggaaagatctggcgatgacctacaaacagagggcagaaaatacgcaagaggaactccgagaattccaggagggaagccgagaatatgaagctgaattggagacgcagctgcaacaaattgaaaccaggaacagagacctcctgtccgaaaataaccgccttcgcatggagctggaaaccatcaaggagaagtttgaagtgcagcactctgaaggctaccggcagatctcagccttggaggatgacctcgcgcagaccaaagccattaaagaccaattgcagaaatacatcagagagctggagcaagcaaatgacgacctggaaagagccaagcgcgccacgatcatgtctctcgaagactttgagcagcgcttgaatcaggccatcgaaagaaatgccttcctggaaagtgaacttgatgaaaaagagaatctcctggaatctgttcagagactgaaggatgaagccagagatttgcggcaggaactggccgtgcagcagaagcaggagaaacccaggacccccatgcccagctcagtggaagctgagaggacagacacagctgtgcaggccacgggctccgtgccgtccacgcccattgctcaccgaggacccagctcaagtttaaacacacctgggagcttcagacgtggcctggacgactccaccggggggacccccctcacacctgcggcccggatatcagccctcaacattgtgggagacctactgcggaaagtcggggcactggagtccaaactcgcttcctgccggaacctcgtgtacgatcagtccccaaaccgaacaggtggcccagcctctgggcggagcagcaagaacagagatggcggggagagacggccaagcagcaccagcgtgcctttgggtgataaggggttggacacgagttgccgctggttgtccaaatcaacaaccaggtcgtccagctcctgctgaagcctgttcttggtcttttccagtttatcataagcggccgccttctcctcgtactgctgggtgaggttctcgatctccttctggaacctcttcttcccctcttccagagcttccacggtgctggcaaagtcctgcagcttcttcttcgagtcggagagctacaaggacagcgtccagggtagggtgagagggggaccatgagtggcccctgtccctggccccacagactctgagaagcgaagaccatgtctcctcgttggagaaacccaatagcaggggaagctggggggtcaagcaccatcgcaccaacactccaccgcgatctgcctgcgggggatctcagcgcagagaagttgagaggacccatgaaggaagcaaggacacggggcaggcacctggatgttgagagtggagatgtggcgctccaggttctgcttggcctccatctcctcgtccagctggtcttgcaggctgttccgctcctcctccagctggcgcagcttcgtagacacgttgagcttctgccgggtttcttcttgaagcagctcctgcaaaagggatgcaaagaggtcccagggacctgccccgaggaaggccaccccccaggtcccctggatgatgtggcaggacactcacctgggtgtcctggagctgggaactgagggacgccacgtccttggccagcttaatggccttcccctcggcctcgttaagcatccctgtgacgctctcaacttcattctaagggtgccaagagactggttagtcaaagcctctagaaggggatcctcgttgaaaggagccctttttactcaaaacacatgggctagtacttgaggtgttcactgattgagaaaatacccgtgaggtatgggactctgataaaaaaaaaaaaaaacacacacacacacaaaaaaaacagaatctgtggcttgaagggaactccgtcacctatgagttgggaccctggccctagactctgtggttctaagaacttatttgagccccaatggtattgactgggacctgatcccactaaatggatcctagatccctgccaaggttggtagagacaaagcagcaggtctgagagtccagacgaggtgctctggctggtccactctctaaggctggagaagggagaccaggatggtacttgaacgtcccagggatgctgtcccatcccttccttcctcactcctactctttgaccctgatggccaaagccagagacgcaggccctaaaggtaaaaacgtcctctctgtattctctggcttttactccctagtgtctctgcataagtccctttgaggctgttagcctacccctccatctcttccattgacaaggaggatatgaatgatcttgacactgcttatatgagggcggcaaaagccctgctctcaactgcatgtgagaaaaaaacatctcacttaattcttccctcgccccttggtccctggctgtggacatgttaaacatttgtgaaaactttggccacgtccccatgagtggcaaggcagggtaaatggctatgccaagtgaaagaagaccaaagacaaaaagaccatgtcattcagcagcttaaaacccctcaacagcttcacattgcccagagtaaggatcaacatacatgtaataggttctcaaaagccctacatcatctgggtacaagctccccctccaaccccactctgtactatctccccctacccccaaccccagctgggcactccagctctactggctgtatgtctctctcctaatttttctacttaccacagggcctttgcacacgctgttccctctgcctggtagacttatccatgctccttagggaagcctttcgtggctcctcctcccccaggttaggccccctggttatttacacttgggcatcatgtgccttccctttgctgcatcatttgacattcatttgtgtgattattcatgtctttcccttcccttcccttccccttactcggctggagtcctactggggcagcgacagtgtctcttcttccttgctgttggatctcaggattaagcacagtgcctggcatacagcaggtgctcaataaatacttatcaaattggaaaa

SEQ ID NO: 8834 - protein, 335 aa, Homo sapiens; identical to SEQ ID NO: 1084

SEQ ID NO: 8835 - DNA, 2632 bp, Homo sapiens
ctcctagacaccatgccacaaggagagtgatctcttcccctgttttcacaatggaggactccggaaagactttcagctccgaggaggaagaagctaactattggaaagatctggcgatgacctacaaacagaggtcagtccgagccacgggctccgtgccgtccacgcccattgctcaccgaggacccagctcaagtttaaacacacctgggagcttcagacgtggcctggacgactccaccggggggacccccctcacacctgcggcccggatatcagccctcaacattgtgggagacctactgcggaaagtcggggcactggagtccaaactcgcttcctgccggaacctcgtgtacgatcagtccccaaaccgaacaggtggcccagcctctgggcggagcagcaagaacagagatggcggggagagacggccaagcagcaccagcgtgcctttgggtgataaggggttggacacgagttgccgctggttgtccaaatcaacaaccaggtcgtccagctcctgctgaagcctgttcttggtcttttccagtttatcataagcggccgccttctcctcgtactgctgggtgaggttctcgatctccttctggaacctcttcttcccctcttccagagcttccacggtgctggcaaagtcctgcagcttcttcttcgagtcggagagctacaaggacagcgtccagggtagggtgagagggggaccatgagtggcccctgtccctggccccacagactctgagaagcgaagaccatgtctcctcgttggagaaacccaatagcaggggaagctggggggtcaagcaccatcgcaccaacactccaccgcgatctgcctgcgggggatctcagcgcagagaagttgagaggacccatgaaggaagcaaggacacggggcaggcacctggatgttgagagtggagatgtggcgctccaggttctgcttggcctccatctcctcgtccagctggtcttgcaggctgttccgctcctcctccagctggcgcagcttcgtagacacgttgagcttctgccgggtttcttcttgaagcagctcctgcaaaagggatgcaaagaggtcccagggacctgccccgaggaaggccaccccccaggtcccctggatgatgtggcaggacactcacctgggtgtcctggagctgggaactgagggacgccacgtccttggccagcttaatggccttcccctcggcctcgttaagcatccctgtgacgctctcaacttcattctaagggtgccaagagactggttagtcaaagcctctagaaggggatcctcgttgaaaggagccctttttactcaaaacacatgggctagtacttgaggtgttcactgattgagaaaatacccgtgaggtatgggactctgataaaaaaaaaaaaaaacacacacacacacaaaaaaaacagaatctgtggcttgaagggaactccgtcacctatgagttgggaccctggccctagactctgtggttctaagaacttatttgagccccaatggtattgactgggacctgatcccactaaatggatcctagatccctgccaaggttggtagagacaaagcagcaggtctgagagtccagacgaggtgctctggctggtccactctctaaggctggagaagggagaccaggatggtacttgaacgtcccagggatgctgtcccatcccttccttcctcactcctactctttgaccctgatggccaaagccagagacgcaggccctaaaggtaaaaacgtcctctctgtattctctggcttttactccctagtgtctctgcataagtccctttgaggctgttagcctacccctccatctcttccattgacaaggaggatatgaatgatcttgacactgcttatatgagggcggcaaaagccctgctctcaactgcatgtgagaaaaaaacatctcacttaattcttccctcgccccttggtccctggctgtggacatgttaaacatttgtgaaaactttggccacgtccccatgagtggcaaggcagggtaaatggctatgccaagtgaaagaagaccaaagacaaaaagaccatgtcattcagcagcttaaaacccctcaacagcttcacattgcccagagtaaggatcaacatacatgtaataggttctcaaaagccctacatcatctgggtacaagctccccctccaaccccactctgtactatctccccctacccccaaccccagctgggcactccagctctactggctgtatgtctctctcctaatttttctacttaccacagggcctttgcacacgctgttccctctgcctggtagacttatccatgctccttagggaagcctttcgtggctcctcctcccccaggttaggccccctggttatttacacttgggcatcatgtgccttccctttgctgcatcatttgacattcatttgtgtgattattcatgtctttcccttcccttcccttccccttactcggctggagtcctactggggcagcgacagtgtctcttcttccttgctgttggatctcaggattaagcacagtgcctggcatacagcaggtgctcaataaatacttatcaaattggaaaa

SEQ ID NO: 8836 - protein, 159 aa, Homo sapiens
MEDSGKTFSSEEEEANYWKDLAMTYKQRSVRATGSVPSTPIAHRGPSSSLNTPGSFRRGLDDSTGGTPLTPAARISALNIVGDLLRKVGALESKLASCRNLVYDQSPNRTGGPASGRSSKNRDGGERRPSSTSVPLGDKGLDTSCRWLSKSTTRSSSSC

SEQ ID NO: 8837 - DNA, 322 bp, Homo sapiens
tccgaggaggaagaagctaactattggaaagatctggcgatgacctacaaacagagggcagaaaatacgcaagaggaactccgagaattccaggagggaagccgagaatatgaagacctggctgaattttttgtatttttaatagagacggggttttgccatgttgcccagtgtggtcttgaactcctggcctcaagtgatcctcccatctcggcctcccagaatgctgggatttcaagcatgagccatcgttcccatgccccattgtgttgcactaacccaagcggaggtcctgattggtcttttttttttttttcttttt

SEQ ID NO: 8838 - protein, 93 aa, Homo sapiens [sequence omitted]

SEQ ID NO: 8839 - DNA, 503 bp, Homo sapiens
cagctttcatagtcacaaattattgcaatattttgctgttatactaaatatgggttttttttgtttgtttttaagacagagtctagctctgttacccaggttgcagtgagctgagattgtgctgttgcgctccagcctgggcaacagagtgagacttcatctcaaaaaagaaaaaaaaaggtgaaaggatgacttaaacccagggtgtcgaggttgcagggaaattcagaaatgccactgaagggccaggcatggtgtccaacacctacaatcccagcactttgggaggcagaagcaggtgcatcacctgaagtcgggagttcgagaccagcgtggccaacatggtggaatgctgtctctactaaaaatacaaaaattagcaggatgtggtggtgcgtgcctgtaatcccagctacttgggaggctgagacagaagaatcatttgaaccccggaggcagaggttgcactccgcctgggtgacaagagtggaactccatcttaa

SEQ ID NO: 8840 - protein, 89 aa, Homo sapiens
MPLKGQAWCPTPTIPALWEAEAGASPEVGSSRPAWPTWWNAVSTKNTKISRMWWCVPVIPATWEAETEESFEPRRQRLHSAWVTRVELH

SEQ ID NO: 8841 - DNA, 2306 bp, Homo sapiens
tataacagattgttttcttacagcacttggcagtgcctttaccacagtgtttatgcccttcacaagaaggggttgtgagcagggcagctgggctggtactgggcattttgaacttccactgagaggttaaatatgatctcttccacctgcttaagtgcatcttatgcctggcacaatgcctcatgcctgtaatctcagtaactcaggaggctgaggcgggaggatctcttgagcccaagagtttgagattgcatggtataatctgggctcactacaacctctgcttcctggcagttctcccacctcagcctcccaagtagctgggattacactacaactggctaatttttgtatttctagtagagacaggattttgccatttgcccaagcttgccaggctggtcttgaactcctgatctcaggtcttccacctgcctcggcctcccaaagggctgggattacaggcatgagccaccttgcccagtcatattaggttatttttaatgctggttggcattgtgagcttgcaagagaagatggagcatagtggtcttctcaaaccaccaaatgccacatgcagtcctgatagggctttggcttattgctgagtgctgtgtgggcagcatcttatttaatcctcatgacagcctcgtgcaccccatgagctatgatgagtcccattctgcaggtaaagagcccatgccccagaaggttaagggacttggcccactctgtggcatctaggaagtttggggctgggacttgtgcccaggtgtgtctgacccttcgcacctcctggatccgcggtgctggagggatgctgcggtttgtcctcttggataactctgcttttctcttcgccagcgccacgatcatgtctctcgaagactttgagcagcgcttgaatcaggccatcgaaagaaatgccttcctggaaagtgaacttgatgaaaaagagaatctcctggaatctgttcagagactgaaggatgaagccagagatttgcggcaggaactggccgtgcagcagaagcaggagaaacccaggacccccatgcccagctcagtggaagctgagaggacagacacagctgtgcaggccacgggctccgtgccgtccacgcccattgctcaccgaggacccagctcaagtttaaacacacctgggagcttcagacgtggcctggacgactccaccggggggacccccctcacacctgcggcccggatatcagccctcaacattgtgggagacctactgcggaaagtcggggtaagaccacactttcctggcgtttggtgccttcctgcctgtctttcaggatgtgtgaagggggttgatctagttccttccctctcttctttttttctttttttttagagacagggtcttgctctgttgctcaggctggagtgtagtggtatgatcacaactcactgcagcctcaaaatcctgggttcaagcgatcctctcaccttagcttcccgaggagcttggaccacaggtgtgcgccactatgcctggctgatactttcatttttttgtagtaatgtgggtatcgctgtgttgcccaggctggtcttaaactcctggcctcaagtgatcctcccaggttggcctcccaaagttctgggattacaggcatgagccaatgcgtccagcccctttcatagcagtgtggtgagttttaggtgtggctgctcctttagcatccctgggaatcattagagcttcctgtgggagttactgccagacactcagagctctgactcgaagccctgctctgaaccctatgtatgtctctttccttttaccgtttttcctctaggaaatttgggaaattagggtgatatgtgtgttttttccttaactcgaaaaattaaggagcacttggaaactgccttctcttttggccgggtgctcatacctgtaatcccagtgctttgggaggccaagatgggtggatcacctgaagtcaggaattcaagaccagcctggccaacatggtgaaaccccatctctactaaaaatacaaaaattagccaggaatggtggtgggcacctgcgatcccagctacttgagaggcttatgcaggaaaattgtttgaatccgggaggcggaggttgcagtgagctgagatcgcaccgctgggtgacaaagtgagacttggtctcaaaaaaaaaaaaaaaaaaaatcttgaaagcctagggcaaagaatttggcctttcagcttttatgttaattacagggagggatccttttgtgcttaagtaaaaacataggtattctttgtagtttattttt

SEQ ID NO: 8842 - protein, 237 aa, Homo sapiens
MMSPILQVKSPCPRRLRDLAHSVASRKFGAGTCAQVCLTLRTSWIRGAGGMLRFVLLDNSAFLFASATIMSLEDFEQRLNQAIERNAFLESELDEKENLLESVQRLKDEARDLRQELAVQQKQEKPRTPMPSSVEAERTDTAVQATGSVPSTPIAHRGPSSSLNTPGSFRRGLDDSTGGTPLTPAARISALNIVGDLLRKVGVRPHFPGVWCLPACLSGCVKGVDLVPSLSSFFLFF

SEQ ID NO: 8843 - DNA, 2573 bp, Homo sapiens
gcgccacgatcatgtctctcgaagactttgagcagcgcttgaatcaggccatcgaaagaaatgccttcctggaaagtgaacttgatgaaaaagagaatctcctggaatctgttcagagactgaaggatgaagccagagatttgcggcaggaactggccgtgcagcagaagcaggagaaacccaggacccccatgcccagctcagtggaagctgagaggacagacacagctgtgcaggccacgggctccgtgccgtccacgcccattgctcaccgaggacccagctcaagtttaaacacacctgggagcttcagacgtggcctggacgactccaccggggggacccccctcacacctgcggcccggatatcagccctcaacattgtgggagacctactgcggaaagtcggggttggacacgagttgccgctggttgtccaaatcaacaaccaggtcgtccagctcctgctgaagcctgttcttggtcttttccagtttatcataagcggccgccttctcctcgtactgctgggtgaggttctcgatctccttctggaacctcttcttcccctcttccagagcttccacggtgctggcaaagtcctgcagcttcttcttcgagtcggagagctacaaggacagcgtccagggtagggtgagagggggaccatgagtggcccctgtccctggccccacagactctgagaagcgaagaccatgtctcctcgttggagaaacccaatagcaggggaagctggggggtcaagcaccatcgcaccaacactccaccgcgatctgcctgcgggggatctcagcgcagagaagttgagaggacccatgaaggaagcaaggacacggggcaggcacctggatgttgagagtggagatgtggcgctccaggttctgcttggcctccatctcctcgtccagctggtcttgcaggctgttccgctcctcctccagctggcgcagcttcgtagacacgttgagcttctgccgggtttcttcttgaagcagctcctgcaaaagggatgcaaagaggtcccagggacctgccccgaggaaggccaccccccaggtcccctggatgatgtggcaggacactcacctgggtgtcctggagctgggaactgagggacgccacgtccttggccagcttaatggccttcccctcggcctcgttaagcatccctgtgacgctctcaacttcattctaagggtgccaagagactggttagtcaaagcctctagaaggggatcctcgttgaaaggagccctttttactcaaaacacatgggctagtacttgaggtgttcactgattgagaaaatacccgtgaggtatgggactctgataaaaaaaaaaaaaaacacacacacacacaaaaaaaacagaatctgtggcttgaagggaactccgtcacctatgagttgggaccctggccctagactctgtggttctaagaacttatttgagccccaatggtattgactgggacctgatcccactaaatggatcctagatccctgccaaggttggtagagacaaagcagcaggtctgagagtccagacgaggtgctctggctggtccactctctaaggctggagaagggagaccaggatggtacttgaacgtcccagggatgctgtcccatcccttccttcctcactcctactctttgaccctgatggccaaagccagagacgcaggccctaaaggtaaaaacgtcctctctgtattctctggcttttactccctagtgtctctgcataagtccctttgaggctgttagcctacccctccatctcttccattgacaaggaggatatgaatgatcttgacactgcttatatgagggcggcaaaagccctgctctcaactgcatgtgagaaaaaaacatctcacttaattcttccctcgccccttggtccctggctgtggacatgttaaacatttgtgaaaactttggccacgtccccatgagtggcaaggcagggtaaatggctatgccaagtgaaagaagaccaaagacaaaaagaccatgtcattcagcagcttaaaacccctcaacagcttcacattgcccagagtaaggatcaacatacatgtaataggttctcaaaagccctacatcatctgggtacaagctccccctccaaccccactctgtactatctccccctacccccaaccccagctgggcactccagctctactggctgtatgtctctctcctaatttttctacttaccacagggcctttgcacacgctgttccctctgcctggtagacttatccatgctccttagggaagcctttcgtggctcctcctcccccaggttaggccccctggttatttacacttgggcatcatgtgccttccctttgctgcatcatttgacattcatttgtgtgattattcatgtctttcccttcccttcccttccccttactcggctggagtcctactggggcagcgacagtgtctcttcttccttgctgttggatctcaggattaagcacagtgcctggcatacagcaggtgctcaataaatacttatcaaattggaaaa

SEQ ID NO: 8844 - protein, 213 aa, Homo sapiens
MSLEDFEQRLNQAIERNAFLESELDEKENLLESVQRLKDEARDLRQELAVQQKQEKPRTPMPSSVEAERTDTAVQATGSVPSTPIAHRGPSSSLNTPGSFRRGLDDSTGGTPLTPAARISALNIVGDLLRKVGVGHELPLVVQINNQVVQLLLKPVLGLFQFIISGRLLLVLLGEVLDLLLEPLLPLFQSFHGAGKVLQLLLRVGELQGQRPG

SEQ ID NO: 8845 - DNA, 1202 bp, Homo sapiens
gtgccgtccacgcccattgctcaccgaggacccagctcaagtttaaacacacctgggagcttcagacgtggcctggacgactccaccggggggacccccctcacacctgcggcccggatatcagccctcaacattgtgggagacctactgcggaaagtcggggcactggagtccaaactcgcttcctgccggaacctcgtgtacgatcagtccccaaaccgaacaggtggcccagcctctgggcggagcagcaagaacagagatggcggggagagacggccaagcagcaccagcgtgcctttgggtgataaggggttggggaagcgcctggaatttgggaagccgccttcacacatgtcttcatcgccgctgccgtcagcccagggggtagtcaagatgttgctttaggaaaaccacggaagctgaaggtcttggtgttggtgcggaagtcgttaccttttgtcgtctttttacactaggtttttgttttaagttagtttgagaaataagagcagtcaccatagttagttagctttgcggcccaagccaatgaccgaggccatcacctgtgctctggggtttgtccctgggaaatgtcttttcatccttacctgccaccgtgtgcattgcaaagagggacaaaaggggctctctgggaagggctctaagttgtcggtgatgaggctaccgtgttgtttttgagatagagtcttgctctgtcacccaggctggagtgtggtggcgtgatctcagctcactgcaacctccgcctcctgggttcaaacggttcttgttcctgagtcttccaggtagctgggattacaggcacccaccaccacacctggctgaattttttgtatttttaatagagacggggttttgccatgttgcccagtgtggtcttgaactcctggcctcaagtgatcctcccatctcggcctcccagaatgctgggatttcaagcatgagccatcgttcccatgccccattgtgttgcactaacccaagcggaggtcctgattggtcttttttttttttttcttttttgagacagagtcatgctcttgccctgtcttgtccaggctggagtgtagtggtgcaatttcggctcaccgcagcctccgcctcctaggttcaagcgattctcttatctcagcttcccaagtagctgggactacaggagtgtgccactacacccacta

SEQ ID NO: 8846 - protein, 42 aa, Homo sapiens
MAGRDGQAAPACLWVIRGWGSAWNLGSRLHTCLHRRCRQPRG

SEQ ID NO: 8847 - DNA, 2336 bp, Homo sapiens
attgagatttctagaggtgagttttcagattaattttccaggcgatcttcccaccttgacctcccaagtgctgggggttacaagcgttagcaatcatgcctggcctttttttttttttggagacagggtctcactctgtcacccaggctagactgcggtggtgtgatctcggctcactgcaacctccgcctcctgggctccagcgatccttccacctcagcctaccaagtagctgggactacacatgcaggccaccacacccagctaatttttgtttgcatttttcatagagacagggtctcactatgttgcgtaggctgtaaaacaaacaaacaataggtaagagatggatttttctagtgggtctgagactgggcgttttgtgtgaccttggaatctgagagccaggtagccagtgtcctcttcttcatttcacaggagagaaaattgagaccctgtgagaccctgctcctgactcttgatgttcacccttataactctctgggccccggtgctagccagtttgtcacagctgttatgtcagcttaatttggtttgctctgtctgaaggttggggaagcgcctggaatttgggaagccgccttcacacatgtcttcatcgccgctgccgtcagcccagggggtagtcaagatgttgctttaggaaaaccacggaagctgaaggtcttggtgttggtgcggaagtcgttaccttttgtcgtctttttacactaggtttttgttttaagttagtttgagaaataagagcagtcaccatagttagttagctttgcggcccaagccaatgaccgaggccatcacctgtgctctggggtttgtccctgggaaatgtcttttcatccttacctgccaccgtgtgcattgcaaagagggacaaaaggggctctctgggaagggctctaagttgtcggtgatgaggctaccgtgttgtttttgagatagagtcttgctctgtcacccaggctggagtgtggtggcgtgatctcagctcactgcaacctccgcctcctgggttcaaacggttcttgttcctgagtcttccaggtagctgggattacaggcacccaccaccacacctggctgaattttttgtatttttaatagagacggggttttgccatgttgcccagtgtggtcttgaactcctggcctcaagtgatcctcccatctcggcctcccagaatgctgggatttcaagcatgagccatcgttcccatgccccattgtgttgcactaacccaagcggaggtcctgattggtcttttttttttttttcttttttgagacagagtcatgctcttgccctgtcttgtccaggctggagtgtagtggtgcaatttcggctcaccgcagcctccgcctcctaggttcaagcgattctcttatctcagcttcccaagtagctgggactacaggagtgtgccactacacccactaattttgtatttttagtgaaaccccatctctactaaaaatacaaaaaattagctgggtgcagtggtgcgtgcctataattccagctactccagatgttgaggcaggagagttgcttggacccgggaggtggagggtgcagtgagccaagattgcgctactgtactccagcctgggcaacagagtgagactccgtctccaaaaaaaaaaaaaaaggtgtcataaacctctgagactgtagcctgcttcttagcttctcattgagattcctagaggtgcgttcgagttttcagagtaattttccagaccaaccagcgtcagtgggaaatctgacctcttttggcaaactgcgatcattcattttcctgagtcccctggtggggtggggggaattctgcctcaggaccctgaggggtctttggggcaagatggccttggtaatgcagccactaagaacaggacttcattcaaaggcataatgaagtaaccagggtgaccatcaagtaaaattaaagcacaagatcattgtaggaggcttccttgtcaaagacgtgaacgtgggatttccaacgcaccatggtgtgtccactcatcactgcatgttaggaactgctgtctctttgggacacgagttaaaagaacacactaatttctggagtgtgcctgcagcttcacggccttcattttgttactaagttattttctggaagaacagcaaaaatttcaggttgaaaacagaactttccaagtgctactgaaattccgcagagaattacgctgcgatggtgggtttcttaccctagaaacatcctaacctgtatccacagaagatgtccttttatttttttaaaagatcaataaaatcaagagaaacgaatgtt

SEQ ID NO: 8848 - protein, 64 aa, Homo sapiens
MPGLFFFLETGSHSVTQARLRWCDLGSLQPPPPGLQRSFHLSLPSSWDYTCRPPHPANFCLHFS

SEQ ID NO: 8849 - DNA, 2979 bp, Homo sapiens
attgagatttctagaggtgagttttcagattaattttccaggcgatcttcccaccttgacctcccaagtgctgggggttacaagcgttagcaatcatgcctggcctttttttttttttggagacagggtctcactctgtcacccaggctagactgcggtggtgtgatctcggctcactgcaacctccgcctcctgggctccagcgatccttccacctcagcctaccaagtagctgggactacacatgcaggccaccacacccagctaatttttgtttgcatttttcatagagacagggtctcactatgttgcgtaggctgtaaaacaaacaaacaataggtaagagatggatttttctagtgggtctgagactgggcgttttgtgtgaccttggaatctgagagccaggtagccagtgtcctcttcttcatttcacaggagagaaaattgagaccctgtgagaccctgctcctgactcttgatgttcacccttataactctctgggccccggtgctagccagtttgtcacagctgttatgtcagcttaatttggtttgctctgtctgaaggttggggaagcgcctggaatttgggaagccgccttcacacatgtcttcatcgccgctgccgtcagcccagggggtagtcaagatgttgctttaggaaaaccacggaagctgaaggtcttggtgttggtgcggaagtcgttaccttttgtcgtctttttacactaggtttttgttttaagttagtttgagaaataagagcagtcaccatagttagttagctttgcggcccaagccaatgaccgaggccatcacctgtgctctggggtttgtccctgggaaatgtcttttcatccttacctgccaccgtgtgcattgcaaagagggacaaaaggggctctctgggaagggctctaagttgtcggtgatgaggctaccgtgttgtttttgagatagagtcttgctctgtcacccaggctggagtgtggtggcgtgatctcagctcactgcaacctccgcctcctgggttcaaacggttcttgttcctgagtcttccaggtagctgggattacaggcacccaccaccacacctggctgaattttttgtatttttaatagagacggggttttgccatgttgcccagtgtggtcttgaactcctggcctcaagtgatcctcccatctcggcctcccagaatgctgggatttcaagcatgagccatcgttcccatgccccattgtgttgcactaacccaagcggaggtcctgattggtcttttttttttttttcttttttgagacagagtcatgctcttgccctgtcttgtccaggctggagtgtagtggtgcaatttcggctcaccgcagcctccgcctcctaggttcaagcgattctcttatctcagcttcccaagtagctgggactacaggagtgtgccactacacccactaattttgtatttttagtgaaaccccatctctactaaaaatacaaaaaattagctgggtgcagtggtgcgtgcctataattccagctactccagatgttgaggcaggagagttgcttggacccgggaggtggagggtgcagtgagccaagattgcgctactgtactccagcctgggcaacagagtgagactccgtctccaaaaaaaaaaaaaaaggtgtcataaacctctgagactgtagcctgcttcttagcttctcattgagattcctagaggtgcgttcgagttttcagagtaattttccagaccaaccagcgtcagtgggaaatctgacctcttttggcaaactgcgatcattcattttcctgagtcccctggtggggtggggggaattctgcctcaggaccctgaggggtctttggggcaagatggccttggtaatgcagccactaagaacaggacttcattcaaaggcataatgaagtaaccagggtgaccatcaagtaaaattaaagcacaagatcattgtaggaggcttccttgtcaaagacgtgaacgtgggatttccaacgcaccatggtgtgtccactcatcactgcatgttaggaactgctgtctctttgggacacgagttaaaagaacacactaatttctggagtgtgcctgcagcttcacggccttcattttgttactaagttattttctggaagaacagcaaaaatttcaggttgaaaacagaactttccaagtgctactgaaattccgcagagaattacgctgcgatggtgggtttcttaccctagaaacatcctaacctgtatccacagaagatgtccttttatttttttaaaagatcaataaaatcaagagaaacgaatgttgaacttgttgggcttctggtcaaagaggctttgtatgtttatactttaatgttttcccacagagtggtgaaaaactttttttaaccaagttaaaaaatatgaaaaaatctttttgaaaatttctattcaagccaggtttttagaaatgtatccgggatgtgtttgtgcgtcattcaaggcatattagcatctggtcacaagatggagtcctttgtttccatgtttcctgtctcccaaatctgtctgatcccatggagttggtggtatacggcatcgtttgtgttgaacagagcctttgcaggcatgtctgtctaaaacactcaagctgaaagaaggacagggcctacagcttgtttttatggcccttactctaagaatgatttattatgtttttaagggttgttttaaagaagatgaatattcggcaagaccatatgtagcctgtaaaggctaaaatactatctggctgggtgggtggtggtggtggtgtgagagacaaggtgttactgttacctaggctgcagtgcagtggcgtgatcatagctcactgcagcctggaactcctggctcacatgatcctcctgccttagccttccaagaggttgggagtacaggtgtgcactatcctgcctggcttactaac

SEQ ID NO: 8850 - protein, 64 aa, Homo sapiens; identical to SEQ ID NO: 8848

SEQ ID NO: 8851 - DNA, 1166 bp, Homo sapiens
ttcacccttataactctctgggccccggtgctagccagtttgtcacagctgttatgtcagcttaatttggtttgctctgtctgaaggttggggaagcgcctggaatttgggaagccgccttcacacatgtcttcatcgccgctgccgtcagcccagggggtagtcaagatgttgctttaggaaaaccacggaagctgaaggtcttggtgttggtgcggaagtcgttaccttttgtcgtctttttacactaggtttttgttttaagttagtttgagaaataagagcagtcaccatagttagttagctttgcggcccaagccaatgaccgaggccatcacctgtgctctggggtttgtccctgggaaatgtcttttcatccttacctgccaccgtgtgcattgcaaagagggacaaaaggggctctctgggaagggctctaagttgtcggtgatgaggctaccgtgttgttttgagactccgtctccaaaaaaaaaaaaaaaggtgtcataaacctctgagactgtagcctgcttcttagcttctcattgagattcctagaggtgcgttcgagttttcagagtaattttccagaccaaccagcgtcagtgggaaatctgacctcttttggcaaactgcgatcattcattttcctgagtcccctggtggggtggggggaattctgcctcaggaccctgaggggtctttggggcaagatggccttggtaatgcagccactaagaacaggacttcattcaaaggcataatgaagtaaccagggtgaccatcaagtaaaattaaagcacaagatcattgtaggaggcttccttgtcaaagacgtgaacgtgggatttccaacgcaccatggtgtgtccactcatcactgcatgttaggaactgctgtctctttgggacacgagttaaaagaacacactaatttctggagtgtgcctgcagcttcacggccttcattttgttactaagttattttctggaagaacagcaaaaatttcaggttgaaaacagaactttccaagtgctactgaaattccgcagagaattacgctgcgatggtgggtttcttaccctagaaacatcctaacctgtatccacagaagatgtccttttatttttttaaaagatcaataaaatcaagagaaacgaatgtt

SEQ ID NO: 8852 - protein, 62 aa, Homo sapiens
MTEAITCALGFVPGKCLFILTCHRVHCKEGQKGLSGKGSKLSVMRLPCCFETPSPKKKKKVS

SEQ ID NO: 8853 - DNA, 1809 bp, Homo sapiens
ttcacccttataactctctgggccccggtgctagccagtttgtcacagctgttatgtcagcttaatttggtttgctctgtctgaaggttggggaagcgcctggaatttgggaagccgccttcacacatgtcttcatcgccgctgccgtcagcccagggggtagtcaagatgttgctttaggaaaaccacggaagctgaaggtcttggtgttggtgcggaagtcgttaccttttgtcgtctttttacactaggtttttgttttaagttagtttgagaaataagagcagtcaccatagttagttagctttgcggcccaagccaatgaccgaggccatcacctgtgctctggggtttgtccctgggaaatgtcttttcatccttacctgccaccgtgtgcattgcaaagagggacaaaaggggctctctgggaagggctctaagttgtcggtgatgaggctaccgtgttgttttgagactccgtctccaaaaaaaaaaaaaaaggtgtcataaacctctgagactgtagcctgcttcttagcttctcattgagattcctagaggtgcgttcgagttttcagagtaattttccagaccaaccagcgtcagtgggaaatctgacctcttttggcaaactgcgatcattcattttcctgagtcccctggtggggtggggggaattctgcctcaggaccctgaggggtctttggggcaagatggccttggtaatgcagccactaagaacaggacttcattcaaaggcataatgaagtaaccagggtgaccatcaagtaaaattaaagcacaagatcattgtaggaggcttccttgtcaaagacgtgaacgtgggatttccaacgcaccatggtgtgtccactcatcactgcatgttaggaactgctgtctctttgggacacgagttaaaagaacacactaatttctggagtgtgcctgcagcttcacggccttcattttgttactaagttattttctggaagaacagcaaaaatttcaggttgaaaacagaactttccaagtgctactgaaattccgcagagaattacgctgcgatggtgggtttcttaccctagaaacatcctaacctgtatccacagaagatgtccttttatttttttaaaagatcaataaaatcaagagaaacgaatgttgaacttgttgggcttctggtcaaagaggctttgtatgtttatactttaatgttttcccacagagtggtgaaaaactttttttaaccaagttaaaaaatatgaaaaaatctttttgaaaatttctattcaagccaggtttttagaaatgtatccgggatgtgtttgtgcgtcattcaaggcatattagcatctggtcacaagatggagtcctttgtttccatgtttcctgtctcccaaatctgtctgatcccatggagttggtggtatacggcatcgtttgtgttgaacagagcctttgcaggcatgtctgtctaaaacactcaagctgaaagaaggacagggcctacagcttgtttttatggcccttactctaagaatgatttattatgtttttaagggttgttttaaagaagatgaatattcggcaagaccatatgtagcctgtaaaggctaaaatactatctggctgggtgggtggtggtggtggtgtgagagacaaggtgttactgttacctaggctgcagtgcagtggcgtgatcatagctcactgcagcctggaactcctggctcacatgatcctcctgccttagccttccaagaggttgggagtacaggtgtgcactatcctgcctggcttactaac

SEQ ID NO: 8854 - protein, 62 aa, Homo sapiens; identical to SEQ ID NO: 8852

SEQ ID NO: 8855 - DNA, 759 bp, Homo sapiens
cagggggtagtcaagatgttgctttaggaaaaccacggaagctgaaggtcttggtgttggtgcggaagtcgttaccttttgtcgtctttttacactaggtttttgttttaagttagtttgagaaataagagcagtcaccatagttagttagctttgcggcccaagccaatgaccgaggccatcacctgtgctctggggtttgtccctgggaaatgtcttttcatccttacctgccaccgtgtgcattgcaaagagggacaaaaggggctctctgggaagggctctaagttgtcggtgatgaggctaccgtgttgtttttgagatagagtcttgctctgtcacccaggctggagtgtggtggcgtgatctcagctcactgcaacctccgcctcctgggttcaaacggttcttgttcctataattccagctactccagatgttgaggcaggagagttgcttggacccgggaggtggagggtgcagtgagccaagattgcgctactgtactccagcctgggcaacagagtgagactccgtctccaaaaaaaaaaaaaaaggtgtcataaacctctgagactgtagcctgcttcttagcttctcattgagattcctagaggtgcgttcgagttttcagagtaattttccagaccaaccagcgtcagtgggaaatctgacctcttttggcaaactgcgatcattcattttcctgagtcccctggtggggtggggggaattctgcctcaggaccctgaggggtct

SEQ ID NO: 8856 - protein, 50 aa, Homo sapiens
MTEAITCALGFVPGKCLFILTCHRVHCKEGQKGLSGKGSKLSVMRLPCCF

SEQ ID NO: 8857 - DNA, 1129 bp, Homo sapiens
gtttttttcctattctaaatcaaagaccacagcagaccagaatcctgtggcttctcaaatgaccaagcctgacatattgaaaagcagatcgtcttgctttgaaaaaccttctccacccacccccgcaaccaatttcagctgattaaattcaatcactcatgccttaagactggcaatgatttgttgacttcaacttgaatatctgcatcttatttgtgccgtgtgtgttttctgccataaaaaaaatttatattgcaataggactatagctacaagtttaaaatagatttataaaaaatctatcccaaccatgaagatttctttgctaaataatgtgttttcttacaacccacaggcgaggaaacgagacctctttcgttccttctagaaggtctggaggacgtagagttattgaaaatgcagatggttctgaggaggaaacggacactcgagacgcagacttcaatggaaccaaggccagtgaataagcaactttctacagttttgcaccacggcaagaaaaccaaaaaccaaaacaaacaaacaaaaaaaacccaacaacaacccagaacaaagcaaaacccagcagactgtacttagcattgtctaaatccattctcaaattccaaatatcacagacacccctcacacaaggaatataaaaaccaccaccccctactacccctgtattcaaggtaaaaattgaagtttgtatgatgtaagagatgagaaaaacccaacaggaaacacagacacatcctccagttctatcaatggattgtgcagacactgagtttttagaaaaacatatccacggtaaccggtccctggcaattctgtttacatgaaatggggagaaagtcaccgaaatgggtgccgccggcccccactcccaattcattccctaacctgcaaacctttccaacttctcacgtcaggcctttgagaattctttccccctctcctggtttccacacctcagacacgcacagttcaccaagtgccttctgtagtcacatgaattgaaaaggagacgctgctcccacggaggggagcaggaatgctgcactgtttacaccctgactgtgcttaaaaacactttcactaataaatggttataaatcacaat

SEQ ID NO: 8858 - protein, 60 aa, Homo sapiens
MQMVLRRKRTLETQTSMEPRPVNKQLSTVLHHGKKTKNQNKQTKKTQQQPRTKQNPADCT

SEQ ID NO: 8859 - DNA, 1148 bp, Homo sapiens
agttagcggatggcatgcccggaagccatctgaaatcacctctagagtttggggaccactgcgtgagacagggaaaagtccaaacccctctgagaaggggaagagagcagctggcgcagggcaccaagccttcagggaaaagccccactcgctgcatggcgaggaaacgagacctctttcgttccttctagaaggtctggaggacgtagagttattgaaaatgcagatggttctgaggaggaaacggacactcgagacgcagacttcaatggaaccaaggccagtgaataagcaactttctacagttttgcaccacggcaagaaaaccaaaaaccaaaacaaacaaacaaaaaaaacccaacaacaacccagaacaaagcaaaacccagcagactgtacttagcattgtctaaatccattctcaaattccaaatatcacagacacccctcacacaaggaatataaaaaccaccaccctccagcctgggcaacgtagtaaaacctcatctatacaagaatttaaaaataagctgggcgtggtggtacacacctgtggtcccagctactagggaggctgagccaggaagaacgctccagcccaggacttcgaggctgcaatgagctataattgcatcattgcactccagcctgggcaacagagaccctgtctcaaccaccaccaccaccaccacccctactacccctgtattcaaggtaaaaattgaagtttgtatgatgtaagagatgagaaaaacccaacaggaaacacagacacatcctccagttctatcaatggattgtgcagacactgagtttttagaaaaacatatccacggtaaccggtccctggcaattctgtttacatgaaatggggagaaagtcaccgaaatgggtgccgccggcccccactcccaattcattccctaacctgcaaacctttccaacttctcacgtcaggcctttgagaattctttccccctctcctggtttccacacctcagacacgcacagttcaccaagtgccttctgtagtcacatgaattgaaaaggagacgctgctcccacggaggggagcaggaatgctgcactgtttacaccctgactgtgcttaaaaacactttcactaataaatggttataaatcacaat

SEQ ID NO: 8860 - protein, 58 aa, Homo sapiens
MPGSHLKSPLEFGDHCVRQGKVQTPLRRGREQLAQGTKPSGKSPTRCMARKRDLFRSF

SEQ ID NO: 8861 - DNA, 1635 bp, Homo sapiens
tatgttgtctgctatgtgtcttctttcacttggcaagaattccaggctcatccatgctgtggcatgcattgatactttattccttttcatggctgaatactattccaccatctgactgattcttgagaggagtccagatacggggctcaggaaagcactcaagatgccacctccaggtgacacaccagctacaaggggtgccaccctccgctgaaaccacctgttttccttgctgtttgcagagagaaacaggcggccaccaagtcgctgaagcagaaagacaagaagctgaaggaaatcttgctgcaggtggaggacgagcgcaagatggccgagcagtacaaggagcaggtagcccctgccacccagcctccctcgagcccccagcccccagccggcctcccctaaccacccctccaactctccgcgacaggcagagaaaggcaatgccagggtcaagcagctcaagaggcagctggaggaggcagaggaggagtcccagcgcatcaacgccaaccgcaggaagctgcagcgggagctggatgaggccacggagagcaacgaggccatgggccgcgaggtgaacgcactcaagagcaagctcagagggccccccccacaggaaacttcgcagtgatgcaccaggcgaggaaacgagacctctttcgttccttctagaaggtctggaggacgtagagttattgaaaatgcagatggttctgaggaggaaacggacactcgagacgcagacttcaatggaaccaaggccagtgaataagcaactttctacagttttgcaccacggcaagaaaaccaaaaaccaaaacaaacaaacaaaaaaaacccaacaacaacccagaacaaagcaaaacccagcagactgtacttagcattgtctaaatccattctcaaattccaaatatcacagacacccctcacacaaggaatataaaaaccaccaccctccagcctgggcaacgtagtaaaacctcatctatacaagaatttaaaaataagctgggcgtggtggtacacacctgtggtcccagctactagggaggctgagccaggaagaacgctccagcccaggacttcgaggctgcaatgagctataattgcatcattgcactccagcctgggcaacagagaccctgtctcaaccaccaccaccaccaccacccctactacccctgtattcaaggtaaaaattgaagtttgtatgatgtaagagatgagaaaaacccaacaggaaacacagacacatcctccagttctatcaatggattgtgcagacactgagtttttagaaaaacatatccacggtaaccggtccctggcaattctgtttacatgaaatggggagaaagtcaccgaaatgggtgccgccggcccccactcccaattcattccctaacctgcaaacctttccaacttctcacgtcaggcctttgagaattctttccccctctcctggtttccacacctcagacacgcacagttcaccaagtgccttctgtagtcacatgaattgaaaaggagacgctgctcccacggaggggagcaggaatgctgcactgtttacaccctgactgtgcttaaaaacactttcactaataaatggttataaatcacaat

SEQ ID NO: 8862 - protein, 60 aa, Homo sapiens; identical to SEQ ID NO: 8858

SEQ ID NO: 8863 - DNA, 1596 bp, Homo sapiens
tatgttgtctgctatgtgtcttctttcacttggcaagaattccaggctcatccatgctgtggcatgcattgatactttattccttttcatggctgaatactattccaccatctgactgattcttgagaggagtccagatacggggctcaggaaagcactcaagatgccacctccaggtgacacaccagctacaaggggtgccaccctccgctgaaaccacctgttttccttgctgtttgcagagagaaacaggcggccaccaagtcgctgaagcagaaagacaagaagctgaaggaaatcttgctgcaggtggaggacgagcgcaagatggccgagcagtacaaggagcaggtagcccctgccacccagcctccctcgagcccccagcccccagccggcctcccctaaccacccctccaactctccgcgacaggcagagaaaggcaatgccagggtcaagcagctcaagaggcagctggaggaggcagaggaggagtcccagcgcatcaacgccaaccgcaggaagctgcagcgggagctggatgaggccacggagagcaacgaggccatgggccgcgaggtgaacgcactcaagagcaagctcaggcgaggaaacgagacctctttcgttccttctagaaggtctggaggacgtagagttattgaaaatgcagatggttctgaggaggaaacggacactcgagacgcagacttcaatggaaccaaggccagtgaataagcaactttctacagttttgcaccacggcaagaaaaccaaaaaccaaaacaaacaaacaaaaaaaacccaacaacaacccagaacaaagcaaaacccagcagactgtacttagcattgtctaaatccattctcaaattccaaatatcacagacacccctcacacaaggaatataaaaaccaccaccctccagcctgggcaacgtagtaaaacctcatctatacaagaatttaaaaataagctgggcgtggtggtacacacctgtggtcccagctactagggaggctgagccaggaagaacgctccagcccaggacttcgaggctgcaatgagctataattgcatcattgcactccagcctgggcaacagagaccctgtctcaaccaccaccaccaccaccacccctactacccctgtattcaaggtaaaaattgaagtttgtatgatgtaagagatgagaaaaacccaacaggaaacacagacacatcctccagttctatcaatggattgtgcagacactgagtttttagaaaaacatatccacggtaaccggtccctggcaattctgtttacatgaaatggggagaaagtcaccgaaatgggtgccgccggcccccactcccaattcattccctaacctgcaaacctttccaacttctcacgtcaggcctttgagaattctttccccctctcctggtttccacacctcagacacgcacagttcaccaagtgccttctgtagtcacatgaattgaaaaggagacgctgctcccacggaggggagcaggaatgctgcactgtttacaccctgactgtgcttaaaaacactttcactaataaatggttataaatcacaat

SEQ ID NO: 8864 - protein, 56 aa, Homo sapiens
MGREVNALKSKLRRGNETSFVPSRRSGGRRVIENADGSEEETDTRDADFNGTKASE

SEQ ID NO: 8865 - DNA, 1484 bp, Homo sapiens
caggccgagcagctcagcaacgagctggccacagagcgcagcacggcccagaagaatgagagtgcccggcagcagctcgagcggcagaacaaggagctccggagcaagctccacgagatggagggggccgtcaagtccaagttcaagtccaccatcgcggcgctggaggccaagattgcacagctggaggagcaggtcgagcaggaggccagagagaaacaggcggccaccaagtcgctgaagcagaaagacaagaagctgaaggaaatcttgctgcaggtggaggacgagcgcaagatggccgagcagtacaaggagcaggcagagaaaggcaatgccagggtcaagcagctcaagaggcagctggaggaggcagaggaggagtcccagcgcatcaacgccaaccgcaggaagctgcagcgggagctggatgaggccacggagagcaacgaggccatgggccgcgaggtgaacgcactcaagagcaagctcaggcgaggaaacgagacctctttcgttccttctagaaggtctggaggacgtagagttattgaaaatgcagatggttctgaggaggaaacggacactcgagacgcagacttcaatggaaccaaggccagtgaataagcaactttctacagttttgcaccacggcaagaaaaccaaaaaccaaaacaaacaaacaaaaaaaacccaacaacaacccagaacaaagcaaaacccagcagactgtacttagcattgtctaaatccattctcaaattccaaatatcacagacacccctcacacaaggaatataaaaaccaccaccctccagcctgggcaacgtagtaaaacctcatctatacaagaatttaaaaataagctgggcgtggtggtacacacctgtggtcccagctactagggaggctgagccaggaagaacgctccagcccaggacttcgaggctgcaatgagctataattgcatcattgcactccagcctgggcaacagagaccctgtctcaaccaccaccaccaccaccacccctactacccctgtattcaaggtaaaaattgaagtttgtatgatgtaagagatgagaaaaacccaacaggaaacacagacacatcctccagttctatcaatggattgtgcagacactgagtttttagaaaaacatatccacggtaaccggtccctggcaattctgtttacatgaaatggggagaaagtcaccgaaatgggtgccgccggcccccactcccaattcattccctaacctgcaaacctttccaacttctcacgtcaggcctttgagaattctttccccctctcctggtttccacacctcagacacgcacagttcaccaagtgccttctgtagtcacatgaattgaaaaggagacgctgctcccacggaggggagcaggaatgctgcactgtttacaccctgactgtgcttaaaaacactttcactaataaatggttataaatcacaat

SEQ ID NO: 8866 - protein, 169 aa, Homo sapiens [sequence omitted]

SEQ ID NO: 8867 - DNA, 1523 bp, Homo sapiens
caggccgagcagctcagcaacgagctggccacagagcgcagcacggcccagaagaatgagagtgcccggcagcagctcgagcggcagaacaaggagctccggagcaagctccacgagatggagggggccgtcaagtccaagttcaagtccaccatcgcggcgctggaggccaagattgcacagctggaggagcaggtcgagcaggaggccagagagaaacaggcggccaccaagtcgctgaagcagaaagacaagaagctgaaggaaatcttgctgcaggtggaggacgagcgcaagatggccgagcagtacaaggagcaggcagagaaaggcaatgccagggtcaagcagctcaagaggcagctggaggaggcagaggaggagtcccagcgcatcaacgccaaccgcaggaagctgcagcgggagctggatgaggccacggagagcaacgaggccatgggccgcgaggtgaacgcactcaagagcaagctcagagggccccccccacaggaaacttcgcagtgatgcaccaggcgaggaaacgagacctctttcgttccttctagaaggtctggaggacgtagagttattgaaaatgcagatggttctgaggaggaaacggacactcgagacgcagacttcaatggaaccaaggccagtgaataagcaactttctacagttttgcaccacggcaagaaaaccaaaaaccaaaacaaacaaacaaaaaaaacccaacaacaacccagaacaaagcaaaacccagcagactgtacttagcattgtctaaatccattctcaaattccaaatatcacagacacccctcacacaaggaatataaaaaccaccaccctccagcctgggcaacgtagtaaaacctcatctatacaagaatttaaaaataagctgggcgtggtggtacacacctgtggtcccagctactagggaggctgagccaggaagaacgctccagcccaggacttcgaggctgcaatgagctataattgcatcattgcactccagcctgggcaacagagaccctgtctcaaccaccaccaccaccaccacccctactacccctgtattcaaggtaaaaattgaagtttgtatgatgtaagagatgagaaaaacccaacaggaaacacagacacatcctccagttctatcaatggattgtgcagacactgagtttttagaaaaacatatccacggtaaccggtccctggcaattctgtttacatgaaatggggagaaagtcaccgaaatgggtgccgccggcccccactcccaattcattccctaacctgcaaacctttccaacttctcacgtcaggcctttgagaattctttccccctctcctggtttccacacctcagacacgcacagttcaccaagtgccttctgtagtcacatgaattgaaaaggagacgctgctcccacggaggggagcaggaatgctgcactgtttacaccctgactgtgcttaaaaacactttcactaataaatggttataaatcacaat

SEQ ID NO: 8868 - protein, 135 aa, Homo sapiens
MEGAVKSKFKSTIAALEAKIAQLEEQVEQEAREKQAATKSLKQKDKKLKEILLQVEDERKMAEQYKEQAEKGNARVKQLKRQLEEAEEESQRINANRRKLQRELDEATESNEAMGREVNALKSKLRGPPPQETSQ

SEQ ID NO: 8869 - DNA, 6923 bp, Homo sapiens
agggagatttggacgctccggcctgggaggtgcgtcagatccgagctcgccatccagtttcctctccactagtccccccagttggagatctgggaccaacaaggcaccatggcgcagaagggccaactcagtgacgatgagaagttcctctttgtggacaaaaacttcatcaacagcccagtggcccaggctgactgggccgccaagagactcgtctgggtcccctcggagaagcagggcttcgaggcagccagcattaaggaggagaagggggatgaggtggttgtggagctggtggagaatggcaagaaggtcacggttgggaaagatgacatccagaagatgaacccacccaagttctccaaggtggaggacatggcggagctgacgtgcctcaacgaagcctccgtgctacacaacctgagggagcggtacttctcagggctaatatatacgtactctggcctcttctgcgtggtggtcaacccctataaacacctgcccatctactcggagaagatcgtcgacatgtacaagggcaagaagaggcacgagatgccgcctcacatctacgccatcgcagacacggcctaccggagcatgcttcaagatcgggaggaccagtccattctatgcacaggcgagtctggagccgggaaaaccgaaaacaccaagaaggtcattcagtacctggccgtggtggcctcctcccacaagggcaagaaagacacaagtatcacgggagagctggaaaagcagcttctacaagcaaacccgattctggaggctttcggcaacgccaaaacagtgaagaacgacaactcctcacgattcggcaaattcatccgcatcaacttcgacgtcacgggttacatcgtgggagccaacattgagacctatctgctagaaaaatcacgggcaattcgccaagccagagacgagaggacattccacatcttttactacatgattgctggagccaaggagaagatgagaagtgacttgcttttggagggcttcaacaactacaccttcctctccaatggctttgtgcccatcccagcagcccaggatgatgagatgttccaggaaaccgtggaggccatggcaatcatgggtttcagcgaggaggagcagctatccatattgaaggtggtatcatcggtcctgcagcttggaaatatcgtcttcaagaaggaaagaaacacagaccaggcgtccatgccagataacacagctgctcagaaagtttgccacctcatgggaattaatgtgacagatttcaccagatccatcctcactcctcgtatcaaggttgggcgagatgtggtacagaaagctcagacaaaagaacaggctgactttgctgtagaggctttggccaaggcaacatatgagcgccttttccgctggatactcacccgcgtgaacaaagccctggacaagacccatcggcaaggggcttccttcctggggatcctggatatagctggatttgagatctttgaggtgaactccttcgagcagctgtgcatcaactacaccaacgagaagctgcagcagctcttcaaccacaccatgttcatcctggagcaggaggagtaccagcgcgagggcatcgagtggaacttcatcgactttgggctggacctacagccctgcatcgagctcatcgagcgaccgaacaaccctccaggtgtgctggccctgctggacgaggaatgctggttccccaaagccacggacaagtctttcgtggagaagctgtgcacggagcagggcagccaccccaagttccagaagcccaagcagctcaaggacaagactgagttctccatcatccattatgctgggaaggtggactataatgcgagtgcctggctgaccaagaatatggacccgctgaatgacaacgtgacttccctgctcaatgcctcctccgacaagtttgtggccgacctgtggaaggacgtggaccgcatcgtgggcctggaccagatggccaagatgacggagagctcgctgcccagcgcctccaagaccaagaagggcatgttccgcacagtggggcagctgtacaaggagcagctgggcaagctgatgaccacgctacgcaacaccacgcccaacttcgtgcgctgcatcatccccaaccacgagaagaggtccggcaagctggatgcgttcctggtgctggagcagctgcggtgcaatggggtgctggaaggcattcgcatctgccggcagggcttccccaaccggatcgtcttccaggagttccgccaacgctacgagatcctggcggcgaatgccatccccaaaggcttcatggacgggaagcaggcctgcattctcatgatcaaagccctggaacttgaccccaacttatacaggatagggcagagcaaaatcttcttccgaactggcgtcctggcccacctagaggaggagcgagatttgaagatcaccgatgtcatcatggccttccaggcgatgtgtcgtggctacttggccagaaaggcttttgccaagaggcagcagcagctgaccgccatgaaggtgattcagaggaactgcgccgcctacctcaagctgcggaactggcagtggtggaggcttttcaccaaagtgaagccactgctgcaggtgacacggcaggaggaggagatgcaggccaaggaggatgaactgcagaagaccaaggagcggcagcagaaggcagagaatgagcttaaggagctggaacagaagcactcgcagctgaccgaggagaagaacctgctacaggaacagctgcaggcagagacagagctgtatgcagaggctgaggagatgcgggtgcggctggcggccaagaagcaggagctggaggagatactgcatgagatggaggcccgcctggaggaggaggaagacaggggccagcagctacaggctgaaaggaagaagatggcccagcagatgctggaccttgaagaacagctggaggaggaggaagctgccaggcagaagctgcaacttgagaaggtcacggctgaggccaagatcaagaaactggaggatgagatcctggtcatggatgatcagaacaataaactatcaaaagaacgaaaactccttgaggagaggattagtgacttaacgacaaatcttgcagaagaggaagaaaaggccaagaatcttaccaagctgaaaaacaagcatgaatctatgatttcagaactggaagtgcggctaaagaaggaagagaagagccgacaggagctggagaagctgaaacggaagctggagggtgatgccagcgacttccacgagcagatcgctgacctccaggcgcagatcgcagagctcaagatgcagctggccaagaaggaggaggagctgcaggcggccctggccaggcttgacgatgaaatcgctcagaagaacaatgccctgaagaagatccgggagctggagggccacatctcagacctccaggaggacctggactcagagcgggccgccaggaacaaggctgaaaagcagaagcgagacctcggcgaggagctggaggccctaaagacagagctggaagacacactggacagcacagccactcagcaggagctcagggccaagagggagcaggaggtgacggtgctgaagaaggccctggatgaagagacgcggtcccatgaggctcaggtccaggagatgaggcagaaacacgcacaggcggtggaggagctcacagagcagcttgagcagttcaagagggccaaggcgaacctagacaagaataagcagacgctggagaaagagaacgcagacctggccggggagctgcgggtcctgggccaggccaagcaggaggtggaacataagaagaagaagctggaggcgcaggtgcaggagctgcagtccaagtgcagcgatggggagcgggcccgggcggagctcaatgacaaagtccacaagctgcagaatgaagttgagagcgtcacagggatgcttaacgaggccgaggggaaggccattaagctggccaaggacgtggcgtccctcagttcccagctccaggacacccaggagctgcttcaagaagaaacccggcagaagctcaacgtgtctacgaagctgcgccagctggaggaggagcggaacagcctgcaagaccagctggacgaggagatggaggccaagcagaacctggagcgccacatctccactctcaacatccagctctccgactcgaagaagaagctgcaggactttgccagcaccgtggaagctctggaagaggggaagaagaggttccagaaggagatcgagaacctcacccagcagtacgaggagaaggcggccgcttatgataaactggaaaagaccaagaacaggcttcagcaggagctggacgacctggttgttgatttggacaaccagcggcaactcgtgtccaacctggaaaagaagcagaggaaatttgatcagttgttagccgaggagaaaaacatctcttccaaatacgcggatgagagggacagagctgaggcagaagccagggagaaggaaaccaaggccctgtccctggctcgggcccttgaagaggccttggaagccaaagaggaactcgagcggaccaacaaaatgctcaaagccgaaatggaagacctggtcagctccaaggatgacgtgggcaagaacgtccatgagctggagaagtccaagcgggccctggagacccagatggaggagatgaagacgcagctggaagagctggaggacgagctgcaagccacggaggacgccaaactgcggctggaagtcaacatgcaggcgctcaagggccagttcgaaagggatctccaagcccgggacgagcagaatgaggagaagaggaggcaactgcagagacagcttcacgagtatgagacggaactggaagacgagcgaaagcaacgtgccctggcagctgcagcaaagaagaagctggaaggggacctgaaagacctggagcttcaggccgactctgccatcaaggggagggaggaagccatcaagcagctacgcaaactgcaggctcagatgaaggactttcaaagagagctggaagatgcccgtgcctccagagatgagatctttgccacagccaaagagaatgagaagaaagccaagagcttggaagcagacctcatgcagctacaagaggacctcgccgccgctgagagggctcgcaaacaagcggacctcgagaaggaggaactggcagaggagctggccagtagcctgtcgggaaggaacgcactccaggacgagaagcgccgcctggaggcccggatcgcccagctggaggaggagctggaggaggagcagggcaacatggaggccatgagcgaccgggtccgcaaagccacacagcaggccgagcagctcagcaacgagctggccacagagcgcagcacggcccagaagaatgagagtgcccggcagcagctcgagcggcagaacaaggagctccggagcaagctccacgagatggagggggccgtcaagtccaagttcaagtccaccatcgcggcgctggaggccaagattgcacagctggaggagcaggtcgagcaggaggccagagagaaacaggcggccaccaagtcgctgaagcagaaagacaagaagctgaaggaaatcttgctgcaggtggaggacgagcgcaagatggccgagcagtacaaggagcaggcagagaaaggcaatgccagggtcaagcagctcaagaggcagctggaggaggcagaggaggagtcccagcgcatcaacgccaaccgcaggaagctgcagcgggagctggatgaggccacggagagcaacgaggccatgggccgcgaggtgaacgcactcaagagcaagctcagagggccccccccacaggaaacttcgcagtgatgcaccaggcgaggaaacgagacctctttcgttccttctagaaggtctggaggacgtagagttattgaaaatgcagatggttctgaggaggaaacggacactcgagacgcagacttcaatggaaccaaggccagtgaataagcaactttctacagttttgcaccacggcaagaaaaccaaaaaccaaaacaaacaaacaaaaaaaacccaacaacaacccagaacaaagcaaaacccagcagactgtacttagcattgtctaaatccattctcaaattccaaatatcacagacacccctcacacaaggaatataaaaaccaccaccctccagcctgggcaacgtagtaaaacctcatctatacaagaatttaaaaataagctgggcgtggtggtacacacctgtggtcccagctactagggaggctgagccaggaagaacgctccagcccaggacttcgaggctgcaatgagctataattgcatcattgcactccagcctgggcaacagagaccctgtctcaaccaccaccaccaccaccacccctactacccctgtattcaaggtaaaaattgaagtttgtatgatgtaagagatgagaaaaacccaacaggaaacacagacacatcctccagttctatcaatggattgtgcagacactgagtttttagaaaaacatatccacggtaaccggtccctggcaattctgtttacatgaaatggggagaaagtcaccgaaatgggtgccgccggcccccactcccaattcattccctaacctgcaaacctttccaacttctcacgtcaggcctttgagaattctttccccctctcctggtttccacacctcagacacgcacagttcaccaagtgccttctgtagtcacatgaattgaaaaggagacgctgctcccacggaggggagcaggaatgctgcactgtttacaccctgactgtgcttaaaaacactttcactaataaatggttataaatcacaat

SEQ ID NO: 8870 - protein, 1938 aa, Homo sapiens; identical to SEQ ID NO: 1092

SEQ ID NO: 8871 - DNA, 6884 bp, Homo sapiens
agggagatttggacgctccggcctgggaggtgcgtcagatccgagctcgccatccagtttcctctccactagtccccccagttggagatctgggaccaacaaggcaccatggcgcagaagggccaactcagtgacgatgagaagttcctctttgtggacaaaaacttcatcaacagcccagtggcccaggctgactgggccgccaagagactcgtctgggtcccctcggagaagcagggcttcgaggcagccagcattaaggaggagaagggggatgaggtggttgtggagctggtggagaatggcaagaaggtcacggttgggaaagatgacatccagaagatgaacccacccaagttctccaaggtggaggacatggcggagctgacgtgcctcaacgaagcctccgtgctacacaacctgagggagcggtacttctcagggctaatatatacgtactctggcctcttctgcgtggtggtcaacccctataaacacctgcccatctactcggagaagatcgtcgacatgtacaagggcaagaagaggcacgagatgccgcctcacatctacgccatcgcagacacggcctaccggagcatgcttcaagatcgggaggaccagtccattctatgcacaggcgagtctggagccgggaaaaccgaaaacaccaagaaggtcattcagtacctggccgtggtggcctcctcccacaagggcaagaaagacacaagtatcacgggagagctggaaaagcagcttctacaagcaaacccgattctggaggctttcggcaacgccaaaacagtgaagaacgacaactcctcacgattcggcaaattcatccgcatcaacttcgacgtcacgggttacatcgtgggagccaacattgagacctatctgctagaaaaatcacgggcaattcgccaagccagagacgagaggacattccacatcttttactacatgattgctggagccaaggagaagatgagaagtgacttgcttttggagggcttcaacaactacaccttcctctccaatggctttgtgcccatcccagcagcccaggatgatgagatgttccaggaaaccgtggaggccatggcaatcatgggtttcagcgaggaggagcagctatccatattgaaggtggtatcatcggtcctgcagcttggaaatatcgtcttcaagaaggaaagaaacacagaccaggcgtccatgccagataacacagctgctcagaaagtttgccacctcatgggaattaatgtgacagatttcaccagatccatcctcactcctcgtatcaaggttgggcgagatgtggtacagaaagctcagacaaaagaacaggctgactttgctgtagaggctttggccaaggcaacatatgagcgccttttccgctggatactcacccgcgtgaacaaagccctggacaagacccatcggcaaggggcttccttcctggggatcctggatatagctggatttgagatctttgaggtgaactccttcgagcagctgtgcatcaactacaccaacgagaagctgcagcagctcttcaaccacaccatgttcatcctggagcaggaggagtaccagcgcgagggcatcgagtggaacttcatcgactttgggctggacctacagccctgcatcgagctcatcgagcgaccgaacaaccctccaggtgtgctggccctgctggacgaggaatgctggttccccaaagccacggacaagtctttcgtggagaagctgtgcacggagcagggcagccaccccaagttccagaagcccaagcagctcaaggacaagactgagttctccatcatccattatgctgggaaggtggactataatgcgagtgcctggctgaccaagaatatggacccgctgaatgacaacgtgacttccctgctcaatgcctcctccgacaagtttgtggccgacctgtggaaggacgtggaccgcatcgtgggcctggaccagatggccaagatgacggagagctcgctgcccagcgcctccaagaccaagaagggcatgttccgcacagtggggcagctgtacaaggagcagctgggcaagctgatgaccacgctacgcaacaccacgcccaacttcgtgcgctgcatcatccccaaccacgagaagaggtccggcaagctggatgcgttcctggtgctggagcagctgcggtgcaatggggtgctggaaggcattcgcatctgccggcagggcttccccaaccggatcgtcttccaggagttccgccaacgctacgagatcctggcggcgaatgccatccccaaaggcttcatggacgggaagcaggcctgcattctcatgatcaaagccctggaacttgaccccaacttatacaggatagggcagagcaaaatcttcttccgaactggcgtcctggcccacctagaggaggagcgagatttgaagatcaccgatgtcatcatggccttccaggcgatgtgtcgtggctacttggccagaaaggcttttgccaagaggcagcagcagctgaccgccatgaaggtgattcagaggaactgcgccgcctacctcaagctgcggaactggcagtggtggaggcttttcaccaaagtgaagccactgctgcaggtgacacggcaggaggaggagatgcaggccaaggaggatgaactgcagaagaccaaggagcggcagcagaaggcagagaatgagcttaaggagctggaacagaagcactcgcagctgaccgaggagaagaacctgctacaggaacagctgcaggcagagacagagctgtatgcagaggctgaggagatgcgggtgcggctggcggccaagaagcaggagctggaggagatactgcatgagatggaggcccgcctggaggaggaggaagacaggggccagcagctacaggctgaaaggaagaagatggcccagcagatgctggaccttgaagaacagctggaggaggaggaagctgccaggcagaagctgcaacttgagaaggtcacggctgaggccaagatcaagaaactggaggatgagatcctggtcatggatgatcagaacaataaactatcaaaagaacgaaaactccttgaggagaggattagtgacttaacgacaaatcttgcagaagaggaagaaaaggccaagaatcttaccaagctgaaaaacaagcatgaatctatgatttcagaactggaagtgcggctaaagaaggaagagaagagccgacaggagctggagaagctgaaacggaagctggagggtgatgccagcgacttccacgagcagatcgctgacctccaggcgcagatcgcagagctcaagatgcagctggccaagaaggaggaggagctgcaggcggccctggccaggcttgacgatgaaatcgctcagaagaacaatgccctgaagaagatccgggagctggagggccacatctcagacctccaggaggacctggactcagagcgggccgccaggaacaaggctgaaaagcagaagcgagacctcggcgaggagctggaggccctaaagacagagctggaagacacactggacagcacagccactcagcaggagctcagggccaagagggagcaggaggtgacggtgctgaagaaggccctggatgaagagacgcggtcccatgaggctcaggtccaggagatgaggcagaaacacgcacaggcggtggaggagctcacagagcagcttgagcagttcaagagggccaaggcgaacctagacaagaataagcagacgctggagaaagagaacgcagacctggccggggagctgcgggtcctgggccaggccaagcaggaggtggaacataagaagaagaagctggaggcgcaggtgcaggagctgcagtccaagtgcagcgatggggagcgggcccgggcggagctcaatgacaaagtccacaagctgcagaatgaagttgagagcgtcacagggatgcttaacgaggccgaggggaaggccattaagctggccaaggacgtggcgtccctcagttcccagctccaggacacccaggagctgcttcaagaagaaacccggcagaagctcaacgtgtctacgaagctgcgccagctggaggaggagcggaacagcctgcaagaccagctggacgaggagatggaggccaagcagaacctggagcgccacatctccactctcaacatccagctctccgactcgaagaagaagctgcaggactttgccagcaccgtggaagctctggaagaggggaagaagaggttccagaaggagatcgagaacctcacccagcagtacgaggagaaggcggccgcttatgataaactggaaaagaccaagaacaggcttcagcaggagctggacgacctggttgttgatttggacaaccagcggcaactcgtgtccaacctggaaaagaagcagaggaaatttgatcagttgttagccgaggagaaaaacatctcttccaaatacgcggatgagagggacagagctgaggcagaagccagggagaaggaaaccaaggccctgtccctggctcgggcccttgaagaggccttggaagccaaagaggaactcgagcggaccaacaaaatgctcaaagccgaaatggaagacctggtcagctccaaggatgacgtgggcaagaacgtccatgagctggagaagtccaagcgggccctggagacccagatggaggagatgaagacgcagctggaagagctggaggacgagctgcaagccacggaggacgccaaactgcggctggaagtcaacatgcaggcgctcaagggccagttcgaaagggatctccaagcccgggacgagcagaatgaggagaagaggaggcaactgcagagacagcttcacgagtatgagacggaactggaagacgagcgaaagcaacgtgccctggcagctgcagcaaagaagaagctggaaggggacctgaaagacctggagcttcaggccgactctgccatcaaggggagggaggaagccatcaagcagctacgcaaactgcaggctcagatgaaggactttcaaagagagctggaagatgcccgtgcctccagagatgagatctttgccacagccaaagagaatgagaagaaagccaagagcttggaagcagacctcatgcagctacaagaggacctcgccgccgctgagagggctcgcaaacaagcggacctcgagaaggaggaactggcagaggagctggccagtagcctgtcgggaaggaacgcactccaggacgagaagcgccgcctggaggcccggatcgcccagctggaggaggagctggaggaggagcagggcaacatggaggccatgagcgaccgggtccgcaaagccacacagcaggccgagcagctcagcaacgagctggccacagagcgcagcacggcccagaagaatgagagtgcccggcagcagctcgagcggcagaacaaggagctccggagcaagctccacgagatggagggggccgtcaagtccaagttcaagtccaccatcgcggcgctggaggccaagattgcacagctggaggagcaggtcgagcaggaggccagagagaaacaggcggccaccaagtcgctgaagcagaaagacaagaagctgaaggaaatcttgctgcaggtggaggacgagcgcaagatggccgagcagtacaaggagcaggcagagaaaggcaatgccagggtcaagcagctcaagaggcagctggaggaggcagaggaggagtcccagcgcatcaacgccaaccgcaggaagctgcagcgggagctggatgaggccacggagagcaacgaggccatgggccgcgaggtgaacgcactcaagagcaagctcaggcgaggaaacgagacctctttcgttccttctagaaggtctggaggacgtagagttattgaaaatgcagatggttctgaggaggaaacggacactcgagacgcagacttcaatggaaccaaggccagtgaataagcaactttctacagttttgcaccacggcaagaaaaccaaaaaccaaaacaaacaaacaaaaaaaacccaacaacaacccagaacaaagcaaaacccagcagactgtacttagcattgtctaaatccattctcaaattccaaatatcacagacacccctcacacaaggaatataaaaaccaccaccctccagcctgggcaacgtagtaaaacctcatctatacaagaatttaaaaataagctgggcgtggtggtacacacctgtggtcccagctactagggaggctgagccaggaagaacgctccagcccaggacttcgaggctgcaatgagctataattgcatcattgcactccagcctgggcaacagagaccctgtctcaaccaccaccaccaccaccacccctactacccctgtattcaaggtaaaaattgaagtttgtatgatgtaagagatgagaaaaacccaacaggaaacacagacacatcctccagttctatcaatggattgtgcagacactgagtttttagaaaaacatatccacggtaaccggtccctggcaattctgtttacatgaaatggggagaaagtcaccgaaatgggtgccgccggcccccactcccaattcattccctaacctgcaaacctttccaacttctcacgtcaggcctttgagaattctttccccctctcctggtttccacacctcagacacgcacagttcaccaagtgccttctgtagtcacatgaattgaaaaggagacgctgctcccacggaggggagcaggaatgctgcactgtttacaccctgactgtgcttaaaaacactttcactaataaatggttataaatcacaat

SEQ ID NO: 8872 - protein, 1972 aa, Homo sapiens; identical to SEQ ID NO: 1090

SEQ ID NO: 8873 - DNA, 6944 bp, Homo sapiens
agggagatttggacgctccggcctgggaggtgcgtcagatccgagctcgccatccagtttcctctccactagtccccccagttggagatctgggaccaacaaggcaccatggcgcagaagggccaactcagtgacgatgagaagttcctctttgtggacaaaaacttcatcaacagcccagtggcccaggctgactgggccgccaagagactcgtctgggtcccctcggagaagcagggcttcgaggcagccagcattaaggaggagaagggggatgaggtggttgtggagctggtggagaatggcaagaaggtcacggttgggaaagatgacatccagaagatgaacccacccaagttctccaaggtggaggacatggcggagctgacgtgcctcaacgaagcctccgtgctacacaacctgagggagcggtacttctcagggctaatatatacgtactctggcctcttctgcgtggtggtcaacccctataaacacctgcccatctactcggagaagatcgtcgacatgtacaagggcaagaagaggcacgagatgccgcctcacatctacgccatcgcagacacggcctaccggagcatgcttcaagatcgggaggaccagtccattctatgcacaggcgagtctggagccgggaaaaccgaaaacaccaagaaggtcattcagtacctggccgtggtggcctcctcccacaagggcaagaaagacacaagtatcacgcaaggcccatcttttgcctacggagagctggaaaagcagcttctacaagcaaacccgattctggaggctttcggcaacgccaaaacagtgaagaacgacaactcctcacgattcggcaaattcatccgcatcaacttcgacgtcacgggttacatcgtgggagccaacattgagacctatctgctagaaaaatcacgggcaattcgccaagccagagacgagaggacattccacatcttttactacatgattgctggagccaaggagaagatgagaagtgacttgcttttggagggcttcaacaactacaccttcctctccaatggctttgtgcccatcccagcagcccaggatgatgagatgttccaggaaaccgtggaggccatggcaatcatgggtttcagcgaggaggagcagctatccatattgaaggtggtatcatcggtcctgcagcttggaaatatcgtcttcaagaaggaaagaaacacagaccaggcgtccatgccagataacacagctgctcagaaagtttgccacctcatgggaattaatgtgacagatttcaccagatccatcctcactcctcgtatcaaggttgggcgagatgtggtacagaaagctcagacaaaagaacaggctgactttgctgtagaggctttggccaaggcaacatatgagcgccttttccgctggatactcacccgcgtgaacaaagccctggacaagacccatcggcaaggggcttccttcctggggatcctggatatagctggatttgagatctttgaggtgaactccttcgagcagctgtgcatcaactacaccaacgagaagctgcagcagctcttcaaccacaccatgttcatcctggagcaggaggagtaccagcgcgagggcatcgagtggaacttcatcgactttgggctggacctacagccctgcatcgagctcatcgagcgaccgaacaaccctccaggtgtgctggccctgctggacgaggaatgctggttccccaaagccacggacaagtctttcgtggagaagctgtgcacggagcagggcagccaccccaagttccagaagcccaagcagctcaaggacaagactgagttctccatcatccattatgctgggaaggtggactataatgcgagtgcctggctgaccaagaatatggacccgctgaatgacaacgtgacttccctgctcaatgcctcctccgacaagtttgtggccgacctgtggaaggacgtggaccgcatcgtgggcctggaccagatggccaagatgacggagagctcgctgcccagcgcctccaagaccaagaagggcatgttccgcacagtggggcagctgtacaaggagcagctgggcaagctgatgaccacgctacgcaacaccacgcccaacttcgtgcgctgcatcatccccaaccacgagaagaggtccggcaagctggatgcgttcctggtgctggagcagctgcggtgcaatggggtgctggaaggcattcgcatctgccggcagggcttccccaaccggatcgtcttccaggagttccgccaacgctacgagatcctggcggcgaatgccatccccaaaggcttcatggacgggaagcaggcctgcattctcatgatcaaagccctggaacttgaccccaacttatacaggatagggcagagcaaaatcttcttccgaactggcgtcctggcccacctagaggaggagcgagatttgaagatcaccgatgtcatcatggccttccaggcgatgtgtcgtggctacttggccagaaaggcttttgccaagaggcagcagcagctgaccgccatgaaggtgattcagaggaactgcgccgcctacctcaagctgcggaactggcagtggtggaggcttttcaccaaagtgaagccactgctgcaggtgacacggcaggaggaggagatgcaggccaaggaggatgaactgcagaagaccaaggagcggcagcagaaggcagagaatgagcttaaggagctggaacagaagcactcgcagctgaccgaggagaagaacctgctacaggaacagctgcaggcagagacagagctgtatgcagaggctgaggagatgcgggtgcggctggcggccaagaagcaggagctggaggagatactgcatgagatggaggcccgcctggaggaggaggaagacaggggccagcagctacaggctgaaaggaagaagatggcccagcagatgctggaccttgaagaacagctggaggaggaggaagctgccaggcagaagctgcaacttgagaaggtcacggctgaggccaagatcaagaaactggaggatgagatcctggtcatggatgatcagaacaataaactatcaaaagaacgaaaactccttgaggagaggattagtgacttaacgacaaatcttgcagaagaggaagaaaaggccaagaatcttaccaagctgaaaaacaagcatgaatctatgatttcagaactggaagtgcggctaaagaaggaagagaagagccgacaggagctggagaagctgaaacggaagctggagggtgatgccagcgacttccacgagcagatcgctgacctccaggcgcagatcgcagagctcaagatgcagctggccaagaaggaggaggagctgcaggcggccctggccaggcttgacgatgaaatcgctcagaagaacaatgccctgaagaagatccgggagctggagggccacatctcagacctccaggaggacctggactcagagcgggccgccaggaacaaggctgaaaagcagaagcgagacctcggcgaggagctggaggccctaaagacagagctggaagacacactggacagcacagccactcagcaggagctcagggccaagagggagcaggaggtgacggtgctgaagaaggccctggatgaagagacgcggtcccatgaggctcaggtccaggagatgaggcagaaacacgcacaggcggtggaggagctcacagagcagcttgagcagttcaagagggccaaggcgaacctagacaagaataagcagacgctggagaaagagaacgcagacctggccggggagctgcgggtcctgggccaggccaagcaggaggtggaacataagaagaagaagctggaggcgcaggtgcaggagctgcagtccaagtgcagcgatggggagcgggcccgggcggagctcaatgacaaagtccacaagctgcagaatgaagttgagagcgtcacagggatgcttaacgaggccgaggggaaggccattaagctggccaaggacgtggcgtccctcagttcccagctccaggacacccaggagctgcttcaagaagaaacccggcagaagctcaacgtgtctacgaagctgcgccagctggaggaggagcggaacagcctgcaagaccagctggacgaggagatggaggccaagcagaacctggagcgccacatctccactctcaacatccagctctccgactcgaagaagaagctgcaggactttgccagcaccgtggaagctctggaagaggggaagaagaggttccagaaggagatcgagaacctcacccagcagtacgaggagaaggcggccgcttatgataaactggaaaagaccaagaacaggcttcagcaggagctggacgacctggttgttgatttggacaaccagcggcaactcgtgtccaacctggaaaagaagcagaggaaatttgatcagttgttagccgaggagaaaaacatctcttccaaatacgcggatgagagggacagagctgaggcagaagccagggagaaggaaaccaaggccctgtccctggctcgggcccttgaagaggccttggaagccaaagaggaactcgagcggaccaacaaaatgctcaaagccgaaatggaagacctggtcagctccaaggatgacgtgggcaagaacgtccatgagctggagaagtccaagcgggccctggagacccagatggaggagatgaagacgcagctggaagagctggaggacgagctgcaagccacggaggacgccaaactgcggctggaagtcaacatgcaggcgctcaagggccagttcgaaagggatctccaagcccgggacgagcagaatgaggagaagaggaggcaactgcagagacagcttcacgagtatgagacggaactggaagacgagcgaaagcaacgtgccctggcagctgcagcaaagaagaagctggaaggggacctgaaagacctggagcttcaggccgactctgccatcaaggggagggaggaagccatcaagcagctacgcaaactgcaggctcagatgaaggactttcaaagagagctggaagatgcccgtgcctccagagatgagatctttgccacagccaaagagaatgagaagaaagccaagagcttggaagcagacctcatgcagctacaagaggacctcgccgccgctgagagggctcgcaaacaagcggacctcgagaaggaggaactggcagaggagctggccagtagcctgtcgggaaggaacgcactccaggacgagaagcgccgcctggaggcccggatcgcccagctggaggaggagctggaggaggagcagggcaacatggaggccatgagcgaccgggtccgcaaagccacacagcaggccgagcagctcagcaacgagctggccacagagcgcagcacggcccagaagaatgagagtgcccggcagcagctcgagcggcagaacaaggagctccggagcaagctccacgagatggagggggccgtcaagtccaagttcaagtccaccatcgcggcgctggaggccaagattgcacagctggaggagcaggtcgagcaggaggccagagagaaacaggcggccaccaagtcgctgaagcagaaagacaagaagctgaaggaaatcttgctgcaggtggaggacgagcgcaagatggccgagcagtacaaggagcaggcagagaaaggcaatgccagggtcaagcagctcaagaggcagctggaggaggcagaggaggagtcccagcgcatcaacgccaaccgcaggaagctgcagcgggagctggatgaggccacggagagcaacgaggccatgggccgcgaggtgaacgcactcaagagcaagctcagagggccccccccacaggaaacttcgcagtgatgcaccaggcgaggaaacgagacctctttcgttccttctagaaggtctggaggacgtagagttattgaaaatgcagatggttctgaggaggaaacggacactcgagacgcagacttcaatggaaccaaggccagtgaataagcaactttctacagttttgcaccacggcaagaaaaccaaaaaccaaaacaaacaaacaaaaaaaacccaacaacaacccagaacaaagcaaaacccagcagactgtacttagcattgtctaaatccattctcaaattccaaatatcacagacacccctcacacaaggaatataaaaaccaccaccctccagcctgggcaacgtagtaaaacctcatctatacaagaatttaaaaataagctgggcgtggtggtacacacctgtggtcccagctactagggaggctgagccaggaagaacgctccagcccaggacttcgaggctgcaatgagctataattgcatcattgcactccagcctgggcaacagagaccctgtctcaaccaccaccaccaccaccacccctactacccctgtattcaaggtaaaaattgaagtttgtatgatgtaagagatgagaaaaacccaacaggaaacacagacacatcctccagttctatcaatggattgtgcagacactgagtttttagaaaaacatatccacggtaaccggtccctggcaattctgtttacatgaaatggggagaaagtcaccgaaatgggtgccgccggcccccactcccaattcattccctaacctgcaaacctttccaacttctcacgtcaggcctttgagaattctttccccctctcctggtttccacacctcagacacgcacagttcaccaagtgccttctgtagtcacatgaattgaaaaggagacgctgctcccacggaggggagcaggaatgctgcactgtttacaccctgactgtgcttaaaaacactttcactaataaatggttataaatcacaat

SEQ ID NO: 8874 - protein, 1945 aa, Homo sapiens; identical to SEQ ID NO: 1086

SEQ ID NO: 8875 - DNA, 6905 bp, Homo sapiens
agggagatttggacgctccggcctgggaggtgcgtcagatccgagctcgccatccagtttcctctccactagtccccccagttggagatctgggaccaacaaggcaccatggcgcagaagggccaactcagtgacgatgagaagttcctctttgtggacaaaaacttcatcaacagcccagtggcccaggctgactgggccgccaagagactcgtctgggtcccctcggagaagcagggcttcgaggcagccagcattaaggaggagaagggggatgaggtggttgtggagctggtggagaatggcaagaaggtcacggttgggaaagatgacatccagaagatgaacccacccaagttctccaaggtggaggacatggcggagctgacgtgcctcaacgaagcctccgtgctacacaacctgagggagcggtacttctcagggctaatatatacgtactctggcctcttctgcgtggtggtcaacccctataaacacctgcccatctactcggagaagatcgtcgacatgtacaagggcaagaagaggcacgagatgccgcctcacatctacgccatcgcagacacggcctaccggagcatgcttcaagatcgggaggaccagtccattctatgcacaggcgagtctggagccgggaaaaccgaaaacaccaagaaggtcattcagtacctggccgtggtggcctcctcccacaagggcaagaaagacacaagtatcacgcaaggcccatcttttgcctacggagagctggaaaagcagcttctacaagcaaacccgattctggaggctttcggcaacgccaaaacagtgaagaacgacaactcctcacgattcggcaaattcatccgcatcaacttcgacgtcacgggttacatcgtgggagccaacattgagacctatctgctagaaaaatcacgggcaattcgccaagccagagacgagaggacattccacatcttttactacatgattgctggagccaaggagaagatgagaagtgacttgcttttggagggcttcaacaactacaccttcctctccaatggctttgtgcccatcccagcagcccaggatgatgagatgttccaggaaaccgtggaggccatggcaatcatgggtttcagcgaggaggagcagctatccatattgaaggtggtatcatcggtcctgcagcttggaaatatcgtcttcaagaaggaaagaaacacagaccaggcgtccatgccagataacacagctgctcagaaagtttgccacctcatgggaattaatgtgacagatttcaccagatccatcctcactcctcgtatcaaggttgggcgagatgtggtacagaaagctcagacaaaagaacaggctgactttgctgtagaggctttggccaaggcaacatatgagcgccttttccgctggatactcacccgcgtgaacaaagccctggacaagacccatcggcaaggggcttccttcctggggatcctggatatagctggatttgagatctttgaggtgaactccttcgagcagctgtgcatcaactacaccaacgagaagctgcagcagctcttcaaccacaccatgttcatcctggagcaggaggagtaccagcgcgagggcatcgagtggaacttcatcgactttgggctggacctacagccctgcatcgagctcatcgagcgaccgaacaaccctccaggtgtgctggccctgctggacgaggaatgctggttccccaaagccacggacaagtctttcgtggagaagctgtgcacggagcagggcagccaccccaagttccagaagcccaagcagctcaaggacaagactgagttctccatcatccattatgctgggaaggtggactataatgcgagtgcctggctgaccaagaatatggacccgctgaatgacaacgtgacttccctgctcaatgcctcctccgacaagtttgtggccgacctgtggaaggacgtggaccgcatcgtgggcctggaccagatggccaagatgacggagagctcgctgcccagcgcctccaagaccaagaagggcatgttccgcacagtggggcagctgtacaaggagcagctgggcaagctgatgaccacgctacgcaacaccacgcccaacttcgtgcgctgcatcatccccaaccacgagaagaggtccggcaagctggatgcgttcctggtgctggagcagctgcggtgcaatggggtgctggaaggcattcgcatctgccggcagggcttccccaaccggatcgtcttccaggagttccgccaacgctacgagatcctggcggcgaatgccatccccaaaggcttcatggacgggaagcaggcctgcattctcatgatcaaagccctggaacttgaccccaacttatacaggatagggcagagcaaaatcttcttccgaactggcgtcctggcccacctagaggaggagcgagatttgaagatcaccgatgtcatcatggccttccaggcgatgtgtcgtggctacttggccagaaaggcttttgccaagaggcagcagcagctgaccgccatgaaggtgattcagaggaactgcgccgcctacctcaagctgcggaactggcagtggtggaggcttttcaccaaagtgaagccactgctgcaggtgacacggcaggaggaggagatgcaggccaaggaggatgaactgcagaagaccaaggagcggcagcagaaggcagagaatgagcttaaggagctggaacagaagcactcgcagctgaccgaggagaagaacctgctacaggaacagctgcaggcagagacagagctgtatgcagaggctgaggagatgcgggtgcggctggcggccaagaagcaggagctggaggagatactgcatgagatggaggcccgcctggaggaggaggaagacaggggccagcagctacaggctgaaaggaagaagatggcccagcagatgctggaccttgaagaacagctggaggaggaggaagctgccaggcagaagctgcaacttgagaaggtcacggctgaggccaagatcaagaaactggaggatgagatcctggtcatggatgatcagaacaataaactatcaaaagaacgaaaactccttgaggagaggattagtgacttaacgacaaatcttgcagaagaggaagaaaaggccaagaatcttaccaagctgaaaaacaagcatgaatctatgatttcagaactggaagtgcggctaaagaaggaagagaagagccgacaggagctggagaagctgaaacggaagctggagggtgatgccagcgacttccacgagcagatcgctgacctccaggcgcagatcgcagagctcaagatgcagctggccaagaaggaggaggagctgcaggcggccctggccaggcttgacgatgaaatcgctcagaagaacaatgccctgaagaagatccgggagctggagggccacatctcagacctccaggaggacctggactcagagcgggccgccaggaacaaggctgaaaagcagaagcgagacctcggcgaggagctggaggccctaaagacagagctggaagacacactggacagcacagccactcagcaggagctcagggccaagagggagcaggaggtgacggtgctgaagaaggccctggatgaagagacgcggtcccatgaggctcaggtccaggagatgaggcagaaacacgcacaggcggtggaggagctcacagagcagcttgagcagttcaagagggccaaggcgaacctagacaagaataagcagacgctggagaaagagaacgcagacctggccggggagctgcgggtcctgggccaggccaagcaggaggtggaacataagaagaagaagctggaggcgcaggtgcaggagctgcagtccaagtgcagcgatggggagcgggcccgggcggagctcaatgacaaagtccacaagctgcagaatgaagttgagagcgtcacagggatgcttaacgaggccgaggggaaggccattaagctggccaaggacgtggcgtccctcagttcccagctccaggacacccaggagctgcttcaagaagaaacccggcagaagctcaacgtgtctacgaagctgcgccagctggaggaggagcggaacagcctgcaagaccagctggacgaggagatggaggccaagcagaacctggagcgccacatctccactctcaacatccagctctccgactcgaagaagaagctgcaggactttgccagcaccgtggaagctctggaagaggggaagaagaggttccagaaggagatcgagaacctcacccagcagtacgaggagaaggcggccgcttatgataaactggaaaagaccaagaacaggcttcagcaggagctggacgacctggttgttgatttggacaaccagcggcaactcgtgtccaacctggaaaagaagcagaggaaatttgatcagttgttagccgaggagaaaaacatctcttccaaatacgcggatgagagggacagagctgaggcagaagccagggagaaggaaaccaaggccctgtccctggctcgggcccttgaagaggccttggaagccaaagaggaactcgagcggaccaacaaaatgctcaaagccgaaatggaagacctggtcagctccaaggatgacgtgggcaagaacgtccatgagctggagaagtccaagcgggccctggagacccagatggaggagatgaagacgcagctggaagagctggaggacgagctgcaagccacggaggacgccaaactgcggctggaagtcaacatgcaggcgctcaagggccagttcgaaagggatctccaagcccgggacgagcagaatgaggagaagaggaggcaactgcagagacagcttcacgagtatgagacggaactggaagacgagcgaaagcaacgtgccctggcagctgcagcaaagaagaagctggaaggggacctgaaagacctggagcttcaggccgactctgccatcaaggggagggaggaagccatcaagcagctacgcaaactgcaggctcagatgaaggactttcaaagagagctggaagatgcccgtgcctccagagatgagatctttgccacagccaaagagaatgagaagaaagccaagagcttggaagcagacctcatgcagctacaagaggacctcgccgccgctgagagggctcgcaaacaagcggacctcgagaaggaggaactggcagaggagctggccagtagcctgtcgggaaggaacgcactccaggacgagaagcgccgcctggaggcccggatcgcccagctggaggaggagctggaggaggagcagggcaacatggaggccatgagcgaccgggtccgcaaagccacacagcaggccgagcagctcagcaacgagctggccacagagcgcagcacggcccagaagaatgagagtgcccggcagcagctcgagcggcagaacaaggagctccggagcaagctccacgagatggagggggccgtcaagtccaagttcaagtccaccatcgcggcgctggaggccaagattgcacagctggaggagcaggtcgagcaggaggccagagagaaacaggcggccaccaagtcgctgaagcagaaagacaagaagctgaaggaaatcttgctgcaggtggaggacgagcgcaagatggccgagcagtacaaggagcaggcagagaaaggcaatgccagggtcaagcagctcaagaggcagctggaggaggcagaggaggagtcccagcgcatcaacgccaaccgcaggaagctgcagcgggagctggatgaggccacggagagcaacgaggccatgggccgcgaggtgaacgcactcaagagcaagctcaggcgaggaaacgagacctctttcgttccttctagaaggtctggaggacgtagagttattgaaaatgcagatggttctgaggaggaaacggacactcgagacgcagacttcaatggaaccaaggccagtgaataagcaactttctacagttttgcaccacggcaagaaaaccaaaaaccaaaacaaacaaacaaaaaaaacccaacaacaacccagaacaaagcaaaacccagcagactgtacttagcattgtctaaatccattctcaaattccaaatatcacagacacccctcacacaaggaatataaaaaccaccaccctccagcctgggcaacgtagtaaaacctcatctatacaagaatttaaaaataagctgggcgtggtggtacacacctgtggtcccagctactagggaggctgagccaggaagaacgctccagcccaggacttcgaggctgcaatgagctataattgcatcattgcactccagcctgggcaacagagaccctgtctcaaccaccaccaccaccaccacccctactacccctgtattcaaggtaaaaattgaagtttgtatgatgtaagagatgagaaaaacccaacaggaaacacagacacatcctccagttctatcaatggattgtgcagacactgagtttttagaaaaacatatccacggtaaccggtccctggcaattctgtttacatgaaatggggagaaagtcaccgaaatgggtgccgccggcccccactcccaattcattccctaacctgcaaacctttccaacttctcacgtcaggcctttgagaattctttccccctctcctggtttccacacctcagacacgcacagttcaccaagtgccttctgtagtcacatgaattgaaaaggagacgctgctcccacggaggggagcaggaatgctgcactgtttacaccctgactgtgcttaaaaacactttcactaataaatggttataaatcacaat

SEQ ID NO: 8876 - protein, 1979 aa, Homo sapiens; identical to SEQ ID NO: 1088

SEQ ID NO: 8877 - DNA, 737 bp, Homo sapiens
caacccagaacaaagcaaaacccagcagactgtacttagcattgtctaaatccattctcaaattccaaatatcacagacacccctcacacaaggaatataaaaaccaccaccctccagcctgggcaacgtagtaaaacctcatctatacaagaatttaaaaataagctgggcgtggtggtacacacctgtggtcccagctactagggaggctgagccaggaagaacgctccagcccaggacttcgaggctgcaatgagctataattgcatcattgcactccagcctgggcaacagagaccctgtctcaaccaccaccaccaccaccacccctactacccctgtattcaaggtaaaaattgaagtttgtatgatgtaagagatgagaaaaacccaacaggaaacacagacacatcctccagttctatcaatggattgtgcagacactgagtttttagaaaaacatatccacggtaaccggtccctggcaattctgtttacatgaaatggggagaaagtcaccgaaatgggtgccgccggcccccactcccaattcattccctaacctgcaaacctttccaacttctcacgtcaggcctttgagaattctttccccctctcctggtttccacacctcagacacgcacagttcaccaagtgccttctgtagtcacatgaattgaaaaggagacgctgctcccacggaggggagcaggaatgactttcactaataaatggt

SEQ ID NO: 8878 - protein, 58 aa, Homo sapiens
MGRKSPKWVPPAPTPNSFPNLQTFPTSHVRPLRILSPSPGFHTSDTHSSPSAFCSHMN

SEQ ID NO: 8879 - DNA, 2297 bp, Homo sapiens
agaagtaggcttcaggtcttggtgatcaagttgtggccacaatagctagatattgaacttgatactatttttatcatattactttcatcgtaaccagttgatagaggtgatgctggtttaaaaatatagaggaggttggacacgagttgccgctggttgtccaaatcaacaaccaggtcgtccagctcctgctgaagcctgttcttggtcttttccagtttatcataagcggccgccttctcctcgtactgctgggtgaggttctcgatctccttctggaacctcttcttcccctcttccagagcttccacggtgctggcaaagtcctgcagcttcttcttcgagtcggagagctacaaggacagcgtccagggtagggtgagagggggaccatgagtggcccctgtccctggccccacagactctgagaagcgaagaccatgtctcctcgttggagaaacccaatagcaggggaagctggggggtcaagcaccatcgcaccaacactccaccgcgatctgcctgcgggggatctcagcgcagagaagttgagaggacccatgaaggaagcaaggacacggggcaggcacctggatgttgagagtggagatgtggcgctccaggttctgcttggcctccatctcctcgtccagctggtcttgcaggctgttccgctcctcctccagctggcgcagcttcgtagacacgttgagcttctgccgggtttcttcttgaagcagctcctgcaaaagggatgcaaagaggtcccagggacctgccccgaggaaggccaccccccaggtcccctggatgatgtggcaggacactcacctgggtgtcctggagctgggaactgagggacgccacgtccttggccagcttaatggccttcccctcggcctcgttaagcatccctgtgacgctctcaacttcattctaagggtgccaagagactggttagtcaaagcctctagaaggggatcctcgttgaaaggagccctttttactcaaaacacatgggctagtacttgaggtgttcactgattgagaaaatacccgtgaggtatgggactctgataaaaaaaaaaaaaaacacacacacacacaaaaaaaacagaatctgtggcttgaagggaactccgtcacctatgagttgggaccctggccctagactctgtggttctaagaacttatttgagccccaatggtattgactgggacctgatcccactaaatggatcctagatccctgccaaggttggtagagacaaagcagcaggtctgagagtccagacgaggtgctctggctggtccactctctaaggctggagaagggagaccaggatggtacttgaacgtcccagggatgctgtcccatcccttccttcctcactcctactctttgaccctgatggccaaagccagagacgcaggccctaaaggtaaaaacgtcctctctgtattctctggcttttactccctagtgtctctgcataagtccctttgaggctgttagcctacccctccatctcttccattgacaaggaggatatgaatgatcttgacactgcttatatgagggcggcaaaagccctgctctcaactgcatgtgagaaaaaaacatctcacttaattcttccctcgccccttggtccctggctgtggacatgttaaacatttgtgaaaactttggccacgtccccatgagtggcaaggcagggtaaatggctatgccaagtgaaagaagaccaaagacaaaaagaccatgtcattcagcagcttaaaacccctcaacagcttcacattgcccagagtaaggatcaacatacatgtaataggttctcaaaagccctacatcatctgggtacaagctccccctccaaccccactctgtactatctccccctacccccaaccccagctgggcactccagctctactggctgtatgtctctctcctaatttttctacttaccacagggcctttgcacacgctgttccctctgcctggtagacttatccatgctccttagggaagcctttcgtggctcctcctcccccaggttaggccccctggttatttacacttgggcatcatgtgccttccctttgctgcatcatttgacattcatttgtgtgattattcatgtctttcccttcccttcccttccccttactcggctggagtcctactggggcagcgacagtgtctcttcttccttgctgttggatctcaggattaagcacagtgcctggcatacagcaggtgctcaataaatacttatcaaattggaaaa

SEQ ID NO: 8880 - protein, 138 aa, Homo sapiens [sequence omitted]

SEQ ID NO: 8881 - DNA, 256 bp, Homo sapiens
gagggaggaagccatcaagcagctacgcaaactgcaggctcagatgaaggactttcaaagagagctggaagatgcccgtgcctccagagatgagatctttgccacagccaaagagaatgagaagaaagccaagagcttggaagcagacctcatgcagctacaagaggacctcgccgccgctgagagggctcgcaaacaagcggacctcgagaaggaggaactggcagaggagctggccagtagcctgtcgggaagg

SEQ ID NO: 8882 - protein, 70 aa, Homo sapiens
MKDFQRELEDARASRDEIFATAKENEKKAKSLEADLMQLQEDLAAAERARKQADLEKEELAEELASSLSG

SEQ ID NO: 8883 - DNA, 2347 bp, Homo sapiens
cgagttcctctttggcttccaaggcctcttcaagggcccgagccagggacagggccttggtttccttctccctggcttctgcctcagctctgtccctctcatccgcgtatttggaagagatgtttttctcctcggctaacaactacaacacaagacccagaggtgacttctaggcatatccggggttggacacgagttgccgctggttgtccaaatcaacaaccaggtcgtccagctcctgctgaagcctgttcttggtcttttccagtttatcataagcggccgccttctcctcgtactgctgggtgaggttctcgatctccttctggaacctcttcttcccctcttccagagcttccacggtgctggcaaagtcctgcagcttcttcttcgagtcggagagctacaaggacagcgtccagggtagggtgagagggggaccatgagtggcccctgtccctggccccacagactctgagaagcgaagaccatgtctcctcgttggagaaacccaatagcaggggaagctggggggtcaagcaccatcgcaccaacactccaccgcgatctgcctgcgggggatctcagcgcagagaagttgagaggacccatgaaggaagcaaggacacggggcaggcacctggatgttgagagtggagatgtggcgctccaggttctgcttggcctccatctcctcgtccagctggtcttgcaggctgttccgctcctcctccagctggcgcagcttcgtagacacgttgagcttctgccgggtttcttcttgaagcagctcctgcaaaagggatgcaaagaggtcccagggacctgccccgaggaaggccaccccccaggtcccctggatgatgtggcaggacactcacctgggtgtcctggagctgggaactgagggacgccacgtccttggccagcttaatggccttcccctcggcctcgttaagcatccctgtgacgctctcaacttcattctaagggtgccaagagactggttagtcaaagcctctagaaggggatcctcgttgaaaggagccctttttactcaaaacacatgggctagtacttgaggtgttcactgattgagaaaatacccgtgaggtatgggactctgataaaaaaaaaaaaaaacacacacacacacaaaaaaaacagaatctgtggcttgaagggaactccgtcacctatgagttgggaccctggccctagactctgtggttctaagaacttatttgagccccaatggtattgactgggacctgatcccactaaatggatcctagatccctgccaaggttggtagagacaaagcagcaggtctgagagtccagacgaggtgctctggctggtccactctctaaggctggagaagggagaccaggatggtacttgaacgtcccagggatgctgtcccatcccttccttcctcactcctactctttgaccctgatggccaaagccagagacgcaggccctaaaggtaaaaacgtcctctctgtattctctggcttttactccctagtgtctctgcataagtccctttgaggctgttagcctacccctccatctcttccattgacaaggaggatatgaatgatcttgacactgcttatatgagggcggcaaaagccctgctctcaactgcatgtgagaaaaaaacatctcacttaattcttccctcgccccttggtccctggctgtggacatgttaaacatttgtgaaaactttggccacgtccccatgagtggcaaggcagggtaaatggctatgccaagtgaaagaagaccaaagacaaaaagaccatgtcattcagcagcttaaaacccctcaacagcttcacattgcccagagtaaggatcaacatacatgtaataggttctcaaaagccctacatcatctgggtacaagctccccctccaaccccactctgtactatctccccctacccccaaccccagctgggcactccagctctactggctgtatgtctctctcctaatttttctacttaccacagggcctttgcacacgctgttccctctgcctggtagacttatccatgctccttagggaagcctttcgtggctcctcctcccccaggttaggccccctggttatttacacttgggcatcatgtgccttccctttgctgcatcatttgacattcatttgtgtgattattcatgtctttcccttcccttcccttccccttactcggctggagtcctactggggcagcgacagtgtctcttcttccttgctgttggatctcaggattaagcacagtgcctggcatacagcaggtgctcaataaatacttatcaaattggaaaa

SEQ ID NO: 8884 - protein, 138 aa, Homo sapiens [sequence omitted]

SEQ ID NO: 8885 - DNA, 1112 bp, Homo sapiens
caggcctctttgggaagacgcagttattaagaccaccagcagacggcatgtccattactgacccgcacaaagcaggtagaggtgcaaacctctgcccatctcaggtgcagggaaacagaggcctttgcctctaacaacttgaattctgatgtagagacctggttccatctgcttgtgggggaaacgtttaacatcagctcctacctgggctccccaggccctcgtgcggtttggccccagttctggggtcttaggctgggctaaggtttctgggagcccatgtcccctagggtccccgcttcactgctttgttaccaccaagagactccctgtccccatctgaggtctggcagctcttagtcatgtcttggagggaggacgggcatccagggctgaccggtcaacgtccagcacctcccagggactatgggaagactgagtggtgggtctcgtcctctcgggatacttgcgcttcttcttactggtgattgtgtgccccctgttgtgtgccttcctggacctctctgagggaggaaagggcagggcctgaaacgttctcccggccacagcctccctgttatccctcccctctgcttccttcgccaggccaaggcgaacctagacaagaataagcagacgctggagaaagagaacgcagacctggccggggagctgcgggtcctgggccaggccaagcaggaggtggaacataagaagaagaagctggaggcgcaggtgcaggagctgcagtccaagtgcagcgatggggagcgggcccgggcggagctcaatgacaaagtccacaagctgcaggtgaggaggtggcgcggtggtgtggtgggcagtgctgggtggtgcccagttctgtggggaggagcctcttcccggctcgctgaggtctctcttgctgcaaggcaagtcctttcctctagttgcgttcctggaggagaggcgatgatctccctgttcaattaaatattaaaaaaaccttctggccaggcacggtggctcatgcctgtaatcccagcactttgggagacagaggtgggtggatcacctgaggtcaggggtttgagaccagtctggccaacatggtgaaaagtctctactaa

SEQ ID NO: 8886 - protein, 41 aa, Homo sapiens [sequence omitted]

SEQ ID NO: 8887 - DNA, 798 bp, Homo sapiens
aatatttaattgaacagggagatcatcgcctctcctccaggaacgcaactagaggaaaggacttgccttgcagcaagagagacctcagcgagccgggaagaggctcctccccacagaactgggcaccacccagcactgcccaccacaccaccgcgccacctcctcacctgcagcttgtggactttgtcattgagctccgcccgggcccgctccccatcgctgcacttggactgcagctcctgcacctgcgcctccagcttcttcttcttatgttccacctcctgcttggcctggcccaggacccgcagctccccggccagaccctgacctgtagtaatttgaggctgctgatgtcactcttatgtgtcatcaccaaaaagcatcaccaaaaagcattaccctcttgaactgctcaagctgctctgtgagctcctccaccgcctgtgcgtgtttctgcctcatctcctggacctgagcctcatgggaccgcgtctcttcatccagggccttcttcagcaccgtcacctcctgctccctcttggcccttggtgggaggaacacagtgaatggcagttgggtggagacagagggtcatctcagtgccgtgcaaaagaatgagagctcttccaggacccagagctgcagtcctcatcaccacccctctctagctgtgtgaccttgggtcattcacctaacatctctggacctaaaatttcctcagctgcaaaatgtggagcatatcacctgcctaggacatctgtaatgactggcaaacaaatacacaaagtaatagaattg

SEQ ID NO: 8888 - protein, 45 aa, Homo sapiens
MFHLLLGLAQDPQLPGQTLTCSNLRLLMSLLCVITKKHHQKALPS

SEQ ID NO: 8889 - DNA, 851 bp, Homo sapiens
aatatttaattgaacagggagatcatcgcctctcctccaggaacgcaactagaggaaaggacttgccttgcagcaagagagacctcagcgagccgggaagaggctcctccccacagaactgggcaccacccagcactgcccaccacaccaccgcgccacctcctcacctgcagcttgtggactttgtcattgagctccgcccgggcccgctccccatcgctgcacttggactgcagctcctgcacctgcgcctccagcttcttcttcttatgttccacctcctgcttggcctggcccaggacccgcagctccccggccagaccctgacctgtagtaatttgaggctgctgatgtcactcttatgtgtcatcaccaaaaagcatcaccaaaaagcattaccctcttgaactgctcaagctgctctgtgagctcctccaccgcctgtgcgtgtttctgcctcatctcctggacctgagcctcatgggaccgcgtctcttcatccagggccttcttcagcaccgtcacctcctgctccctcttggcccttggtgggaggaacacagtgaatggcagttgggtggagacagagggtcatctcagtgccgtgcaaaagaatgagagctcttccaggacccagagctgcagtcctcatcaccacccctctctagctgtgtgaccttgggtcattcacctaacatctctggacctaaaatttcctcagctgcaaaatgtggagcatatcacctgcctaggacatctgtaatgactggcaaacaaatacacaaagtaatagaattgaaaggatgtctgtgaactgcaaaattttgcttaaatattaatgttggctctta

SEQ ID NO: 8890 - protein, 45 aa, Homo sapiens; identical to SEQ ID NO: 8888

SEQ ID NO: 8891 - DNA, 3915 bp, Homo sapiens
gttgcagatcagaaggagaattacagttcttatttgggatctgcttttgtgtgaccttggccgagtcagttaactcctcggggctatggtttcatcatctataaaattgagggtttgaaccaggtcccccgatttaaagctctcttgccaagacttttcaaccttacctgccagaatccccattctagaaagggagcctttttcagagagcatggagaccccaagtttatgtgaacaaaagtgattcctttagtcgtcttcccaccaacaaagaaatgcccgtggtgctccttgtaaatttccaccagtctcagctgtggtgattccacttgtagctgagatttgtatgcggatgaggcttttgcttcatctttctctgggagctacaaaaaggaggatgtgtggacaaatcaaaacagaaacaaatagcagcttcctgctttgtcctgtagaccaggtaccctgatgccttcctagcatgcggaggaatgaggaggaagccatgcccatccttgtcccctctagacactttcccggctcctgtccagcccagccctgatgcctggaaaaataaggaagggaaagcaggaggggaggacaaggagaaaaactcccagaatccagggcctggaggcctcggggcccaactgcagccgccatgttttagggctaggccaagagcagctcgtttgctttcccagcttaacttaccacattggccctttcctgccatgattaatcacgtgaccgcgtttgtgcaaaggcatcccggcagagggggccggtgggctgtgtacagtctcagcttcctttaacccaatgaatggagctcaggcaacctgctttgaagctttattccgcagtccgctaagaggattcctggtgggttttgtgcattccttacttgtctgctgtagaagacttcagaaaaccagtcctgagaaagaaaaaattgcaacttaaaaaaaattgcactaaaataattagaaggaggcttgtagtggtttaacttgaagaaggctgcttgttaaacatgaacagcagcacgactgccatgtacagtgggacaggtggtgcactgcacaactccggggggcaccattcatcatgatgtaaatgacatcaccgacattgtgcaaggcagtggctttgagtggcagtgatgttgcacagatgagcaggccctggtcttgaaaaaagtgaccttcctagggagcagatgtcctagctattagagagctcagacagttgcttctcttctgaaatcctcctgtaaatctgaacattagcatcagggtctaagaggaggtaggagataggagagaacctgtgggttaagggcagagttttgtgacaacatccatccaaggtagaactgtcaggacctaggttgctttctccaataactagatgtgaatgaattttagggagagctggaaaagcagcttctacaagcaaacccgattctggaggctttcggcaacgccaaaacagtgaagaacgacaactcctcacgattcggcaaattcatccgcatcaacttcgacgtcacgggttacatcgtgggagccaacattgagacctatctgctagaaaaatcacgggcaattcgccaagccagagacgagaggacattccacatcttttactacatgattgctggagccaaggagaagatgagaagtgacttgcttttggagggcttcaacaactacaccttcctctccaatggctttgtgcccatcccagcagcccaggatgatgagatgttccaggaaaccgtggaggccatggcaatcatgggtttcagcgaggaggagcagctatccatattgaaggtggtatcatcggtcctgcagcttggaaatatcgtcttcaagaaggaaagaaacacagaccaggcgtccatgccagataacacagctgctcagaaagtttgccacctcatgggaattaatgtgacagatttcaccagatccatcctcactcctcgtatcaaggttgggcgagatgtggtacagaaagctcagacaaaagaacaggctgactttgctgtagaggctttggccaaggcaacatatgagcgccttttccgctggatactcacccgcgtgaacaaagccctggacaagacccatcggcaaggggcttccttcctggggatcctggatatagctggatttgagatctttgaggtgaactccttcgagcagctgtgcatcaactacaccaacgagaagctgcagcagctcttcaaccacaccatgttcatcctggagcaggaggagtaccagcgcgagggcatcgagtggaacttcatcgactttgggctggacctacagccctgcatcgagctcatcgagcgaccgaacaaccctccaggtgtgctggccctgctggacgaggaatgctggttccccaaagccacggacaagtctttcgtggagaagctgtgcacggagcagggcagccaccccaagttccagaagcccaagcagctcaaggacaagactgagttctccatcatccattatgctgggaaggtggactataatgcgagtgcctggctgaccaagaatatggacccgctgaatgacaacgtgacttccctgctcaatgcctcctccgacaagtttgtggccgacctgtggaaggacgtggaccgcatcgtgggcctggaccagatggccaagatgacggagagctcgctgcccagcgcctccaagaccaagaagggcatgttccgcacagtggggcagctgtacaaggagcagctgggcaagctgatgaccacgctacgcaacaccacgcccaacttcgtgcgctgcatcatccccaaccacgagaagagggtgaggcccgccgcccagaccctggggctcccagaagccagggctgtcccaagcggtcacagcgtccccagggcgccctctgcccccacctaccccgaggaccccattttccatgtggggaaggctatctgaatctcagacccattccccatccctggaggaaaaggaggaagggaggatgcatccagagacttttcagttgtggagttgctgtgcaggtcatccagccactcattcattcattatcccaggaagtattcactgggctctgccctgtcctgggtgctggggagcagtgttagaaaaattgtagcccttccctgtgggtttctcataatctggtgcaggcatcttcagcttggggcgattgtgtcctctatatggacatgctacagacatttttggttgtcacaaccaggagggggctgttagtcagcatctagtgggtaggggccagggatgccctaagcattgtacaatgcacaggatggtccctcaacccccagcacagaatccctacaagatgccagtagtgctgaggttatgggagacacggggagaggtaaacatacagctgatgatggtgatggaatgtggtcagttaggagaacaccaaagagccagggctcctcccacagcctcaggactcagagaaagcttctggtgaacttgaacgttaagaatgtgtggccatcaacttggtgacatggaaggcagggtggggcctaggataagcagggggcctaggataagcagagggcccaggctaagcaagagtgtggaggtgagaagtgaaggaactaggtaagaaaatgctagatagtgtccaggcgtgttgctcacgcctgtaatcccagctactcaggaggctgagaaacaaaaatctgttgaacccaggaggcggaggttgcagtgagctgagattgcaccacagcattccagcctgggcagcagagcgagactccatcttaaaaaaaaaaaaaaaaaaggaaagaaaatgctaaataggtcatttcatgttgcaaatgtgtgatggcatgaggtaggaatcagatggtgtgag

SEQ ID NO: 8892 - protein, 443 aa, Homo sapiens
MIAGAKEKMRSDLLLEGFNNYTFLSNGFVPIPAAQDDEMFQETVEAMAIMGFSEEEQLSILKVVSSVLQLGNIVFKKERNTDQASMPDNTAAQKVCHLMGINVTDFTRSILTPRIKVGRDVVQKAQTKEQADFAVEALAKATYERLFRWILTRVNKALDKTHRQGASFLGILDIAGFEIFEVNSFEQLCINYTNEKLQQLFNHTMFILEQEEYQREGIEWNFIDFGLDLQPCIELIERPNNPPGVLALLDEECWFPKATDKSFVEKLCTEQGSHPKFQKPKQLKDKTEFSIIHYAGKVDYNASAWLTKNMDPLNDNVTSLLNASSDKFVADLWKDVDRIVGLDQMAKMTESSLPSASKTKKGMFRTVGQLYKEQLGKLMTTLRNTTPNFVRCIIPNHEKRVRPAAQTLGLPEARAVPSGHSVPRAPSAPTYPEDPIFHVGKAI

SEQ ID NO: 8893 - DNA, 353 bp, Homo sapiens
cttccctttctctgagaactttcttcaaacccatgggtaaaggatccaatatccatgtttctactacatgaggtattgcaagctcctgcaaacagttcttggcttggaggtgaccatgtagcccaattcaggattactgagaggcagtctggagctgtggcagccatcttgcccccgtgaggggagagcctgcttgagaatggagccaatatggaggaaggcagagagagagagagaacgatggcgggagatcagaccctgcctacgggatccagctacatgtctggccttctcagttccagaaaccaatgcatttcctgttggatttctgtctcttataccctcaatgatcc

SEQ ID NO: 8894 - protein, 41 aa, Homo sapiens
MFLLHEVLQAPANSSWLGGDHVAQFRITERQSGAVAAILPP

SEQ ID NO: 8895 - DNA, 1060 bp, Homo sapiens
cctgtaatcccagcactttgggaggctgaggtgggaggattgcttgagtgcagcagtctgaggccaacctggacaacacagtgagatcctatctctacaaaaaaaaatttaaaaattagccagatatggtggtgcatgcctgtagtcctagctgcttgggagggtgaggtcatggggaaaaggggattgcttgagcccaggagttcaaggttacagtgagctgtgattgcaccactgcactccagccctcgctgacagagcaaaaccttgtctctaataaataaataagtttttttaaatagggatagccatgatggactacggtcattgcaaaagccgaatgaaattgatctgtgaacatgttttacacgttctgttgctgtcaggcctggggtggtttcagctcagcagatgttggttccgcctgacaacttgacctgtggggttctgagtgttcgcaagaatctccccgccccacctcccatcctctgtaccatctgcctcctgcttgcccacagcatggggttaacggctgaagttgggcagcaaagcctgaactgtgttttcctgttggcagggcaaattcatccgcatcaacttcgacgtcacgggttacatcgtgggagccaacattgagacctatctgctagaaaaatcacgggcaattcgccaagccagagacgagaggacattccacatcttttactacatgattgctggagccaaggagaagatgagaagtaagtgactagcaatgacatgtgattggatggcttgagccttccctttcatcagaatccggggttaagggattggctattaaaacagtctcagatcctgccagaaaggaccatgtctgtgagtgacatatgaacagttcttcatctcctcccaatgagtgagtgtggcttgtgttcagtcattctcatttactgagcacctactatgtgacatagtagccatcaactccaattagacattagatcattaatgattcatgtctcattagaccagagagcatcaagtccaactagacacaatctacgccttcaaggaaagg

SEQ ID NO: 8896 - protein, 74 aa, Homo sapiens
MLVPPDNLTCGVLSVRKNLPAPPPILCTICLLLAHSMGLTAEVGQQSLNCVFLLAGQIHPHQLRRHGLHRGSQH

SEQ ID NO: 8897 - DNA, 2341 bp, Homo sapiens
agggagatttggacgctccggcctgggaggtgcgtcagatccgagctcgccatccagtttcctctccactagtccccccagttggagatctgggaccaacaaggcaccatggcgcagaagggccaactcagtgacgatgagaagttcctctttgtggacaaaaacttcatcaacagcccagtggcccaggctgactgggccgccaagagactcgtctgggtcccctcggagaagcagggcttcgaggcagccagcattaaggaggagaagggggatgaggtggttgtggagctggtggagaatggcaagaaggtcacggttgggaaagatgacatccagaagatgaacccacccaagttctccaaggtggaggacatggcggagctgacgtgcctcaacgaagcctccgtgctacacaacctgagggagcggtacttctcagggctaatatatacgtactctggcctcttctgcgtggtggtcaacccctataaacacctgcccatctactcggagaagatcgtcgacatgtacaagggcaagaagaggcacgagatgccgcctcacatctacgccatcgcagacacggcctaccggagcatgcttcaagatcgggaggaccagtccattctatgcacaggcgagtctggagccgggaaaaccgaaaacaccaagaaggtcattcagtacctggccgtggtggcctcctcccacaagggcaagaaagacacaagtatcacggtgagtggcagttcccaatcagaggccatgatttagccaaccggtctccagcttgcagcccaaccgagatacaaacagaacatcattgcaagaactcaggccccatctgactacccctcccctgaagactcaaagagggaccgtctttttggcgagcaggcctgttgagtgtgggtgatttcttggctcagctagaagcatccctccagaagggggcccgttttgtgaaatgagaataagccctttccttccatagcgagatcttcctccacgtcggggcttctcagtggtggcactgatgtcattttggaccagataactcttccttggaggggcttccctgtggctcgtagaatgtttcacaacatccctggcctcgacccgccagatgccgacagcccccttccctccagttgtgacaaccaaaaatatctctagacattgtcagatgttccctggggtgggacagttgcccttgattgagaagcactcctttcatgaatctctgtaacgtcccaggggttaaggtaccttttgggttcccggattcctccacgtgtccccctgtccctgggatggagatgctggtatcactcggcccgtgggcttcagtgcaatgccattcagtaactgtggattgagcacctactgtatgccaggaaccacttggggtggggacctggggataagtctgagagatgctgttattctcttctctgagcttccagacctgtggaagagcatgtagttgtcaaagaatccctcaaataaacagatgatgacacggtatgactaagagcttgggaggaaaagaagagcaggtttctagagtcatcacctctagggcccatccttctcttcctcctcgtgtgtcagccctgccccatctatcccacaggagggggcacgtggtagggccgctaggactggccggtgcctccgtctgcaggtttgtgggtgggaagatggtaggatggagatctgaccacggcatggggtgtctccagtgttcgccattccagatgtcactttgcgtcctcagaggggactctggggcagccaccatggccggcttgtctggaggcccttggagatctaggatgggcgctggtcgtggctttggagaactttccttctccaaacaaatgcaggaaactcaagattcagcatcctagaattgtctctggcaagttggtttccagccatagtgagtgggaacaatggccccagaggctgtgtggcagtttaaacacagtttccactgccttccctttccctaaagagtaaacacaggagataatactttctaacaactcatcgttatcaagggcctactatgtgctgcttgttttggctgcatgcgtaaacacatctcagacattgtctcactggatactgttttaaggagcctaatgtggccccagtaattatgaaaacctttgaaatgtctggatctctaagaaattagaaaaaggagggaatggctgagcatgggggctcatgcctgtaatctgtgttttgggaggccaaggtgggaggatggtctgagcccaggagttcaggaccagcctgggtgacatagtgagaccctgtctgtacc

SEQ ID NO: 8898 - protein, 222 aa, Homo sapiens
MAQKGQLSDDEKFLFVDKNFINSPVAQADWAAKRLVWVPSEKQGFEAASIKEEKGDEVVVELVENGKKVTVGKDDIQKMNPPKFSKVEDMAELTCLNEASVLHNLRERYFSGLIYTYSGLFCVVVNPYKHLPIYSEKIVDMYKGKKRHEMPPHIYAIADTAYRSMLQDREDQSILCTGESGAGKTENTKKVIQYLAVVASSHKGKKDTSITVSGSSQSEAMI

SEQ ID NO: 8899 - DNA, 3370 bp, Homo sapiens
gctgggcgagtgacagccccggctccgcgcgccgcggccgccagagccggcgcaggggaagcgcccgcggccccgggtgcagcagcggccgccgcctcccgcgcctccccggcccgcagcccgcggtcccgcggccccggggccggcacctctcgggctccggctccccgcgcgcaagatggctgacccggctgcggggccgccgccgagcgagggcgaggagagcaccgtgcgcttcgcccgcaaaggcgccctccggcagaagaacgtgcatgaggtcaagaaccacaaattcaccgcccgcttcttcaagcagcccaccttctgcagccactgcaccgacttcatctggggcttcgggaagcagggattccagtgccaagtttgctgctttgtggtgcacaagcggtgccatgaatttgtcacattctcctgccctggcgctgacaagggtccagcctccgatgacccccgcagcaaacacaagtttaagatccacacgtactccagccccacgttttgtgaccactgtgggtcactgctgtatggactcatccaccaggggatgaaatgtgacacctgcatgatgaatgtgcacaagcgctgcgtgatgaatgttcccagcctgtgtggcacggaccacacggagcgccgcggccgcatctacatccaggcccacatcgacagggacgtcctcattgtcctcgtaagagatgctaaaaaccttgtacctatggaccccaatggcctgtcagatccctacgtaaaactgaaactgattcccgatcccaaaagtgagagcaaacagaagaccaaaaccatcaaatgctccctcaaccctgagtggaatgagacatttagatttcagctgaaagaatcggacaaagacagaagactgtcagtagagatttgggattgggatttgaccagcaggaatgacttcatgggatctttgtcctttgggatttctgaacttcagaaagccagtgttgatggctggtttaagttactgagccaggaggaaggcgagtacttcaatgtgcctgtgccaccagaaggaagtgaggccaatgaagaactgcggcagaaatttgagagggccaagatcagtcagggaaccaaggtcccggaagaaaagacgaccaacactgtctccaaatttgacaacaatggcaacagagaccggatgaaactgaccgattttaacttcctaatggtgctggggaaaggcagctttggcaaggtcatgctttcagaacgaaaaggcacagatgagctctatgctgtgaagatcctgaagaaggacgttgtgatccaagatgatgacgtggagtgcactatggtggagaagcgggtgttggccctgcctgggaagccgcccttcctgacccagctccactcctgcttccagaccatggaccgcctgtactttgtgatggagtacgtgaatgggggcgacctcatgtatcacatccagcaagtcggccggttcaaggagccccatgctgtattttacgctgcagaaattgccatcggtctgttcttcttacagagtaagggcatcatttaccgtgacctaaaacttgacaacgtgatgctcgattctgagggacacatcaagattgccgattttggcatgtgtaaggaaaacatctgggatggggtgacaaccaagacattctgtggcactccagactacatcgcccccgagataattgcttatcagccctatgggaagtccgtggattggtgggcatttggagtcctgctgtatgaaatgttggctgggcaggcaccctttgaaggggaggatgaagatgaactcttccaatccatcatggaacacaacgtagcctatcccaagtctatgtccaaggaagctgtggccatctgcaaagggctgatgaccaaacacccaggcaaacgtctgggttgtggacctgaaggcgaacgtgatatcaaagagcatgcatttttccggtatattgattgggagaaacttgaacgcaaagagatccagcccccttataagccaaaagcttgtgggcgaaatgctgaaaacttcgaccgatttttcacccgccatccaccagtcctaacacctcccgaccaggaagtcatcaggaatattgaccaatcagaattcgaaggattttcctttgttaactctgaatttttaaaacccgaagtcaagagctaagtagatgtgtagatctccgtccttcatttctgtcattcaagctcaacggctattgtggtgacatttttatgtttttcattgccaagttgcatccatgtttgattttctgatgagactagagtgacagtgtttcagaacccaaatgtcctcaggtagtttggagcatctctatgagatgggattatgcagatggcctatggaaaatgcagctgcataattaacacattatcaaagtcctcttacaatttattttccgcagcatgtcagctaagtagacccaatggggagagaaaatgcctgctttctttccctctttttctgcactgccatattcacccccaaccatccaatctgtggataattggatgttagcggtactcttccacttccgggcctggagcttggcttgtatccaagtgtatggttgctttgcctaagaggaatccctctatttcacctgttctggaggcaccagaccttgaaaagaacatgctcaaaataaaatgttatctgttatttttgtaaactcaaagttaagatgatcaaagttctaaaattccaagaatgtgcttttagacggtctcaatctaaaagcacttcaaggggtcaaagggcaaccagcttgggtgctacctcagtgttgtagtttctgatactttatgtctttgctcaccctcatccccaaactacttgaaaagggcatttggcaccactctctgaaacaacacagtcactctagcaaggcccccaaagggccctggttttacattacatttcaaactttatttgctttggggttttgtttctgttgttgttcaaatgcaaaaaaaagaaaaaaaaagaaaaaaaaaggtgactcacattgttacacatgctttaaaatatgtattcaaatgttattaaccacaatgacgacctgctttgatttaaccaagaagacggctgcggagcctagcagactcaggcctgtgggaatgggatttgttacaaatctaggtttgttactggcttcagaaagctaattaagtgctctgaaaaagacaccgtttcttgaaacaaagatggttgtattcctcactttgatgttgttttgcaagatgtttgtggaaatgttcatttgtatctggatctctgttatgtgccatttttcttctagcatcgagatacaat

SEQ ID NO: 8900 - protein, 673 aa, Homo sapiens
MADPAAGPPPSEGEESTVRFARKGALRQKNVHEVKNHKFTARFFKQPTFCSHCTDFIWGFGKQGFQCQVCCFVVHKRCHEFVTFSCPGADKGPASDDPRSKHKFKIHTYSSPTFCDHCGSLLYGLIHQGMKCDTCMMNVHKRCVMNVPSLCGTDHTERRGRIYIQAHIDRDVLIVLVRDAKNLVPMDPNGLSDPYVKLKLIPDPKSESKQKTKTIKCSLNPEWNETFRFQLKESDKDRRLSVEIWDWDLTSRNDFMGSLSFGISELQKASVDGWFKLLSQEEGEYFNVPVPPEGSEANEELRQKFERAKISQGTKVPEEKTTNTVSKFDNNGNRDRMKLTDFNFLMVLGKGSFGKVMLSERKGTDELYAVKILKKDVVIQDDDVECTMVEKRVLALPGKPPFLTQLHSCFQTMDRLYFVMEYVNGGDLMYHIQQVGRFKEPHAVFYAAEIAIGLFFLQSKGIIYRDLKLDNVMLDSEGHIKIADFGMCKENIWDGVTTKTFCGTPDYIAPEIIAYQPYGKSVDWWAFGVLLYEMLAGQAPFEGEDEDELFQSIMEHNVAYPKSMSKEAVAICKGLMTKHPGKRLGCGPEGERDIKEHAFFRYIDWEKLERKEIQPPYKPKACGRNAENFDRFFTRHPPVLTPPDQEVIRNIDQSEFEGFSFVNSEFLKPEVKS

SEQ ID NO: 8901 - DNA, 7995 bp, Homo sapiens
gctgggcgagtgacagccccggctccgcgcgccgcggccgccagagccggcgcaggggaagcgcccgcggccccgggtgcagcagcggccgccgcctcccgcgcctccccggcccgcagcccgcggtcccgcggccccggggccggcacctctcgggctccggctccccgcgcgcaagatggctgacccggctgcggggccgccgccgagcgagggcgaggagagcaccgtgcgcttcgcccgcaaaggcgccctccggcagaagaacgtgcatgaggtcaagaaccacaaattcaccgcccgcttcttcaagcagcccaccttctgcagccactgcaccgacttcatctggggcttcgggaagcagggattccagtgccaagtttgctgctttgtggtgcacaagcggtgccatgaatttgtcacattctcctgccctggcgctgacaagggtccagcctccgatgacccccgcagcaaacacaagtttaagatccacacgtactccagccccacgttttgtgaccactgtgggtcactgctgtatggactcatccaccaggggatgaaatgtgacacctgcatgatgaatgtgcacaagcgctgcgtgatgaatgttcccagcctgtgtggcacggaccacacggagcgccgcggccgcatctacatccaggcccacatcgacagggacgtcctcattgtcctcgtaagagatgctaaaaaccttgtacctatggaccccaatggcctgtcagatccctacgtaaaactgaaactgattcccgatcccaaaagtgagagcaaacagaagaccaaaaccatcaaatgctccctcaaccctgagtggaatgagacatttagatttcagctgaaagaatcggacaaagacagaagactgtcagtagagatttgggattgggatttgaccagcaggaatgacttcatgggatctttgtcctttgggatttctgaacttcagaaagccagtgttgatggctggtttaagttactgagccaggaggaaggcgagtacttcaatgtgcctgtgccaccagaaggaagtgaggccaatgaagaactgcggcagaaatttgagagggccaagatcagtcagggaaccaaggtcccggaagaaaagacgaccaacactgtctccaaatttgacaacaatggcaacagagaccggatgaaactgaccgattttaacttcctaatggtgctggggaaaggcagctttggcaaggtcatgctttcagaacgaaaaggcacagatgagctctatgctgtgaagatcctgaagaaggacgttgtgatccaagatgatgacgtggagtgcactatggtggagaagcgggtgttggccctgcctgggaagccgcccttcctgacccagctccactcctgcttccagaccatggaccgcctgtactttgtgatggagtacgtgaatgggggcgacctcatgtatcacatccagcaagtcggccggttcaaggagccccatgctgtattttacgctgcagaaattgccatcggtctgttcttcttacagagtaagggcatcatttaccgtgacctaaaacttgacaacgtgatgctcgattctgagggacacatcaagattgccgattttggcatgtgtaaggaaaacatctgggatggggtgacaaccaagacattctgtggcactccagactacatcgcccccgagataattgcttatcagccctatgggaagtccgtggattggtgggcatttggagtcctgctgtatgaaatgttggctgggcaggcaccctttgaaggggaggatgaagatgaactcttccaatccatcatggaacacaacgtagcctatcccaagtctatgtccaaggaagctgtggccatctgcaaagggctgatgaccaaacacccaggcaaacgtctgggttgtggacctgaaggcgaacgtgatatcaaagagcatgcatttttccggtatattgattgggagaaacttgaacgcaaagagatccagcccccttataagccaaaagcttgtgggcgaaatgctgaaaacttcgaccgatttttcacccgccatccaccagtcctaacacctcccgaccaggaagtcatcaggaatattgaccaatcagaattcgaaggattttcctttgttaactctgaatttttaaaacccgaagtcaagagctaagtagatgtgtagatctccgtccttcatttctgtcattcaagctcaacggctattgtggtgacatttttatgtttttcattgccaagttgcatccatgtttgattttctgatgagactagagtgacagtgtttcagaacccaaatgtcctcaggtagtttggagcatctctatgagatgggattatgcagatggcctatggaaaatgcagctgcataattaacacattatcaaagtcctcttacaatttattttccgcagcatgtcagctaagtagacccaatggggagagaaaatgcctgctttctttccctctttttctgcactgccatattcacccccaaccatccaatctgtggataattggatgttagcggtactcttccacttccgggcctggagcttggcttgtatccaagtgtatggttgctttgcctaagaggaatccctctatttcacctgttctggaggcaccagaccttgaaaagaacatgctcaaaataaaatgttatctgttatttttgtaaactcaaagttaagatgatcaaagttctaaaattccaagaatgtgcttttagacggtctcaatctaaaagcacttcaaggggtcaaagggcaaccagcttgggtgctacctcagtgttgtagtttctgatactttatgtctttgctcaccctcatccccaaactacttgaaaagggcatttggcaccactctctgaaacaacacagtcactctagcaaggcccccaaagggccctggttttacattacatttcaaactttatttgctttggggttttgtttctgttgttgttcaaatgcaaaaaaaagaaaaaaaaagaaaaaaaaaggtgactcacattgttacacatgctttaaaatatgtattcaaatgttattaaccacaatgacgacctgctttgatttaaccaagaagacggctgcggagcctagcagactcaggcctgtgggaatgggatttgttacaaatctaggtttgttactggcttcagaaagctaattaagtgctctgaaaaagacaccgtttcttgaaacaaagatggttgtattcctcactttgatgttgttttgcaagatgtttgtggaaatgttcatttgtatctggatctctgttatgtgccatttttcttctagcatcgagatacaataaaaaaaaaaaaaaagaaaagaagaagaaatactatttcaaggaaaactgctctttttgagaaacgtggacctaaactacaaagtgggaactgaggagggaactcaggagaaaggaactaactgcggagctttaatcttggccccagtgttcagccactcggaggggcgggggctgtggcccattcaggggctgctggtgggctgtagtggggtgggatgacctggccagagccaacgaggatactggagcccaaagtcaagtttagagaccagctgggaacgtgaatggggctcttgattttcttatcaaaatcaccactcctcccagcttggactaaatattctttctagcaagcagctttgtgagctccctgaagcccaaggaaacccttcggtgggagaaatttcatttctgtctgagaggattaaggcagcaggtgactccccctcctcgcctgccgtgtcctgctattctcaggcagctctaaggagaattcttatcacagttcaagtgatttccagaagttccagggcttctgagagaccatcaagggaactttaacaacttgacaaatgtccttgaagtaagatgcctcatctttagggaaaaatggggtttggatttctgcttaggcaaagtctcctgcagttcatccttctctgtcctcttcttgcttcaggcttggggaccgtccctgctgtccccactgtggtggcaatcaggacctaaggtgaagcaaacttgaagttctatctgacaagtttaggcagtaagagaaggagggaaatcggagcaaagctccctcactttattgttgagaaactggcatctggaaagaggaaggaatttgcccaaagtcagtcagctgggataaaaacctgggtgtcctgtccagaaagtgcagggtgctttctgctctgtagcaaggcagcagacatctctgagccaggcccaccaacaggcccttatctggtggttggatcatgatcccattttgcttggacatgctctcaggaagataaaaaccatggagaaacactaggccattgacaaatgatctgagacaactttagaaaacaatgtaggatgaatggaaagagaaagaaaggaaagaaagaagaaaaagaaagaaggaaagaaagaaagagaaaggaaggaaggaaagaaggaaggaaaagaaggaaggaaggaaggaatatagtgttataaatactgcactcaacattttccaaattcttgccattatttttcaaaagtttaatagtttgcagaaatagatactcaagccaaagtctgttttagagaaactttccatggaaagtcagaatttctaccacttccttttctatccacatttccagtgcagaagaaactgagaaacagagctttttgaagagaggacagggccatagcaacaaggaccttcttgggggattaatgggaggtcagtagaattaataaccctccttggatgagtgctactgttttcacatggcttcagatgctatcaacctcaaagaaatgatctcaacagagaagcttattctctcccaacttctacggtaaaatccaggagtattttctctggggatctgcccacaggacaaagtccataaaagcaagtcctgtctggaccatgtggttatctgaagcattagccatcaccagcacaacaaacggggcagggctttccaaggtggggctggtcagaagggaatctttgataagaggcccacaggcagggaaagcgaaatagggttgatgagaccaggggagacctaaaaaaaaggcagctttgtgtcttctagctccaaatatacctgccttttagctcacacactgtcctggagttctcagacctttaggggccctaacacagttcagttcatacaggggttcaaaagggacagtggcccatttgggagacctttaggatcaatgggaatcaattccattgttttgcctcagagtaaagtttctggctcggggacaattataagttgcaaaaaggatagaggcatatcccaagtcttccttcattccacaaataattacaaacaacctactgtgtgccaggcactattcttagcactggaaatacactagtgaagaagcagatgaggaccctgtttattgtttctctccaagaaattctccaagaatattgtttcttggagagaaataataaataaacaagacaatttctgaaagcaataagtgcaatcaagataattaaaggatgctaaagtgtgacttgtggggattgggagagagatgcacagacaatattaaagaggaggcattcgagctttgttgtgaacaccggaagtaacatgccgagcgcctgggggatggaaactcctatagcaccccacaggctaacagcaagcaggacaagacaaaaagggcaggtgggacatggtagagatggaccctacccaggaaacagctccatcagcatcttagcctgccccactctagccacacatacccacgtgtgctcctgagttcagtgtgcccacctcactcccacaccctcacatagacttggcaagagtaaggagggaactccatagagacattttacctatctcaggggagcagccacaaagaagcaagtcttgtaaaaggtcttttgcaaaggagagtgaacccagcaatgagagatccttaacagctagtgcccattagggggctaaacctaaagcctgggtggtgatggctcaaacgctaatgagtcagtgaatccttaccgaccccctggcctttataatctgaggcaactttggctgcagcccgggaatgtgcagggcactagggaatacaaggccttcttccctggttgtcttgtaataaaacagccatggggttgtccctccagtccgagagactgtgatgaggcctacatagcagcgatgtggtcaggtaaaaatcaggaacccactgaaatcttgggcaagccaccctgcctgcttgtgcctcggttctctcatatgtcatatataggaggtgaggactccagctccacctgccccaggtgggtgtggtgatgatgaggaaagacaagaggcttgcaaggaccctgaagaggtcggagcatcatacagattcctttattagcccacattctgatgttccctggtgagacttgccccaagcaattgctagtaaatgggggttaatttcttctccacctccctactgaacaaaaaaagaaatgccagacttactaggagaatcgagttgctttgagtttcttttgttttgttttgttttgttttgttttaaggctccccttacacaccctcctttaagctttgggttttctctcttatagtttgttgacacatgctaaaaatgtctttggagagaacttctgcctgataaacacccaattctagactgtgggtggattttcgagctgacggtggtcaattcctttcattaagcagtgatctgatttctccacatggccattctgccttcttgggggcagagtagatgggcagcagttcaccttttcagagaaagaggtcttctagccacctgggctgctactgaatggttttctccaggacgctctacctaatgattatttctataacattaagcatggtaataagtagcttccaattcaattcatcctaaagccaaagaaaatacagcaacacacacacacacacacacacacacacacacacacacacacacacaccactttatggcaattcttaactgacattcaatgacttacttcttttcttagaaaatttccaccacatttctatccccaagccaacatacaatgtgaaatgaaagccagtgcgtggagtgcagctgctaaaaattttcagcacagggctctttctgactctgctcatgagatggtatcagccacccaatgactggcgtatcttggtcctgtgtctttcttcttacgctgtgttaatgtgtttactttccatttggcagagagacaagagagacacctccaacttcgacaaagagttcaccagacagcctgtggaactgacccccactgataaactcttcatcatgaacttggaccaaaatgaatttgctggcttctcttatactaacccagagtttgtcattaatgtgtaggtgaatgcaaactccatcgttgagcctggggtgtaagacttcaagccaagcgtatgtatcaattctagtcttccaggattcacggtgcacatgctggcattcaacatgtggaaagcttgtcttagagggcttttctttgtatgtgtagcttgctagtttgttttctacatttgaaaatgtttagtttagaataagcgcattatccaattatagaggtacaattttccaaacttccagaaactcatcaaatgaacagacaatgtcaaaactactgtgtctgataccaaaatgcttcagtatttgtaatttttcaagtcagaagctgatgttcctggtaaaagtttttacagttattctataatatcttctttgaatgctaagcatgagcgatatttttaaaaattgtgagtaagctttgcagttactgtgaactattgtctcttggaggaagttttttgtttaagaattgatatgattaaactgaattaatatatgcaa

SEQ ID NO: 8902 - protein, 673 aa, Homo sapiens; identical to SEQ ID NO: 8900

SEQ ID NO: 8903 - DNA, 2692 bp, Homo sapiens
gctgggcgagtgacagccccggctccgcgcgccgcggccgccagagccggcgcaggggaagcgcccgcggccccgggtgcagcagcggccgccgcctcccgcgcctccccggcccgcagcccgcggtcccgcggccccggggccggcacctctcgggctccggctccccgcgcgcaagatggctgacccggctgcggggccgccgccgagcgagggcgaggagagcaccgtgcgcttcgcccgcaaaggcgccctccggcagaagaacgtgcatgaggtcaagaaccacaaattcaccgcccgcttcttcaagcagcccaccttctgcagccactgcaccgacttcatctggggcttcgggaagcagggattccagtgccaagtttgctgctttgtggtgcacaagcggtgccatgaatttgtcacattctcctgccctggcgctgacaagggtccagcctccgatgacccccgcagcaaacacaagtttaagatccacacgtactccagccccacgttttgtgaccactgtgggtcactgctgtatggactcatccaccaggggatgaaatgtgacacctgcatgatgaatgtgcacaagcgctgcgtgatgaatgttcccagcctgtgtggcacggaccacacggagcgccgcggccgcatctacatccaggcccacatcgacagggacgtcctcattgtcctcgtaagagatgctaaaaaccttgtacctatggaccccaatggcctgtcagatccctacgtaaaactgaaactgattcccgatcccaaaagtgagagcaaacagaagaccaaaaccatcaaatgctccctcaaccctgagtggaatgagacatttagatttcagctgaaagaatcggacaaagacagaagactgtcagtagagatttgggattgggatttgaccagcaggaatgacttcatgggatctttgtcctttgggatttctgaacttcagaaagccagtgttgatggctggtttaagttactgagccaggaggaaggcgagtacttcaatgtgcctgtgccaccagaaggaagtgaggccaatgaagaactgcggcagaaatttgagagggccaagatcagtcagggaaccaaggtcccggaagaaaagacgaccaacactgtctccaaatttgacaacaatggcaacagagaccggatgaaactgaccgattttaacttcctaatggtgctggggaaaggcagctttggcaaggtcatgctttcagaacgaaaaggcacagatgagctctatgctgtgaagatcctgaagaaggacgttgtgatccaagatgatgacgtggagtgcactatggtggagaagcgggtgttggccctgcctgggaagccgcccttcctgacccagctccactcctgcttccagaccatggaccgcctgtactttgtgatggagtacgtgaatgggggcgacctcatgtatcacatccagcaagtcggccggttcaaggagccccatgctgtattttacgctgcagaaattgccatcggtctgttcttcttacagagtaagggcatcatttaccgtgacctaaaacttgacaacgtgatgctcgattctgagggacacatcaagattgccgattttggcatgtgtaaggaaaacatctgggatggggtgacaaccaagacattctgtggcactccagactacatcgcccccgagataattgcttatcagccctatgggaagtccgtggattggtgggcatttggagtcctgctgtatgaaatgttggctgggcaggcaccctttgaaggggaggatgaagatgaactcttccaatccatcatggaacacaacgtagcctatcccaagtctatgtccaaggaagctgtggccatctgcaaagggctgatgaccaaacacccaggcaaacgtctgggttgtggacctgaaggcgaacgtgatatcaaagagcatgcatttttccggtatattgattgggagaaacttgaacgcaaagagatccagcccccttataagccaaaagctagagacaagagagacacctccaacttcgacaaagagttcaccagacagcctgtggaactgacccccactgataaactcttcatcatgaacttggaccaaaatgaatttgctggcttctcttatactaacccagagtttgtcattaatgtgtaggtgaatgcaaactccatcgttgagcctggggtgtaagacttcaagccaagcgtatgtatcaattctagtcttccaggattcacggtgcacatgctggcattcaacatgtggaaagcttgtcttagagggcttttctttgtatgtgtagcttgctagtttgttttctacatttgaaaatgtttagtttagaataagcgcattatccaattatagaggtacaattttccaaacttccagaaactcatcaaatgaacagacaatgtcaaaactactgtgtctgataccaaaatgcttcagtatttgtaatttttcaagtcagaagctgatgttcctggtaaaagtttttacagttattctataatatcttctttgaatgctaagcatgagcgatatttttaaaaattgtgagtaagctttgcagttactgtgaactattgtctcttggaggaagttttttgtttaagaattgatatgattaaactgaattaatatatgcaa

SEQ ID NO: 8904 - protein, 671 aa, Homo sapiens
MADPAAGPPPSEGEESTVRFARKGALRQKNVHEVKNHKFTARFFKQPTFCSHCTDFIWGFGKQGFQCQVCCFVVHKRCHEFVTFSCPGADKGPASDDPRSKHKFKIHTYSSPTFCDHCGSLLYGLIHQGMKCDTCMMNVHKRCVMNVPSLCGTDHTERRGRIYIQAHIDRDVLIVLVRDAKNLVPMDPNGLSDPYVKLKLIPDPKSESKQKTKTIKCSLNPEWNETFRFQLKESDKDRRLSVEIWDWDLTSRNDFMGSLSFGISELQKASVDGWFKLLSQEEGEYFNVPVPPEGSEANEELRQKFERAKISQGTKVPEEKTTNTVSKFDNNGNRDRMKLTDFNFLMVLGKGSFGKVMLSERKGTDELYAVKILKKDVVIQDDDVECTMVEKRVLALPGKPPFLTQLHSCFQTMDRLYFVMEYVNGGDLMYHIQQVGRFKEPHAVFYAAEIAIGLFFLQSKGIIYRDLKLDNVMLDSEGHIKIADFGMCKENIWDGVTTKTFCGTPDYIAPEIIAYQPYGKSVDWWAFGVLLYEMLAGQAPFEGEDEDELFQSIMEHNVAYPKSMSKEAVAICKGLMTKHPGKRLGCGPEGERDIKEHAFFRYIDWEKLERKEIQPPYKPKARDKRDTSNFDKEFTRQPVELTPTDKLFIMNLDQNEFAGFSYTNPEFVINV

SEQ ID NO: 8905 - DNA, 2296 bp, Homo sapiens
aagaataaaagcaggctgcctgaggttgcggtggtaacatgtttcggcgtccttccacactgtcgcggcttatgttgttttgctgtttgggtttgcactgtctttttgagctgtaacacagcaaaggtttgcagtttcgctcctgaaatcatcgagaccacaaacccaccgggaagaacgaacaactccagacgcaccgctttaagagctgtaatactcgttaggaaggtgtgcagcttgactcctgagtcagcgagaccatgaacccatcagaaggaaaaaactccgaacatcagaaggaacaagtttcagacacgccacctttaagaactgtgatactcaccgcgagggcccgcggcttcattcttgaagtccgtgagaccaagaacctaccaattccgaatacgttgggttcaagtggttctcctgcctcagactcccgaatacctgggactacaggcacccaccacgcccgggtaattgtatgacaatggagaggtgattactgcgctgaaaatcagtttcctgaagtgaaaaagggaatcaagttacgtcacagagcctggtgtgagcggcgctctgtcaacaccagctcttcatgggttgtggtttcctccagttcctggatgtgtggagttcatcctccactgactggcgccccggttgacaatgaggtctggcatccctggagttgagtaactagttctggctgctggtctccaggtgacatgtgtcacgtttgagctaagaattgcttcacatgattatggaggctgacaagtcccaagactcacagtcggcaagctggacacccaagacagctggtgctgcacatattaccagtgatgtagtttcagtctgaatctgaaggcctgagaaccaggacagttgatggtgtaaattccagtccgaggtcaggagaagcctaatgttctagcctaacatcttgcagcttttttgttctatgcaagttttaaagtaattggatgggacccagccacattagggaggccaatctgctttactcagtctaccaattcaaatctaatcttatccagaaacaccctcgtagacacatccacagtaatatttgaccaaatatctcagcactcaaaggcttaggcaagtcgatatgtaaaattaatgatcacaaggagggagaatgggttcaacaggtatttaaaagtattcataatagaaaagtatttattgtgtttatgtggcaggcagtattctgagtgctgttattgtatctcagttaaaacactagttaggtaagaaaagcgtcacctctgtgaggtggttactattattgtcctcatttagcagatgagaaaacaggcagagaaaaatttacatgatttgctggcactcatgcaactgataagtatctgaactgggattcgaacccaaactaactcagagtttaagctcttaactgccattctagagtcctccttggggacaggtgattgtaggtagaaaaaagaaatatggggagaggcatgctgaattgaaaaaaaaaacctctctaaatgaaactgagaaccacatcttctagtactaattataggtagagaactctgctaaatattttgcaagcattatccaatttaatgataaaaaccatactggacatgagaagccattatatccattttacagaaaagaaaaatgagctgggttggaattgcagctgggacatttttgatactgtgatcttagatacattcatctgtcagactccagctgattccaaactccttgttcattctattaggttgtgctataagaaaaaattctgtaagctttaaaagtggtaagtcaactcaaggcacagccaataagcatttatatgactgtacattatttacctaactctgcagagggagccagatatcctttagtgtagtaacgaagaatggctcctgcatatccccagcaattctcaggaaaaggtgggtgttatattctcttaaatagagaggcgtttttttcttagtcctattactggcagcttctaaatttaataacaaaatgctcacctacaaataagaagaataaaagcttaacttgccagggggaaaaaaagttctatgatgtaacagacccaggaataagtgatattcatgggaaggtcactgcctgaggctgcttgataaactccagccctttcctatatccactgtttaatgtttaagctttggatgctaagagtggttataataaactgtccaacagtttctcacttagacttcccaagaaggtgacaaaataaaatcaatgtaaagctgtc

SEQ ID NO: 8906 - protein, 75 aa, Homo sapiens
MNPSEGKNSEHQKEQVSDTPPLRTVILTARARGFILEVRETKNLPIPNTLGSSGSPASDSRIPGTTGTHHARVIV

SEQ ID NO: 8907 - DNA, 558 bp, Homo sapiens
acaaagagaagtgaccaaagaaaaaaaggcactcagcacataacagctgtctgaattttcaaactcctttactaaggaaaaaagaaaattaaaaatacgacttttttataaggcttttaacaacgacaaaagcttgcaggggactttgaaaatactgctgtgtttcatcaaggctttttgactattacagaagatgtgtattggaagcctaatgaagtctgtttgtcttgcttccaaaactcagtatgttggcaggaatgactgacaggattttgttgaagaaaaaagattgtcatatggtgatcaggaacaggcacaaatctataaaacaaaataacatcctaattccattagatgcactattctgtagcataatgtttaattggtttcaatttaacagagattcatgttgaactgcactctggacaatcagagatgttgatggccatatgctgaattcctcaaggtgcagtgagaggggcttgtgtgcttgttaaggacatggcaggccatcaacaacatatgtattggatggcttcataacacacatgctttcgg

SEQ ID NO: 8908 - protein, 55 aa, Homo sapiens
MLAGMTDRILLKKKDCHMVIRNRHKSIKQNNILIPLDALFCSIMFNWFQFNRDSC

SEQ ID NO: 8909 - DNA, 6725 bp, Homo sapiens
ccacacccggctagtttttgtatttttagtagagaacagggtttcaccatgttggccaggctagtctcgaactcctgacctcatgtgatccacccacctcggccccctcaaagttctgggattacaggcgcgagccaccatgcctggccatctggataatttttgtatttttagtagagacggtttcagcatgttggccaggctattctcgaattcctgacctcaagtaatctgccctccttggcctcccaaagtggtgggattacaggcgtgagccactgtgtctgcccacttttaattaatgctatacatttgataagctttcctattaagaatttaatgtgatcattttatcatcaaattacttttatcatactgtcttagaaatatttttaaactttgcttttatgtagaaaaggtcaattaccaaacagggtattgttttataggctactggtgtttcccatatgtttatgttttgtgctgtccatgatagagaggtggtgtctgtagtcttttgagtcctgttaactataaaaagccaatagcagttggtgccgtggttccacaccctggggtggaggtgagagatgagttcctgccatcttttttgggatggcccattagcctgttggcacccatccctcaaaagatgggtttaatgataaatttggtcgcatgtaggcatctgtctgggaaggaatctgtgtaccttgatactctgagagtgttttcctgggctaacctcagagccaatactttacttctcaggaagtaatctgtgggatcaagacaacaatttacacgttaaaaaataaactctacagcccactagcatcaacatagctttatgcttttgacttcattcatctgctactatgacctttttacttttttatttatttatttatttttaccagtgtgcagtatgcctatgtaatactataagcgttttagtttttaaaattgtaatgctttctgttgctcatatattgatcaaaaactgatcaacctatgagtagtactttgaggttgtatgtgttcgattttgtctcctcctgcagtgaattgatttttcttgagcagattgattagatggagctgccttgatttacacatcagtgaaagaagagaaaaacctcgacttgttgtataagtatattgttcataaaacatacggtttccacttcaccacacctgccttagttgtggaaaaggatgccgtttttatgtgagttattttgagctgatgctttgaaactcttctttttaaagtacatttgctttttacattttaccccttcaaggaaggtgccttctgtctgtgtcttctacagccagctctctcactgcaccttctctctgttcctttccggattatgaggcatctgcctgagggaagtgggtggtgtggtcaggggtgctgcctttcttcctcgagagcaagttgccaaaacctaagccagccatttttggcactcactgtcaactctggtaaaatactggctggggagggaatatagggaattgtgcttgggggatcctgaatgtcttctattaaagcgcctgctttatctgtgtgttggcagggatgactgcaaacatcctctcggcatctctgtcagcatgggctttcgctatattaagtgcttactgtgcttctggcatttcacattttgggagccaccgggattgattgtcctcgatagagacttggatacctgttttcctaagctggtgtctttctctcactggagaatcatagtgttgctggatgcataaatatgaagctgtggtctctgacaagacttgtgttagcagattgatgttcaggcttcagtatcctcctgacttaacaaacaattacattattcattcaggaaaccttattcagcacccactaggtgctcaggttctctgcaaaggacacagaaatgaatgatacgtgttccttgcatatggcactgtctagaggggacatacacagctgaagaagggaagggcagtgatggggttatggaggaagtatggcagggaaagcaggagggtgatgctggaagacaaatggtagatcccaggcggactggaaagaattgcaatagggggagccggggagtgcagtctgtgagaggctggaaatgtgaaagccaggagctctcagggatttgggttgcctcctgcacagtcaaggagagtgtcactcaggctagtcatagatggcatacctacaggcttgggctgattttagatagttgttcagagcagtcaggcaggcgccagaggcacaagccctgtgagaggtgtgtttggaatcacttggtatccaaatcacatgtcatccctaggagcaaggagaccggttggatttggggctggtctggaatgaagaagcatctctcagcttccgaaggctgcatggctcacggcagtatctcaatcatgccctgcccgtttgcacatttggtcctgttggtagttacctctctggtgactggcaaagtcagcaaggatattggggtggagcaccctggctaagcaccctcttgattatagagctatggagtagaagacagatggagaatgagaggcctgtgagaacaatcagtcagttgccatctttcagagctgctcgagttcaaaagtgtgtcatacagggtattttaccattgctacctttaagggattcaggtgggaaccctaggctgtggcttcacataatggaacttgggtgccatcctaccctgtgatgttgagctggccagcactggtgtaggaacctcaaggactctgtgcttctctggtttggggcctaggataaacacaggccctgcttgccccttggttctaggacacatcttcccatgccagcaaagttaatgaaccagtctacaagataactgttgaaagaattcttagagaaacaacccacaggaggggagccatgtcagagcccaagaaaaccatcccatcctgagctctgccttctgtgctgctctctgcatcctattctctgtcggaacaggaccccactgtgtccttgctcttctaggcagagttgtgggagagtgctaaatgcttttgagtggggcagcctgtggaatgggatctcatactggctccttagaccttgggcccatgaactcagtatggagcaggacctgcgatgttctgatggattatacccacagtgtattttggcacatctgccaaaagctacaaacaacccccaacaactacacactatatcttgtgagaagtgtcctacccaggagtcctgaatgtgatctgagtatgctctaaggcagccccaggaaaagcaattcagtccctctctctttgcctttagacctgcaggctgggacaatgaaaagaaaatagctattttacatgaaaattttacaaccgtgaagccggaagatgcatatgaagactttattgtgaaacctcccgtgagaaagctggtccacgacaaagagttggcagcagaagatgagcaggtgttcctaatgaagcaacagtcactccttgccaagcaaccagccactcccacgagagcttctgaatctcctgcaagaggaccctctggctctccaaggacccagggtcggggagggccagccagtgtgcctagctcctccccaggcacgtcagtaaaaaagccggacccaaacatcaaaaataatgcagcaagtgaaggggtgttggccagcttcttcaacagtctgttgagtaaaaagacaggctctcctggaagtcctggtgctggtggggtgcagagcacagccaagaagtcaggacaaaagactgtgttgtcaaatgttcaggaagaactggatagaatgactcgaaagccagactctatggtaacaaactcttcaacagaaaatgaagcctgaacctccttaaaaagtgcatatgtcgaatgaccaaataactatgtatattgatctgctaagaccaggatttttctgatatggcacatgctatcagttttttggggcaggggagatgaactttaaaaaaaaaaaaaaaacttcattggcttgtccgagtgtgaaatgcacatttaggaaggttacatgtcagaccctttgttaaggataacccttggactctggggcatgtggctcttttgtgggaggcaagcacatctgggcttcttgtggaggggaaggtagagtgaaagaaagagggcccactttctaacagggtggagcaaatgagaccaagaaatcattggtaagatgatggttagtctgaccagtttcatgttagtaaattcacttgttcttgggaagcagattaagtagcagaaagtccaggaaagaaagaccagaaggagtaatgagacaagtgatggtggggaagctgaatgttgagggaggtggaggaaggaggagatgagcagtgtcagtaaatactgtgcattcagtagaagttgaagaatcattgttagaagcatttccaaacaaaacactaagcaaaatgggaattaggcttattttgaatgcatctttaacttacgaaagatgtactaattgtgggggtgcctgagtcaggcggagctgacccaggggtgggaacgatggcagctgcccaggacccatgtgcttggcccaggctatgtcctcgtgagaggtactggggtccacggatatgtgttgtggggcagacagtcactgtgggatgtcttcaaagtcagcagttacagaattagtttactttgaattttgttgtctaaatagctcctgctttattttttaaattaaattttttgtttttactatcacaggctggcctaactaatacaaaataggtgatgaacctctggttttaccataatgcaatgtgccacggaaagtttgggggaggtttttaatgtaattgcactctggttaattggctcgtaccaagccctgccttatgacttgtggaaagcttcaaggagttccactgatgcaaaagggtcttttcctagcttcctggtctgatcagtgctatgagatggacagataagtgtgaatgttttatacagaaaatggaaatgatacatttctcttgttaggtgttttcataaaatgtagcattttttttcttatggaaataagagtttcaggtgtctccccacctagggcaaattcatgcacattgtcatgttataccaccattctggaaatgatttctgtggatttgaaattgcacttttaattttatatatgacagcatttaaatgcaaacactaccatgaatttaatgtataaaatgttgtcaaaccaagggaaaaaaccacagttcaccatgtggagtttactttttttatatgaatgtttgttgtactgtgtctaagcataacttccctaatgtcattacttttacataccagatttgactgaccactaatgtagtactggggataacttaatatcctatgttgtgtcaagactctttgaagactttcttgaattgctttcgtaaaggtctgaacactgttaaggagaaagctgagtatcaacttgcctttctgatagaaatgtttcttgtgccagttttattgttgagatatactatttttttccttttttaattcagttttttaaaaaaacaaatgtattgtggcttccagttaccaggttgtctaggtaatgacagtaaactgactgtagaatgataattgtggtatagtgaccaatagatgccaaacagcttgtggcctcactaaaggtggggtcgcttagtccccgggagtaaaatgagtgacctcagaaacaagaattcctggaaaggcacatgccgaagaggaatatggtataattttaaattttaatgcaaaattttaatttgtctttattttttatcatttgaactgataagcactttttgtgtcaatataaaatatactaaaactgatgaaatgctaagacatgtcttgtgaaggaaggtttcttggagaccacttttatttactcatgagaagtggaagctcctagtatcagaagaagctgatacatagtgtcatgtgctcagtggttgccaaagtctaccaactttggggagctgcagggttctttttgggaggtgggaggaagggagatgagttttgttattttggggttttcaagcattggaaccaaaggccaaataataaacagcctttagtttttaaagtaaaattcattttatttgcagagtacacttgtatggtagactgttaaagacaattttatgactatttatgcacattataatggttacatctgctttttgtctttaaaataaaaaaaaaaatcagagaaaagcccacctttgaatacgtggctgaagataacagccaagaattggtctttcctaaaaatgcaacagataatgctgctagattgttattttgtttgcacttttttttgattggcattttaaaatcggtatttaaactgaagacattgtcatgttttattaatttaacaaagttgaaagtgactgctctgtacatcatgaccttaacaatgttaatgctgtaagtgaaagttcactgtcgtctgtatactaaatttattggtgtttctaacttaaaagtaagactgcagattatcccccaccagccttagtccaggggtgtggctctgtccgggtgcagtatgcagtcatgtggaaccttgctttctagtcctgggaaaaaaagatgtctctaattactggcttcaataaacacgaatccagactgcttacaa

SEQ ID NO: 8910 - protein, 129 aa, Homo sapiens [sequence omitted]

SEQ ID NO: 8911 - DNA, 4539 bp, Homo sapiens
ggctgccccggcggctgcctgaccgccgcccgccacctcggcggcctcgcaacccgtgggagcccgtggccatcgcagacctagaggacacgttgggcggcgcagtcgccgcggcaaggtcggcgggcggcgcggcgcgagggacggcgagcggggggcggcccggcccgggtcctcgcgggtcctcggcgggcccgggggagggccctctttgtggctgcagttggcaagatggcgccggtgggggtggagaagaagctgctgctaggtcccaacgggcccgcggtggcggccgccggcgacctgaccagtgaggaggaggaaggccagagcctatggtcctccattctgagcgaagtgtccacccgcgccaggtccaagctgccgtccggcaagaacatcctggtcttcggtgaagatggttctggtaaaacaaccctcatgactaaactacaaggagctgagcatggcaaaaaaggaagaggcctagaatatctctacctcagtgtccatgatgaggaccgagatgatcacacgcgctgcaacgtgtggattctggatggagacttgtaccacaaaggcctgctgaaatttgcagtttctgctgaatccttgccagagaccctcgtcatttttgttgcagacatgtctagaccttggactgtgatggaatctctgcagaaatgggctagtgttttacgtgagcacattgataaaatgaaaattccaccagaaaaaatgagggagctggaacggaagtttgtgaaagattttcaagactatatggaacctgaagaaggttgtcaaggttccccacagagaagaggccctctgacctcaggctccgatgaagaaaatgttgccctgcctctgggtgacaatgtgctgactcataacctggggatcccggtgttggtggtgtgcacaaagtgtgatgcggtgagtgtcctggagaaggagcacgattacagggatgagcatttggactttatccagtcacacctgcggaggttctgccttcagtatggagctgccttgatttacacatcagtgaaagaagagaaaaacctcgacttgttgtataagtatattgttcataaaacatacggtttccacttcaccacacctgccttagttgtggaaaaggatgccgtttttatacctgcaggctgggacaatgaaaagaaaatagctattttacatgaaaattttacaaccgtgaagccggaagatgcatatgaagactttattgtgaaacctcccgtgagaaagctggtccacgacaaagagttggcagcagaagatgagcaggtgttcctaatgaagcaacagtcactccttgccaagcaaccagccactcccacgagagcttctgaatctcctgcaagaggaccctctggctctccaaggacccagggtcggggagggccagccagtgtgcctagctcctccccaggcacgtcagtaaaaaagccggacccaaacatcaaaaataatgcagcaagtgaaggggtgttggccagcttcttcaacagtctgttgagtaaaaagacaggctctcctggaagtcctggtgctggtggggtgcagagcacagccaagaagtcaggacaaaagactgtgttgtcaaatgttcaggaagaactggatagaatgactcgaaagccagactctatggtaacaaactcttcaacagaaaatgaagcctgaacctccttaaaaagtgcatatgtcgaatgaccaaataactatgtatattgatctgctaagaccaggatttttctgatatggcacatgctatcagttttttggggcaggggagatgaactttaaaaaaaaaaaaaaaacttcattggcttgtccgagtgtgaaatgcacatttaggaaggttacatgtcagaccctttgttaaggataacccttggactctggggcatgtggctcttttgtgggaggcaagcacatctgggcttcttgtggaggggaaggtagagtgaaagaaagagggcccactttctaacagggtggagcaaatgagaccaagaaatcattggtaagatgatggttagtctgaccagtttcatgttagtaaattcacttgttcttgggaagcagattaagtagcagaaagtccaggaaagaaagaccagaaggagtaatgagacaagtgatggtggggaagctgaatgttgagggaggtggaggaaggaggagatgagcagtgtcagtaaatactgtgcattcagtagaagttgaagaatcattgttagaagcatttccaaacaaaacactaagcaaaatgggaattaggcttattttgaatgcatctttaacttacgaaagatgtactaattgtgggggtgcctgagtcaggcggagctgacccaggggtgggaacgatggcagctgcccaggacccatgtgcttggcccaggctatgtcctcgtgagaggtactggggtccacggatatgtgttgtggggcagacagtcactgtgggatgtcttcaaagtcagcagttacagaattagtttactttgaattttgttgtctaaatagctcctgctttattttttaaattaaattttttgtttttactatcacaggctggcctaactaatacaaaataggtgatgaacctctggttttaccataatgcaatgtgccacggaaagtttgggggaggtttttaatgtaattgcactctggttaattggctcgtaccaagccctgccttatgacttgtggaaagcttcaaggagttccactgatgcaaaagggtcttttcctagcttcctggtctgatcagtgctatgagatggacagataagtgtgaatgttttatacagaaaatggaaatgatacatttctcttgttaggtgttttcataaaatgtagcattttttttcttatggaaataagagtttcaggtgtctccccacctagggcaaattcatgcacattgtcatgttataccaccattctggaaatgatttctgtggatttgaaattgcacttttaattttatatatgacagcatttaaatgcaaacactaccatgaatttaatgtataaaatgttgtcaaaccaagggaaaaaaccacagttcaccatgtggagtttactttttttatatgaatgtttgttgtactgtgtctaagcataacttccctaatgtcattacttttacataccagatttgactgaccactaatgtagtactggggataacttaatatcctatgttgtgtcaagactctttgaagactttcttgaattgctttcgtaaaggtctgaacactgttaaggagaaagctgagtatcaacttgcctttctgatagaaatgtttcttgtgccagttttattgttgagatatactatttttttccttttttaattcagttttttaaaaaaacaaatgtattgtggcttccagttaccaggttgtctaggtaatgacagtaaactgactgtagaatgataattgtggtatagtgaccaatagatgccaaacagcttgtggcctcactaaaggtggggtcgcttagtccccgggagtaaaatgagtgacctcagaaacaagaattcctggaaaggcacatgccgaagaggaatatggtataattttaaattttaatgcaaaattttaatttgtctttattttttatcatttgaactgataagcactttttgtgtcaatataaaatatactaaaactgatgaaatgctaagacatgtcttgtgaaggaaggtttcttggagaccacttttatttactcatgagaagtggaagctcctagtatcagaagaagctgatacatagtgtcatgtgctcagtggttgccaaagtctaccaactttggggagctgcagggttctttttgggaggtgggaggaagggagatgagttttgttattttggggttttcaagcattggaaccaaaggccaaataataaacagcctttagtttttaaagtaaaattcattttatttgcagagtacacttgtatggtagactgttaaagacaattttatgactatttatgcacattataatggttacatctgctttttgtctttaaaataaaaaaaaaaatcagagaaaagcccacctttgaatacgtggctgaagataacagccaagaattggtctttcctaaaaatgcaacagataatgctgctagattgttattttgtttgcacttttttttgattggcattttaaaatcggtatttaaactgaagacattgtcatgttttattaatttaacaaagttgaaagtgactgctctgtacatcatgaccttaacaatgttaatgctgtaagtgaaagttcactgtcgtctgtatactaaatttattggtgtttctaacttaaaagtaagactgcagattatcccccaccagccttagtccaggggtgtggctctgtccgggtgcagtatgcagtcatgtggaaccttgctttctagtcctgggaaaaaaagatgtctctaattactggcttcaataaacacgaatccagactgcttacaa

SEQ ID NO: 8912 - protein, 492 aa, Homo sapiens
MAPVGVEKKLLLGPNGPAVAAAGDLTSEEEEGQSLWSSILSEVSTRARSKLPSGKNILVFGEDGSGKTTLMTKLQGAEHGKKGRGLEYLYLSVHDEDRDDHTRCNVWILDGDLYHKGLLKFAVSAESLPETLVIFVADMSRPWTVMESLQKWASVLREHIDKMKIPPEKMRELERKFVKDFQDYMEPEEGCQGSPQRRGPLTSGSDEENVALPLGDNVLTHNLGIPVLVVCTKCDAVSVLEKEHDYRDEHLDFIQSHLRRFCLQYGAALIYTSVKEEKNLDLLYKYIVHKTYGFHFTTPALVVEKDAVFIPAGWDNEKKIAILHENFTTVKPEDAYEDFIVKPPVRKLVHDKELAAEDEQVFLMKQQSLLAKQPATPTRASESPARGPSGSPRTQGRGGPASVPSSSPGTSVKKPDPNIKNNAASEGVLASFFNSLLSKKTGSPGSPGAGGVQSTAKKSGQKTVLSNVQEELDRMTRKPDSMVTNSSTENEA

SEQ ID NO: 8913 - DNA, 2975 bp, Homo sapiens
ggctgccccggcggctgcctgaccgccgcccgccacctcggcggcctcgcaacccgtgggagcccgtggccatcgcagacctagaggacacgttgggcggcgcagtcgccgcggcaaggtcggcgggcggcgcggcgcgagggacggcgagcggggggcggcccggcccgggtcctcgcgggtcctcggcgggcccgggggagggccctctttgtggctgcagttggcaagatggcgccggtgggggtggagaagaagctgctgctaggtcccaacgggcccgcggtggcggccgccggcgacctgaccagtgaggaggaggaaggccagagcctatggtcctccattctgagcgaagtgtccacccgcgccaggtccaagctgccgtccggcaagcacatctgggcttcttgtggaggggaaggtagagtgaaagaaagagggcccactttctaacagggtggagcaaatgagaccaagaaatcattggtaagatgatggttagtctgaccagtttcatgttagtaaattcacttgttcttgggaagcagattaagtagcagaaagtccaggaaagaaagaccagaaggagtaatgagacaagtgatggtggggaagctgaatgttgagggaggtggaggaaggaggagatgagcagtgtcagtaaatactgtgcattcagtagaagttgaagaatcattgttagaagcatttccaaacaaaacactaagcaaaatgggaattaggcttattttgaatgcatctttaacttacgaaagatgtactaattgtgggggtgcctgagtcaggcggagctgacccaggggtgggaacgatggcagctgcccaggacccatgtgcttggcccaggctatgtcctcgtgagaggtactggggtccacggatatgtgttgtggggcagacagtcactgtgggatgtcttcaaagtcagcagttacagaattagtttactttgaattttgttgtctaaatagctcctgctttattttttaaattaaattttttgtttttactatcacaggctggcctaactaatacaaaataggtgatgaacctctggttttaccataatgcaatgtgccacggaaagtttgggggaggtttttaatgtaattgcactctggttaattggctcgtaccaagccctgccttatgacttgtggaaagcttcaaggagttccactgatgcaaaagggtcttttcctagcttcctggtctgatcagtgctatgagatggacagataagtgtgaatgttttatacagaaaatggaaatgatacatttctcttgttaggtgttttcataaaatgtagcattttttttcttatggaaataagagtttcaggtgtctccccacctagggcaaattcatgcacattgtcatgttataccaccattctggaaatgatttctgtggatttgaaattgcacttttaattttatatatgacagcatttaaatgcaaacactaccatgaatttaatgtataaaatgttgtcaaaccaagggaaaaaaccacagttcaccatgtggagtttactttttttatatgaatgtttgttgtactgtgtctaagcataacttccctaatgtcattacttttacataccagatttgactgaccactaatgtagtactggggataacttaatatcctatgttgtgtcaagactctttgaagactttcttgaattgctttcgtaaaggtctgaacactgttaaggagaaagctgagtatcaacttgcctttctgatagaaatgtttcttgtgccagttttattgttgagatatactatttttttccttttttaattcagttttttaaaaaaacaaatgtattgtggcttccagttaccaggttgtctaggtaatgacagtaaactgactgtagaatgataattgtggtatagtgaccaatagatgccaaacagcttgtggcctcactaaaggtggggtcgcttagtccccgggagtaaaatgagtgacctcagaaacaagaattcctggaaaggcacatgccgaagaggaatatggtataattttaaattttaatgcaaaattttaatttgtctttattttttatcatttgaactgataagcactttttgtgtcaatataaaatatactaaaactgatgaaatgctaagacatgtcttgtgaaggaaggtttcttggagaccacttttatttactcatgagaagtggaagctcctagtatcagaagaagctgatacatagtgtcatgtgctcagtggttgccaaagtctaccaactttggggagctgcagggttctttttgggaggtgggaggaagggagatgagttttgttattttggggttttcaagcattggaaccaaaggccaaataataaacagcctttagtttttaaagtaaaattcattttatttgcagagtacacttgtatggtagactgttaaagacaattttatgactatttatgcacattataatggttacatctgctttttgtctttaaaataaaaaaaaaaatcagagaaaagcccacctttgaatacgtggctgaagataacagccaagaattggtctttcctaaaaatgcaacagataatgctgctagattgttattttgtttgcacttttttttgattggcattttaaaatcggtatttaaactgaagacattgtcatgttttattaatttaacaaagttgaaagtgactgctctgtacatcatgaccttaacaatgttaatgctgtaagtgaaagttcactgtcgtctgtatactaaatttattggtgtttctaacttaaaagtaagactgcagattatcccccaccagccttagtccaggggtgtggctctgtccgggtgcagtatgcagtcatgtggaaccttgctttctagtcctgggaaaaaaagatgtctctaattactggcttcaataaacacgaatccagactgcttacaa

SEQ ID NO: 8914 - protein, 74 aa, Homo sapiens
MAPVGVEKKLLLGPNGPAVAAAGDLTSEEEEGQSLWSSILSEVSTRARSKLPSGKHIWASCGGEGRVKERGPTF

SEQ ID NO: 8915 - DNA, 3343 bp, Homo sapiens
ggctgccccggcggctgcctgaccgccgcccgccacctcggcggcctcgcaacccgtgggagcccgtggccatcgcagacctagaggacacgttgggcggcgcagtcgccgcggcaaggtcggcgggcggcgcggcgcgagggacggcgagcggggggcggcccggcccgggtcctcgcgggtcctcggcgggcccgggggagggccctctttgtggctgcagttggcaagatggcgccggtgggggtggagaagaagctgctgctaggtcccaacgggcccgcggtggcggccgccggcgacctgaccagtgaggaggaggaaggccagagcctatggtcctccattctgagcgaagtgtccacccgcgccaggtccaagctgccgtccggcaagaacatcctggtcttcggtgaagatggttctggtaaaacaaccctcatgactaaactacaaggagctgagcatggcaaaaaaggaagaggcctagaatatctctacctcagtgtccatgatgaggaccgagatgatcacacgcgctgcaacgtgtggattctggatggagacttgtaccacaaaggcctgctgaaatttgcagtttctgctgaatccttgccagagaccctcgtcatttttgttgcagacatgtctagaccttggactgtgatggaatctctgcagaaatgggctagtgttttacgtgagcacattgataaaatgaaaattccaccagaaaaaatgagggagctggaacggaagtttgtgaaagattttcaagactatatggaacctgaagaaggttgtcaaggttccccactttctaacagggtggagcaaatgagaccaagaaatcattggtaagatgatggttagtctgaccagtttcatgttagtaaattcacttgttcttgggaagcagattaagtagcagaaagtccaggaaagaaagaccagaaggagtaatgagacaagtgatggtggggaagctgaatgttgagggaggtggaggaaggaggagatgagcagtgtcagtaaatactgtgcattcagtagaagttgaagaatcattgttagaagcatttccaaacaaaacactaagcaaaatgggaattaggcttattttgaatgcatctttaacttacgaaagatgtactaattgtgggggtgcctgagtcaggcggagctgacccaggggtgggaacgatggcagctgcccaggacccatgtgcttggcccaggctatgtcctcgtgagaggtactggggtccacggatatgtgttgtggggcagacagtcactgtgggatgtcttcaaagtcagcagttacagaattagtttactttgaattttgttgtctaaatagctcctgctttattttttaaattaaattttttgtttttactatcacaggctggcctaactaatacaaaataggtgatgaacctctggttttaccataatgcaatgtgccacggaaagtttgggggaggtttttaatgtaattgcactctggttaattggctcgtaccaagccctgccttatgacttgtggaaagcttcaaggagttccactgatgcaaaagggtcttttcctagcttcctggtctgatcagtgctatgagatggacagataagtgtgaatgttttatacagaaaatggaaatgatacatttctcttgttaggtgttttcataaaatgtagcattttttttcttatggaaataagagtttcaggtgtctccccacctagggcaaattcatgcacattgtcatgttataccaccattctggaaatgatttctgtggatttgaaattgcacttttaattttatatatgacagcatttaaatgcaaacactaccatgaatttaatgtataaaatgttgtcaaaccaagggaaaaaaccacagttcaccatgtggagtttactttttttatatgaatgtttgttgtactgtgtctaagcataacttccctaatgtcattacttttacataccagatttgactgaccactaatgtagtactggggataacttaatatcctatgttgtgtcaagactctttgaagactttcttgaattgctttcgtaaaggtctgaacactgttaaggagaaagctgagtatcaacttgcctttctgatagaaatgtttcttgtgccagttttattgttgagatatactatttttttccttttttaattcagttttttaaaaaaacaaatgtattgtggcttccagttaccaggttgtctaggtaatgacagtaaactgactgtagaatgataattgtggtatagtgaccaatagatgccaaacagcttgtggcctcactaaaggtggggtcgcttagtccccgggagtaaaatgagtgacctcagaaacaagaattcctggaaaggcacatgccgaagaggaatatggtataattttaaattttaatgcaaaattttaatttgtctttattttttatcatttgaactgataagcactttttgtgtcaatataaaatatactaaaactgatgaaatgctaagacatgtcttgtgaaggaaggtttcttggagaccacttttatttactcatgagaagtggaagctcctagtatcagaagaagctgatacatagtgtcatgtgctcagtggttgccaaagtctaccaactttggggagctgcagggttctttttgggaggtgggaggaagggagatgagttttgttattttggggttttcaagcattggaaccaaaggccaaataataaacagcctttagtttttaaagtaaaattcattttatttgcagagtacacttgtatggtagactgttaaagacaattttatgactatttatgcacattataatggttacatctgctttttgtctttaaaataaaaaaaaaaatcagagaaaagcccacctttgaatacgtggctgaagataacagccaagaattggtctttcctaaaaatgcaacagataatgctgctagattgttattttgtttgcacttttttttgattggcattttaaaatcggtatttaaactgaagacattgtcatgttttattaatttaacaaagttgaaagtgactgctctgtacatcatgaccttaacaatgttaatgctgtaagtgaaagttcactgtcgtctgtatactaaatttattggtgtttctaacttaaaagtaagactgcagattatcccccaccagccttagtccaggggtgtggctctgtccgggtgcagtatgcagtcatgtggaaccttgctttctagtcctgggaaaaaaagatgtctctaattactggcttcaataaacacgaatccagactgcttacaa

SEQ ID NO: 8916 - protein, 209 aa, Homo sapiens
MAPVGVEKKLLLGPNGPAVAAAGDLTSEEEEGQSLWSSILSEVSTRARSKLPSGKNILVFGEDGSGKTTLMTKLQGAEHGKKGRGLEYLYLSVHDEDRDDHTRCNVWILDGDLYHKGLLKFAVSAESLPETLVIFVADMSRPWTVMESLQKWASVLREHIDKMKIPPEKMRELERKFVKDFQDYMEPEEGCQGSPLSNRVEQMRPRNHW

SEQ ID NO: 8917 - DNA, 1488 bp, Homo sapiens
ggctgccccggcggctgcctgaccgccgcccgccacctcggcggcctcgcaacccgtgggagcccgtggccatcgcagacctagaggacacgttgggcggcgcagtcgccgcggcaaggtcggcgggcggcgcggcgcgagggacggcgagcggggggcggcccggcccgggtcctcgcgggtcctcggcgggcccgggggagggccctctttgtggctgcagttggcaagatggcgccggtgggggtggagaagaagctgctgctaggtcccaacgggcccgcggtggcggccgccggcgacctgaccagtgaggaggaggaaggccagagcctatggtcctccattctgagcgaagtgtccacccgcgccaggtccaagctgccgtccggcaagaacatcctggtcttcggtgaagatggttctggtaaaacaaccctcatgactaaactacaaggagctgagcatggcaaaaaaggaagaggcctagaatatctctacctcagtgtccatgatgaggaccgagatgatcacacgcgctgcaacgtgtggattctggatggagacttgtaccacaaaggcctgctgaaatttgcagtttctgctgaatccttgccagagaccctcgtcatttttgttgcagacatgtctagaccttggactgtgatggaatctctgcagaaatgggctagtgttttacgtgagcacattgataaaatgaaaattccaccagaaaaaatgagggagctggaacggaagtttgtgaaagattttcaagactatatggaacctgaagaaggttgtcaaggttccccacagagaagaggccctctgacctcaggctccgatgaagaaaatgttgccctgcctctgggtgacaatgtgctgactcataacctggggatcccggtgttggtggtgtgcacaaagtgtgatgcggtgagtgtcctggagaaggagcacgattacagggatgagcatttggactttatccagtcacacctgcggaggttctgccttcagtatggagctgccttgatttacacatcagtgaaagaagagaaaaacctcgacttgttgtataagtatattgttcataaaacatacggtttccacttcaccacacctgccttagttgtggaaaaggatgccgtttttatacctgcaggctgggacaatgaaaagaaaatagctattttacatgaaaattttacaaccgtgaagccggaagatgcatatgaagactttattgtgaaacctcccgtgagaaagctggtccacgacaaagagttggcagcagaagatgagcaggtgttcctaatgaagcaacagtcactccttgccaagcaaccagccactcccacgagagcttctgaatctcctgcaagaggaccctctggctctccaaggacccagggtcggggagggccagccagtgtgcctagctcctccccaggcacgtcagtaaaaaagccggacccaaacatc

SEQ ID NO: 8918 - protein, 418 aa, Homo sapiens
MAPVGVEKKLLLGPNGPAVAAAGDLTSEEEEGQSLWSSILSEVSTRARSKLPSGKNILVFGEDGSGKTTLMTKLQGAEHGKKGRGLEYLYLSVHDEDRDDHTRCNVWILDGDLYHKGLLKFAVSAESLPETLVIFVADMSRPWTVMESLQKWASVLREHIDKMKIPPEKMRELERKFVKDFQDYMEPEEGCQGSPQRRGPLTSGSDEENVALPLGDNVLTHNLGIPVLVVCTKCDAVSVLEKEHDYRDEHLDFIQSHLRRFCLQYGAALIYTSVKEEKNLDLLYKYIVHKTYGFHFTTPALVVEKDAVFIPAGWDNEKKIAILHENFTTVKPEDAYEDFIVKPPVRKLVHDKELAAEDEQVFLMKQQSLLAKQPATPTRASESPARGPSGSPRTQGRGGPASVPSSSPGTSVKKPDPN

SEQ ID NO: 8919 - DNA, 1325 bp, Homo sapiens
atcactgaattctgatgggctacctggaactggcttagggtgggattacatacgcctcctgccacatcggatttccttctattttgtcaggggtggcatcatccagtgagtaaatctgttagtgatctccctcgcataacctaggaattctctcaggatccatttttccagtagttttgagaaagcgaccaacaacagcaaagagagtagttcttccattccaagagcagccatcttgcttaactgacaaactagagagaactgcaaggactcagtacatccctggcacagtccattctctctcacagcatattgtatgagactgtgtgagtgctgcttccacgctacactaaaaacccatggtccctgcattatttgagcaactgacaagcttctgaagttcaggttcgcgaacgctgagagcagcacccagtggatttgtggcagggacagcgtttcactatgttgtccaggcttgtttcaaactcctgggctcaagccatcagcctgcctcaacctcctaaagtgctgacattacaggcatgagccactgtgcccagccaggaaatgtttcaaatacttgagatttttgatgaaccaagctggctggtgtcgcctcagtttgtctaaattaccaaggaccgctggaatttccctgggaatatgtttcgggaaaggtcagaaactcttcagtcgtcttcacgcttccactcagtagcaacgtttttgcacactcattgactatcaactggttgtctatgactcaaattacataatgaatccagcacataaattatttactcagatttaatgccagcaactgttatctttgtatttttttcccctctgccagctaatctggctcatttcattggaattttggtcatgcccattctccttctgcactaaattaactccataacgtagtataaacagaacaagcttgtgtgtgatatgcttaactgttaatttacctaattaaactaattcaattaaatcatttacatctttttggtaacatgccagttgataccacagcagaagtgggatgtttcagaagatgattgttcagcaaatgaatggaaaaaaaaataaaaggaaaacaaaatgagacaaccgtccaaatctcttggcttgaaaattaaatgatactgaaaaaatgcagctttcacggggcactgtgattagatatttttctgaaatcaattttctctacaaattggtattttaacagagtgatcacaatctattgtacaaaatattttaaacactatttgtacattcacatatttggtatgtttaagtaaagtgtgcttgttcccaca

SEQ ID NO: 8920 - protein, 41 aa, Homo sapiens
MNQAGWCRLSLSKLPRTAGISLGICFGKGQKLFSRLHASTQ

SEQ ID NO: 8921 - DNA, 2543 bp, Homo sapiens
gacaaactagagagaactgcaaggactcagtacatccctggcacagtccattctctctcacagcatattgtatgagactgtgtgagtgctgcttccacgctacactaaaaacccatggtccctgcattatttgagcaactgacaagcttctgaagttcaggttcgcgaacgctgagagcagcacccagtggatttgtggcagatgaggaaactgaggcccagagaggttaagtgattgccctgaagccacacagctaaccagagaagatataagttcctgccttccttacttcccattctcataagcaagtttccgcatgaacaaggtggcaggtctgagcaaaatgctaaaactgtggccccattttgtttgtgcacatgtatgtgtgtacatgagctattggtgtgacgggagtttgcggggatattctctccctgttacatgttttcacatttcccacaagacgggaatgaaaaggaaggaagagctgaaccattccctcaggcaagtagatctgtggcaaacaaagagtccacagctcggtctccacgggggtcagtctgacttccttccctcagaagcatcccgggctacattttcatcttcgccgtcttccaatcttgcataatctataataatgtgattccaaatgcattttagcaaatgcaagatggaatgggactcccccggctgctcccgaacatctgatctaagaaacccgtaaggagctgcagtgaaaagttcactgatagaaaaaaacaaacaaacaaacagacatttgcctgtgtccctggttaggggcaaggcttttccgggttggtggctcttggtcatctttgttgtccttaaaaaagggataacgctgaggagctggcggttcacctttgctcttgtgtttaattgctgcaaaagccacttattaccttgtgttcttccgcagagggcacactgtctttcccagccaccaggcctgctggtgtttggcttctctacctgccccggaagccatccccgtcacctccgagtaattctgggtcacttccagggccaggtctgtctggctccggtacaggaaggccctcatgaaaggaagaagggcggaactgggatttttttttctttctttgaattttgcataaaattccgtccccagccacctaatgagaaaacatccatcatctatctttccctgggaatgtcggtggccattctgagctggtttgtggtcccgctcatctgtacgcaggcagggcttgtgaaattgcttttccctcagaaaaatatgttcatttccaccttcctcagatggccctcacaaatgaaagtgctttgtcatttttaatgcccagtgttccctttttcccgcactgtctccagtcacgatccagccgataaaacccacaggtacatttaaaacaaaaaacaaaaaacaaaacacacacacacacacacacacacacacacacacacctcaaaagcccagaggactgtcagattccactggtgtccccttgtgggttttcctggcacacagagcaaaaatggctgcaaggggaggttctctctctgttccctggaaatctccttgggccttgtgcagcatttggatggacacgcagcgacaggggacgtgctgaattctagataacagatgcctgccttaaaatggaggcacaaagcccagccctgtccccttggctggccggctctgagcatcctgagaattaacagaggtacatgtgctttataaaaactggaaagtgtactaaaaattcaaagttattattatttctaaaatgtctccagcctacgatttgtcataaacacctatcattctgcatagataattgggtaattgttcctcatgccagagggaacaaacgtctctctttgaaatgtgtgtggaggcttacacatagagagccctgttataacgagggtctgactccatagagatttgtagatgccaaaagactaacaataacctcctccaaaaaataactgcatccagcttttcataggcaagttagtaggaccacctgattccagcattttaaaagagtcaccctctatatggaaatgtggtcaaaatactagtccaggaaaggaacatgacagatttgttggccaaaacttatttcaaagcagaatctttgtaaaatatgatttttttcccacatatctgcatttcaagactgggttatctttgtttctttgtgattgttatttaaatacatattagttttaacttttcctaccttttcttgatcacaccatccgctgagttaaggatctgtaaacaaagcttgaattgagccaaaatgatctaacttccaaagggaacccttgtttcctcaggtaaacttgaacgtcttcattgatgatagagaaccttgcttctcaaataacctagcatgaagggcaacttggtagttgtttttgttgctaatatccaattccccatggcctgatacttttgtaaaatacataacagttgaattactagaaaaataaaatgtcgcttgaatgttgcagtcatgtc

SEQ ID NO: 8922 - protein, 103 aa, Homo sapiens
MNKVAGLSKMLKLWPHFVCAHVCVYMSYWCDGSLRGYSLPVTCFHISHKTGMKRKEELNHSLRQVDLWQTKSPQLGLHGGQSDFLPSEASRATFSSSPSSNLA

SEQ ID NO: 8923 - DNA, 942 bp, Homo sapiens
gacaaactagagagaactgcaaggactcagtacatccctggcacagtccattctctctcacagcatattgtatgagactgtgtgagtgctgcttccacgctacactaaaaacccatggtccctgcattatttgagcaactgacaagcttctgaagttcaggttcgcgaacgctgagagcagcacccagtggatttgtggcagatttttgatgaaccaagctggctggtgtcgcctcagtttgtctaaattaccaaggaccgctggaatttccctgggaatatgtttcgggaaaggtcagaaactcttcagtcgtcttcacgcttccactcagtagcaacgtttttgcacactcattgactatcaactggttgtctatgactcaaattacataatgaatccagcacataaattatttactcagatttaatgccagcaactgttatctttgtatttttttcccctctgccagctaatctggctcatttcattggaattttggtcatgcccattctccttctgcactaaattaactccataacgtagtataaacagaacaagcttgtgtgtgatatgcttaactgttaatttacctaattaaactaattcaattaaatcatttacatctttttggtaacatgccagttgataccacagcagaagtgggatgtttcagaagatgattgttcagcaaatgaatggaaaaaaaaataaaaggaaaacaaaatgagacaaccgtccaaatctcttggcttgaaaattaaatgatactgaaaaaatgcagctttcacggggcactgtgattagatatttttctgaaatcaattttctctacaaattggtattttaacagagtgatcacaatctattgtacaaaatattttaaacactatttgtacattcacatatttggtatgtttaagtaaagtgtgcttgttcccaca

SEQ ID NO: 8924 - protein, 41 aa, Homo sapiens; identical to SEQ ID NO: 8920

SEQ ID NO: 8925 - DNA, 619 bp, Homo sapiens
agagaactgcaaggactcagtacatccctggcacagtccattctctctcacagcatattgtatgagactgtgtgagtgctgcttccacgctacactaaaaacccatggtccctgcattatttgagcaactgacaagcttctgaagttcaggttcgcgaacgctgagagcagcacccagtggatttgtggcagatgcccaaagcaaaaagagtgaagcagtcagaatttcagacactgtgaacaactccccttggggtacctctggggctggcgtctttacatcacgacgacagaaagctggcccgcacagactatggccacggcgtcttagaggttttgtttctctgcaggcgtccagtgctctgtttctttccctcctcaccactctccaaaccacactcacacaaatacacgtccctatgtgcaaagacgcgcatatgtatattgtatatcagtgtgacactcacacatacgtgcggtgttagcatagcctttccccctcgagtccctgttgtgcttcccagcacccagcatcctccaaagcaggcagtggcacactatcactcataaactaaatccagccactgcctgctttgtaaataaagttttgctggaacac

SEQ ID NO: 8926 - protein, 109 aa, Homo sapiens
TTPLGVPLGLASLHHDDRKLARTDYGHGVLEVLFLCRRPVLCFFPSSPLSKPHSHKYTSLCAKTRICILYISVTLTHTCGVSIAFPPRVPVVLPSTQHPPKQAVAHYHS

SEQ ID NO: 8927 - DNA, 4893 bp, Homo sapiens
gcggagctcgagcgctgttgtgtgtttggaaggaaggatgctgctgccaatttgtgggaccgctgctgcgaggagtgggcgtggcctcggcggtgtggatgcttgttaggaaagatgctgagtgcttttcagtgaggagtcagggaggtgtgtgtgagagagagagagaaaagagagagacagagacggggagagagagagggagagagaagagagggaggagggaagaagaaaagacggagggaggtgaggaggaagggagggggagagacagagacctagaggggctgaagacccagacagagctggcagagctactgagaagaggactggagcgctctgagagcctctcaagatcttttgggggagcccaataaatgtgaacatgggatctgtcacgggagctgtcctcaagacgctacttctgtatctactcaaaattggaacagagtcgaagctgggaattcctatgactgtgatgatcctcttgtgtctgccttgcctcaggcatccttcagcagttcttccgagctctccagcagtcatggtcctggatttgcaaggctgaatagaagagatggagctggtggctggtctccacttgtgtctaacaaataccagtggttgcagattgaccttggagagagaatggaggtcaccgctgtggccactcaagggggatatggtagctccaactgggtgaccagctacctcctgatgttcagtgatagtggctggaactggaaacaatatcgccaagaggacagcatctggggtttttcaggaaatgcaaatgcagacagtgttgtgtactatagactccagccttctatcaaagccagatttctgcgcttcatccctttggaatggaaccccaagggcagaattggaatgcgaatcgaagtgttcggatgtgcatacagatcagaagtggttgatcttgatggaaaaagttcccttctctacagatttgatcaaaaatccctgagcccaataaaagacattatttctttgaaattcaaaaccatgcagagtgatgggattctactccacagggaagggccaaatggagatcacatcacactgcaattaagaagagcaagactctttttacttattaattcaggtgaagctaaactgccttccacttccaccctggtcaatctcaccctgggcagcctgctagatgatcagcattggcattcagtgctcatccagcgtttgggcaaacaagtcaacttcacagtggacgaacacaggcatcatttccatgcacggggagaattcaatctcatgaatcttgattatgagatcagctttggagggattccagcacctggaaaatcagtgtcattcccacatagaaattttcatggatgtttagaaaatctctattataatggagtggatatcattgatttggccaagcagcaaaaaccacagatcattgctatgggaaatgtgtcattttcttgttcacaaccacaatctatgcccgtgacttttctgagctccaggagttatttagcactgccagacttctctggagaggaggaggtttctgccacttttcaatttcgaacttggaataaggcagggcttctgctgttcagtgaacttcagctgatttcagggggtatcctcctctttctgagtgatggaaaacttaagtcgaatctctaccagccaggaaaattacccagtgacatcacagcaggtgtcgaattaaatgatgggcagtggcattctgtctctttatctgctaaaaagaatcacttgagtgtggcggtggacggccagatggcttctgctgctcctctgctggggcctgagcagatttattcgggtggcacctattattttggaggttgtcctgacaaaagctttggatccaaatgtaaaagtccacttggtggatttcagggatgtatgaggctcatttctatcagcggcaaagtggtagatctgatttcagttcagcaggggtcccttgggaacttcagtgaccttcagatagactcatgtggcatctcagacaggtgtttgcccaactattgtgaacacggtggggagtgttcccagtcctggagcacctttcattgtaactgtaccaacactggttacagaggagctacttgccataactctatctatgagcagtcatgtgaagcctataagcacagaggaaatacttcagggttttactatatagattcagatggaagtggtcccctggaaccatttcttctatattgcaatatgaccgaaactgcatggaccatcatacagcacaacggctctgacttaacaagagtcagaaatactaatccagagaacccatatgctgggtttttcgagtatgtggccagcatggagcaacttcaggccactattaaccgtgcagagcactgtgaacaggagtttacttattactgcaagaagtcacggctggtcaataagcaagatggaacccctctgagttggtgggtaggaagaaccaatgaaacgcaaacctactggggaggttcttcgcctgatcttcaaaaatgtacttgtggattagagggaaactgcattgattctcagtattactgcaattgtgatgctgaccggaatgaatggaccaatgacactggattgcttgcttataaagaacatcttccagtaactaagatcgtgattacagacacaggccgactgcattcagaagcagcttataaactggggcctctgctctgccagggagacagatcattttggaattcagcttcctttgataccgaggcttcatatcttcattttcctaccttccacggagaacttagcgcggatgtatctttcttttttaagacaacagcttcatctggggtatttttagagaacttggggattgctgattttatacggatagagcttcgctctccgacagtagtgactttttcatttgatgtggggaatgggccttttgaaatctcagtgcagtcacccacccacttcaacgacaaccagtggcaccatgtgagggttgaaaggaacatgaaggaggcctcccttcaagtggatcagctgacaccaaagacacagcccgcccccgctgatgggcatgtcctgttacagctcaacagtcagctcttcgtgggtggaacggccaccagacagagaggctttctgggctgcattcggtctctgcagttgaatgggatgaccctggatttggaagaaagagcccaggtgactccagaagtgcagccaggttgtaggggacattgcagcagctatgggaagttatgccgcaatggagggaaatgcagagaaagacccattgggttcttttgtgactgcactttctctgcatacacagggccattctgctcaaatgagatttctgcatattttggatctggctcatccgtgatatacaattttcaagaaaattatcttttaagtaaaaactccagctcccacgctgcttcatttcatggtgatatgaagctgagcagagaaatgatcaaatttagtttccgaacaacacgaacaccaagcttgctgctttttgtgagctccttttacaaagaatacctttctgtgatcattgccaaaaatggaagtttgcagatcaggtacaagttaaataaatatcaagagcctgatgttgttaactttgattttaaaaacatggctgatggacaacttcaccacataatgattaacagagaagaaggagtggtctttatagagattgacgataatagaaggagacaagttcacctgtcatcaggcacagaattcagtgcagtcaaatctctggtattgggcaggattttagaacacagtgatgtggaccaggatactgcactggcaggtgcgcagggcttcacaggctgcctctctgcagtgcagctcagccacgtggcccctctgaaggcagctctgcaccccagccacccagaccctgtcactgttacaggacacgtgactgagtccagctgtatggcccagcctggcactgatgccacatcaagggaaaggacacactcgtttgcagatcattctggaacaatagatgacagagagccccttgctaatgcaatcaaaagtgactctgcagtaattggaggtctgatagctgttgtgatttttatcttgctttgcatcactgccatagctgttcgcatttatcagcagaaaaggttatataaaagaagtgaggcaaaaaggtcagagaatgtagacagtgctgaggctgttctgaaaagtgagcttaatatacaaaatgcagtcaatgaaaatcagaaagagtacttcttctgattggcagctatgatttaacataaaattatgatagtttgttttaatagccaggggttctcaatggaaaaacgaatgctcttacactgaatgtacaggcagtgggcttgcagcactgccatcttgccatgtacaggcttggggtggctccaggaagcctcgtccagtgatatatttctcatagcattcattctatggaacaagaaattagatattgctgttaattttcaactgttctggtatgatctaaaacaagtttaacctgcttaatggctacagtttttacatgtgaaaactgtagccttggtctcttaaccatgtaatacataagttttgttagaggtaaaaattaaatttggactataatgtccttgctttatttgagaacatttgctgtgtttgcttttgtctcctcgtggtgttattcatagacctggaaatgcttctcagatcctgtgtggccggtgtttgcatcttcagtggccacaagcataataaagcccctttgcctttctctgtattatattcaatacaatacatcaatagtcttgaaaaatgttttgctgtctttgctttgtttgtatt

SEQ ID NO: 8928 - protein, 1220 aa, Homo sapiens
MEVTAVATQGGYGSSNWVTSYLLMFSDSGWNWKQYRQEDSIWGFSGNANADSVVYYRLQPSIKARFLRFIPLEWNPKGRIGMRIEVFGCAYRSEVVDLDGKSSLLYRFDQKSLSPIKDIISLKFKTMQSDGILLHREGPNGDHITLQLRRARLFLLINSGEAKLPSTSTLVNLTLGSLLDDQHWHSVLIQRLGKQVNFTVDEHRHHFHARGEFNLMNLDYEISFGGIPAPGKSVSFPHRNFHGCLENLYYNGVDIIDLAKQQKPQIIAMGNVSFSCSQPQSMPVTFLSSRSYLALPDFSGEEEVSATFQFRTWNKAGLLLFSELQLISGGILLFLSDGKLKSNLYQPGKLPSDITAGVELNDGQWHSVSLSAKKNHLSVAVDGQMASAAPLLGPEQIYSGGTYYFGGCPDKSFGSKCKSPLGGFQGCMRLISISGKVVDLISVQQGSLGNFSDLQIDSCGISDRCLPNYCEHGGECSQSWSTFHCNCTNTGYRGATCHNSIYEQSCEAYKHRGNTSGFYYIDSDGSGPLEPFLLYCNMTETAWTIIQHNGSDLTRVRNTNPENPYAGFFEYVASMEQLQATINRAEHCEQEFTYYCKKSRLVNKQDGTPLSWWVGRTNETQTYWGGSSPDLQKCTCGLEGNCIDSQYYCNCDADRNEWTNDTGLLAYKEHLPVTKIVITDTGRLHSEAAYKLGPLLCQGDRSFWNSASFDTEASYLHFPTFHGELSADVSFFFKTTASSGVFLENLGIADFIRIELRSPTVVTFSFDVGNGPFEISVQSPTHFNDNQWHHVRVERNMKEASLQVDQLTPKTQPAPADGHVLLQLNSQLFVGGTATRQRGFLGCIRSLQLNGMTLDLEERAQVTPEVQPGCRGHCSSYGKLCRNGGKCRERPIGFFCDCTFSAYTGPFCSNEISAYFGSGSSVIYNFQENYLLSKNSSSHAASFHGDMKLSREMIKFSFRTTRTPSLLLFVSSFYKEYLSVIIAKNGSLQIRYKLNKYQEPDVVNFDFKNMADGQLHHIMINREEGVVFIEIDDNRRRQVHLSSGTEFSAVKSLVLGRILEHSDVDQDTALAGAQGFTGCLSAVQLSHVAPLKAALHPSHPDPVTVTGHVTESSCMAQPGTDATSRERTHSFADHSGTIDDREPLANAIKSDSAVIGGLIAVVIFILLCITAIAVRIYQQKRLYKRSEAKRSENVDSAEAVLKSELNIQNAVNENQKEYFF

SEQ ID NO: 8929 - DNA, 851 bp, Homo sapiens
gagtgggcgtggcctcggcggtgtggatgcttgttaggaaagatgctgagtgcttttcagtgaggagtcagggaggtgtgtgtgagagagagagagaaaagagagagacagagacggggagagagagagggagagagaagagagggaggagggaagaagaaaagacggagggaggtgaggaggaagggagggggagagacagagacctagaggggctgaagacccagacagagctggcagagctactgagaagaggactggagcgctctgagagcctctcaagatcttttgggggagcccaataaatgtgaacatgggatctgtcacgggagctgtcctcaagacgctacttctgtatctactcaaaattggaacagagtcgaagctgggaattcctatgactgtgatgatcctcttgtgtctgccttgcctcaggcatccttcagcagttcttccgagctctccagcagtcatggtcctggatttgcaaggctgaatagaagagatggagctggtggctggtctccacttgtgtctaacaaataccagtggttgcagattgaccttggagagagaatggaggtcaccgctgtggccactcaagggggatatggtagctccaactgggtgaccagctacctcctgatgttcagtgatagtggctggaactggaaacaatatcgccaagaggacagcatctggggtttttcaggaaatgcaaatgcagacagtgttgtgtactatagactccagccttctatcaaagccagatttctgcgcttcatccctttggaatggaaccccaagggcagaattggaatgcgaatcgaagtgttcggatgtgcatacag

SEQ ID NO: 8930 - protein, 90 aa, Homo sapiens
MEVTAVATQGGYGSSNWVTSYLLMFSDSGWNWKQYRQEDSIWGFSGNANADSVVYYRLQPSIKARFLRFIPLEWNPKGRIGMRIEVFGCA

SEQ ID NO: 8931 - DNA, 4677 bp, Homo sapiens
gagtgggcgtggcctcggcggtgtggatgcttgttaggaaagatgctgagtgcttttcagtgaggagtcagggaggtgtgtgtgagagagagagagaaaagagagagacagagacggggagagagagagggagagagaagagagggaggagggaagaagaaaagacggagggaggtgaggaggaagggagggggagagacagagacctagaggggctgaagacccagacagagctggcagagctactgagaagaggactggagcgctctgagagcctctcaagatcttttgggggagcccaataaatgtgaacatgggatctgtcacgggagctgtcctcaagacgctacttctgtatctactcaaaattggaacagagtcgaagctgggaattcctatgactgtgatgatcctcttgtgtctgccttgcctcaggcatccttcagcagttcttccgagctctccagcagtcatggtcctggatttgcaaggctgaatagaagagatggagctggtggctggtctccacttgtgtctaacaaataccagtggttgcagattgaccttggagagagaatggaggtcaccgctgtggccactcaagggggatatggtagctccaactgggtgaccagctacctcctgatgttcagtgatagtggctggaactggaaacaatatcgccaagaggacagcatctggggtttttcaggaaatgcaaatgcagacagtgttgtgtactatagactccagccttctatcaaagccagatttctgcgcttcatccctttggaatggaaccccaagggcagaattggaatgcgaatcgaagtgttcggatgtgcatacagatcagaagtggttgatcttgatggaaaaagttcccttctctacagatttgatcaaaaatccctgagcccaataaaagacattatttctttgaaattcaaaaccatgcagagtgatgggattctactccacagggaagggccaaatggagatcacatcacactgcaattaagaagagcaagactctttttacttattaattcaggtgaagctaaactgccttccacttccaccctggtcaatctcaccctgggcagcctgctagatgatcagcattggcattcagtgctcatccagcgtttgggcaaacaagtcaacttcacagtggacgaacacaggcatcatttccatgcacggggagaattcaatctcatgaatcttgattatgagggaaatgtgtcattttcttgttcacaaccacaatctatgcccgtgacttttctgagctccaggagttatttagcactgccagacttctctggagaggaggaggtttctgccacttttcaatttcgaacttggaataaggcagggcttctgctgttcagtgaacttcagctgatttcagggggtatcctcctctttctgagtgatggaaaacttaagtcgaatctctaccagccaggaaaattacccagtgacatcacagcaggtgtcgaattaaatgatgggcagtggcattctgtctctttatctgctaaaaagaatcacttgagtgtggcggtggacggccagatggcttctgctgctcctctgctggggcctgagcagatttattcgggtggcacctattattttggaggttgtcctgacaaaagctttggatccaaatgtaaaagtccacttggtggatttcagggatgtatgaggctcatttctatcagcggcaaagtggtagatctgatttcagttcagcaggggtcccttgggaacttcagtgaccttcagatagactcatgtggcatctcagacaggtgtttgcccaactattgtgaacacggtggggagtgttcccagtcctggagcacctttcattgtaactgtaccaacactggttacagaggagctacttgccataactctatctatgagcagtcatgtgaagcctataagcacagaggaaatacttcagggttttactatatagattcagatggaagtggtcccctggaaccatttcttctatattgcaatatgaccgaaactgcatggaccatcatacagcacaacggctctgacttaacaagagtcagaaatactaatccagagaacccatatgctgggtttttcgagtatgtggccagcatggagcaacttcaggccactattaaccgtgcagagcactgtgaacaggagtttacttattactgcaagaagtcacggctggtcaataagcaagatggaacccctctgagttggtgggtaggaagaaccaatgaaacgcaaacctactggggaggttcttcgcctgatcttcaaaaatgtacttgtggattagagggaaactgcattgattctcagtattactgcaattgtgatgctgaccggaatgaatggaccaatgacactggattgcttgcttataaagaacatcttccagtaactaagatcgtgattacagacacaggccgactgcattcagaagcagcttataaactggggcctctgctctgccagggagacagatcattttggaattcagcttcctttgataccgaggcttcatatcttcattttcctaccttccacggagaacttagcgcggatgtatctttcttttttaagacaacagcttcatctggggtatttttagagaacttggggattgctgattttatacggatagagcttcgctctccgacagtagtgactttttcatttgatgtggggaatgggccttttgaaatctcagtgcagtcacccacccacttcaacgacaaccagtggcaccatgtgagggttgaaaggaacatgaaggaggcctcccttcaagtggatcagctgacaccaaagacacagcccgcccccgctgatgggcatgtcctgttacagctcaacagtcagctcttcgtgggtggaacggccaccagacagagaggctttctgggctgcattcggtctctgcagttgaatgggatgaccctggatttggaagaaagagcccaggtgactccagaagtgcagccaggttgtaggggacattgcagcagctatgggaagttatgccgcaatggagggaaatgcagagaaagacccattgggttcttttgtgactgcactttctctgcatacacagggccattctgctcaaatgagatttctgcatattttggatctggctcatccgtgatatacaattttcaagaaaattatcttttaagtaaaaactccagctcccacgctgcttcatttcatggtgatatgaagctgagcagagaaatgatcaaatttagtttccgaacaacacgaacaccaagcttgctgctttttgtgagctccttttacaaagaatacctttctgtgatcattgccaaaaatggaagtttgcagatcaggtacaagttaaataaatatcaagagcctgatgttgttaactttgattttaaaaacatggctgatggacaacttcaccacataatgattaacagagaagaaggagtggtctttatagagattgacgataatagaaggagacaagttcacctgtcatcaggcacagaattcagtgcagtcaaatctctggtattgggcaggattttagaacacagtgatgtggaccaggatactgcactggcaggtgcgcagggcttcacaggctgcctctctgcagtgcagctcagccacgtggcccctctgaaggcagctctgcaccccagccacccagaccctgtcactgttacaggacacgtgactgagtccagctgtatggcccagcctggcactgatgccacatcaagggaaaggacacactcgtttgcagatcattctggaacaatagatgacagagagccccttgctaatgcaatcaaaagtgactctgcagtaattggaggtctgatagctgttgtgatttttatcttgctttgcatcactgccatagctgttcgcatttatcagcagaaaaggttatataaaagaagtgaggcaaaaaggtcagagaatgtagacagtgctgaggctgttctgaaaagtgagcttaatatacaaaatgcagtcaatgaaaatcagaaagagtacttcttctgattggcagctatgatttaacataaaattatgatagtttgttttaatagccaggggttctcaatggaaaaacgaatgctcttacactgaatgtacaggcagtgggcttgcagcactgccatcttgccatgtacaggcttggggtggctccaggaagcctcgtccagtgatatatttctcatagcattcattctatggaacaagaaattagatattgctgttaattttcaactgttctggtatgatctaaaacaagtttaacctgcttaatggctacagtttttacatgtgaaaactgtagccttggtctcttaaccatgtaatacataagttttgttagaggtaaaaattaaatttggactataatgtccttgctttatttgagaacatttgctgtgtttgcttttgtctcctcgtggtgttattcatagacctggaaatgcttctcagatcctgtgtggccggtgtttgcatcttcagtggccacaagcataataaagcccctttgcctttctctgtattatattcaatacaatacatcaatagtcttgaaaaatgttttgctgtctttgctttgtttgtatt

SEQ ID NO: 8932 - protein, 1172 aa, Homo sapiens
MEVTAVATQGGYGSSNWVTSYLLMFSDSGWNWKQYRQEDSIWGFSGNANADSVVYYRLQPSIKARFLRFIPLEWNPKGRIGMRIEVFGCAYRSEVVDLDGKSSLLYRFDQKSLSPIKDIISLKFKTMQSDGILLHREGPNGDHITLQLRRARLFLLINSGEAKLPSTSTLVNLTLGSLLDDQHWHSVLIQRLGKQVNFTVDEHRHHFHARGEFNLMNLDYEGNVSFSCSQPQSMPVTFLSSRSYLALPDFSGEEEVSATFQFRTWNKAGLLLFSELQLISGGILLFLSDGKLKSNLYQPGKLPSDITAGVELNDGQWHSVSLSAKKNHLSVAVDGQMASAAPLLGPEQIYSGGTYYFGGCPDKSFGSKCKSPLGGFQGCMRLISISGKVVDLISVQQGSLGNFSDLQIDSCGISDRCLPNYCEHGGECSQSWSTFHCNCTNTGYRGATCHNSIYEQSCEAYKHRGNTSGFYYIDSDGSGPLEPFLLYCNMTETAWTIIQHNGSDLTRVRNTNPENPYAGFFEYVASMEQLQATINRAEHCEQEFTYYCKKSRLVNKQDGTPLSWWVGRTNETQTYWGGSSPDLQKCTCGLEGNCIDSQYYCNCDADRNEWTNDTGLLAYKEHLPVTKIVITDTGRLHSEAAYKLGPLLCQGDRSFWNSASFDTEASYLHFPTFHGELSADVSFFFKTTASSGVFLENLGIADFIRIELRSPTVVTFSFDVGNGPFEISVQSPTHFNDNQWHHVRVERNMKEASLQVDQLTPKTQPAPADGHVLLQLNSQLFVGGTATRQRGFLGCIRSLQLNGMTLDLEERAQVTPEVQPGCRGHCSSYGKLCRNGGKCRERPIGFFCDCTFSAYTGPFCSNEISAYFGSGSSVIYNFQENYLLSKNSSSHAASFHGDMKLSREMIKFSFRTTRTPSLLLFVSSFYKEYLSVIIAKNGSLQIRYKLNKYQEPDVVNFDFKNMADGQLHHIMINREEGVVFIEIDDNRRRQVHLSSGTEFSAVKSLVLGRILEHSDVDQDTALAGAQGFTGCLSAVQLSHVAPLKAALHPSHPDPVTVTGHVTESSCMAQPGTDATSRERTHSFADHSGTIDDREPLANAIKSDSAVIGGLIAVVIFILLCITAIAVRIYQQKRLYKRSEAKRSENVDSAEAVLKSELNIQNAVNENQKEYFF

SEQ ID NO: 8933 - DNA, 2353 bp, Homo sapiens
gcttttgctgcttcctcattttctcttgcagccgccatgattctgaggccttcccagctatgtggaactatgactgtgatgatcctcttgtgtctgccttgcctcaggcatccttcagcagttcttccgagctctccagcagtcatggtcctggatttgcaaggctgaatagaagagatggagctggtggctggtctccacttgtgtctaacaaataccagtggttgcagattgaccttggagagagaatggaggtcaccgctgtggccactcaagggggatatggtagctccaactgggtgaccagctacctcctgatgttcagtgatagtggctggaactggaaacaatatcgccaagaggacagcatctggggtttttcaggaaatgcaaatgcagacagtgttgtgtactatagactccagccttctatcaaagccagatttctgcgcttcatccctttggaatggaaccccaagggcagaattggaatgcgaatcgaagtgttcggatgtgcatacagatcagaagtggttgatcttgatggaaaaagttcccttctctacagatttgatcaaaaatccctgagcccaataaaagacattatttctttgaaattcaaaaccatgcagagtgatgggattctactccacagggaagggccaaatggagatcacatcacactgcaattaagaagagcaagactctttttacttattaattcaggtgaagctaaactgccttccacttccaccctggtcaatctcaccctgggcagcctgctagatgatcagcattggcattcagtgctcatccagcgtttgggcaaacaagtcaacttcacagtggacgaacacaggcatcatttccatgcacggggagaattcaatctcatgaatcttgattatgagatcagctttggagggattccagcacctggaaaatcagtgtcattcccacatagaaattttcatggatgtttagaaaatctctattataatggagtggatatcattgatttggccaagcagcaaaaaccacagatcattgctatgggaaatgtgtcattttcttgttcacaaccacaatctatgcccgtgacttttctgagctccaggagttatttagcactgccagacttctctggagaggaggaggtttctgccacttttcaatttcgaacttggaataaggcagggcttctgctgttcagtgaacttcagctgatttcagggggtatcctcctctttctgagtgatggaaaacttaagtcgaatctctaccagccaggaaaattacccagtgacatcacagcaggtgtcgaattaaatgatgggcagtggcattctgtctctttatctgctaaaaagaatcacttgagtgtggcggtggacggccagatggcttctgctgctcctctgctggggcctgagcagatttattcgggtggcacctattattttggaggttgtcctgacaaaagctttggatccaaatgtaaaagtccacttggtggatttcagggatgtatgaggctcatttctatcagcggcaaagtggtagatctgatttcagttcagcaggggtcccttgggaacttcagtgaccttcagatagactcatgtggcatctcagacaggtgtttgcccaactattgtgaacacggtggggagtgttcccagtcctggagcacctttcattgtaactgtaccaacactggttacagaggagctacttgccataactctatctatgagcagtcatgtgaagcctataagcacagaggaaatacttcagggttttactatatagattcagatggaagtggtcccctggaaccatttcttctatattgcaatatgaccgaaactgcatggaccatcatacagcacaacggctctgacttaacaagagtcagaaatactaatccagagaacccatatgctgggtttttcgagtatgtggccagcatggagcaacttcaggccactattaaccgtgcagagcactgtgaacaggagtttacttattactgcaagaagtcacggctggtcaataagcaagatggaacccctctgagttggtgggtaggaagaaccaatgaaacgcaaacctactggggaggttcttcgcctgatcttcaaaaatgtacttgtggattagagggaaactgcattgattctcagtattactgcaattgtgatgctgaccggaatgaatggtgatttccatatgatttctttatgcaagaaaaagttcatttaaaaaaattaatcactcaaagtatgtatagctagccagatactgaacaagttagtgcaatgaagtaattaaataaaggtttgttttaatg

SEQ ID NO: 8934 - protein, 721 aa, Homo sapiens
MWNYDCDDPLVSALPQASFSSSSELSSSHGPGFARLNRRDGAGGWSPLVSNKYQWLQIDLGERMEVTAVATQGGYGSSNWVTSYLLMFSDSGWNWKQYRQEDSIWGFSGNANADSVVYYRLQPSIKARFLRFIPLEWNPKGRIGMRIEVFGCAYRSEVVDLDGKSSLLYRFDQKSLSPIKDIISLKFKTMQSDGILLHREGPNGDHITLQLRRARLFLLINSGEAKLPSTSTLVNLTLGSLLDDQHWHSVLIQRLGKQVNFTVDEHRHHFHARGEFNLMNLDYEISFGGIPAPGKSVSFPHRNFHGCLENLYYNGVDIIDLAKQQKPQIIAMGNVSFSCSQPQSMPVTFLSSRSYLALPDFSGEEEVSATFQFRTWNKAGLLLFSELQLISGGILLFLSDGKLKSNLYQPGKLPSDITAGVELNDGQWHSVSLSAKKNHLSVAVDGQMASAAPLLGPEQIYSGGTYYFGGCPDKSFGSKCKSPLGGFQGCMRLISISGKVVDLISVQQGSLGNFSDLQIDSCGISDRCLPNYCEHGGECSQSWSTFHCNCTNTGYRGATCHNSIYEQSCEAYKHRGNTSGFYYIDSDGSGPLEPFLLYCNMTETAWTIIQHNGSDLTRVRNTNPENPYAGFFEYVASMEQLQATINRAEHCEQEFTYYCKKSRLVNKQDGTPLSWWVGRTNETQTYWGGSSPDLQKCTCGLEGNCIDSQYYCNCDADRNEW

SEQ ID NO: 8935 - DNA, 543 bp, Homo sapiens
ctgaggccttcccagctatgtggaactatgactgtgatgatcctcttgtgtctgccttgcctcaggcatccttcagcagttcttccgagctctccagcagtcatggtcctggatttgcaaggctgaatagaagagatggagctggtggctggtctccacttgtgtctaacaaataccagtggttgcagattgaccttggagagagaatggaggtcaccgctgtggccactcaagggggatatggtagctccaactgggtgaccagctacctcctgatgttcagtgatagtggctggaactggaaacaatatcgccaagaggacagcatctggggtttttcaggaaatgcaaatgcagacagtgttgtgtactatagactccagccttctatcaaagccagatttctgcgcttcatccctttggaatggaaccccaagggcagaattggaatgcgaatcgaagtgttcggatgtgcatacagtaacagtgatcctgtttgcagatctggagaagaaatgtatagaagtaaattactggtgggag

SEQ ID NO: 8936 - protein, 174 aa, Homo sapiens
MWNYDCDDPLVSALPQASFSSSSELSSSHGPGFARLNRRDGAGGWSPLVSNKYQWLQIDLGERMEVTAVATQGGYGSSNWVTSYLLMFSDSGWNWKQYRQEDSIWGFSGNANADSVVYYRLQPSIKARFLRFIPLEWNPKGRIGMRIEVFGCAYSNSDPVCRSGEEMYRSKLLV

SEQ ID NO: 8937 - DNA, 4657 bp, Homo sapiens
tatataattttatgatttttaaagtattttcatattctcctgtctttaagttttttcttttctcattgaacttactagacttctagtaagccctggaagtagtaggcatatttttagagatcttagatcctagtttttgatgttgttgttttacttgttggttgttttgtctattgattccacgaaagcctcagcactaactaaccctaacgtggcattgttcctcctggcagatgactgtgatgatcctcttgtgtctgccttgcctcaggcatccttcagcagttcttccgagctctccagcagtcatggtcctggatttgcaaggctgaatagaagagatggagctggtggctggtctccacttgtgtctaacaaataccagtggttgcagattgaccttggagagagaatggaggtcaccgctgtggccactcaagggggatatggtagctccaactgggtgaccagctacctcctgatgttcagtgatagtggctggaactggaaacaatatcgccaagaggacagcatctggggtttttcaggaaatgcaaatgcagacagtgttgtgtactatagactccagccttctatcaaagccagatttctgcgcttcatccctttggaatggaaccccaagggcagaattggaatgcgaatcgaagtgttcggatgtgcatacagatcagaagtggttgatcttgatggaaaaagttcccttctctacagatttgatcaaaaatccctgagcccaataaaagacattatttctttgaaattcaaaaccatgcagagtgatgggattctactccacagggaagggccaaatggagatcacatcacactgcaattaagaagagcaagactctttttacttattaattcaggtgaagctaaactgccttccacttccaccctggtcaatctcaccctgggcagcctgctagatgatcagcattggcattcagtgctcatccagcgtttgggcaaacaagtcaacttcacagtggacgaacacaggcatcatttccatgcacggggagaattcaatctcatgaatcttgattatgagatcagctttggagggattccagcacctggaaaatcagtgtcattcccacatagaaattttcatggatgtttagaaaatctctattataatggagtggatatcattgatttggccaagcagcaaaaaccacagatcattgctatgggaaatgtgtcattttcttgttcacaaccacaatctatgcccgtgacttttctgagctccaggagttatttagcactgccagacttctctggagaggaggaggtttctgccacttttcaatttcgaacttggaataaggcagggcttctgctgttcagtgaacttcagctgatttcagggggtatcctcctctttctgagtgatggaaaacttaagtcgaatctctaccagccaggaaaattacccagtgacatcacagcaggtgtcgaattaaatgatgggcagtggcattctgtctctttatctgctaaaaagaatcacttgagtgtggcggtggacggccagatggcttctgctgctcctctgctggggcctgagcagatttattcgggtggcacctattattttggaggttgtcctgacaaaagctttggatccaaatgtaaaagtccacttggtggatttcagggatgtatgaggctcatttctatcagcggcaaagtggtagatctgatttcagttcagcaggggtcccttgggaacttcagtgaccttcagatagactcatgtggcatctcagacaggtgtttgcccaactattgtgaacacggtggggagtgttcccagtcctggagcacctttcattgtaactgtaccaacactggttacagaggagctacttgccataactctatctatgagcagtcatgtgaagcctataagcacagaggaaatacttcagggttttactatatagattcagatggaagtggtcccctggaaccatttcttctatattgcaatatgaccgaaactgcatggaccatcatacagcacaacggctctgacttaacaagagtcagaaatactaatccagagaacccatatgctgggtttttcgagtatgtggccagcatggagcaacttcaggccactattaaccgtgcagagcactgtgaacaggagtttacttattactgcaagaagtcacggctggtcaataagcaagatggaacccctctgagttggtgggtaggaagaaccaatgaaacgcaaacctactggggaggttcttcgcctgatcttcaaaaatgtacttgtggattagagggaaactgcattgattctcagtattactgcaattgtgatgctgaccggaatgaatggaccaatgacactggattgcttgcttataaagaacatcttccagtaactaagatcgtgattacagacacaggccgactgcattcagaagcagcttataaactggggcctctgctctgccagggagacagatcattttggaattcagcttcctttgataccgaggcttcatatcttcattttcctaccttccacggagaacttagcgcggatgtatctttcttttttaagacaacagcttcatctggggtatttttagagaacttggggattgctgattttatacggatagagcttcgctctccgacagtagtgactttttcatttgatgtggggaatgggccttttgaaatctcagtgcagtcacccacccacttcaacgacaaccagtggcaccatgtgagggttgaaaggaacatgaaggaggcctcccttcaagtggatcagctgacaccaaagacacagcccgcccccgctgatgggcatgtcctgttacagctcaacagtcagctcttcgtgggtggaacggccaccagacagagaggctttctgggctgcattcggtctctgcagttgaatgggatgaccctggatttggaagaaagagcccaggtgactccagaagtgcagccaggttgtaggggacattgcagcagctatgggaagttatgccgcaatggagggaaatgcagagaaagacccattgggttcttttgtgactgcactttctctgcatacacagggccattctgctcaaatgagatttctgcatattttggatctggctcatccgtgatatacaattttcaagaaaattatcttttaagtaaaaactccagctcccacgctgcttcatttcatggtgatatgaagctgagcagagaaatgatcaaatttagtttccgaacaacacgaacaccaagcttgctgctttttgtgagctccttttacaaagaatacctttctgtgatcattgccaaaaatggaagtttgcagatcaggtacaagttaaataaatatcaagagcctgatgttgttaactttgattttaaaaacatggctgatggacaacttcaccacataatgattaacagagaagaaggagtggtctttatagagattgacgataatagaaggagacaagttcacctgtcatcaggcacagaattcagtgcagtcaaatctctggtattgggcaggattttagaacacagtgatgtggaccaggatactgcactggcaggtgcgcagggcttcacaggctgcctctctgcagtgcagctcagccacgtggcccctctgaaggcagctctgcaccccagccacccagaccctgtcactgttacaggacacgtgactgagtccagctgtatggcccagcctggcactgatgccacatcaagggaaaggacacactcgtttgcagatcattctggaacaatagatgacagagagccccttgctaatgcaatcaaaagtgactctgcagtaattggaggtctgatagctgttgtgatttttatcttgctttgcatcactgccatagctgttcgcatttatcagcagaaaaggttatataaaagaagtgaggcaaaaaggtcagagaatgtagacagtgctgaggctgttctgaaaagtgagcttaatatacaaaatgcagtcaatgaaaatcagaaagagtacttcttctgattggcagctatgatttaacataaaattatgatagtttgttttaatagccaggggttctcaatggaaaaacgaatgctcttacactgaatgtacaggcagtgggcttgcagcactgccatcttgccatgtacaggcttggggtggctccaggaagcctcgtccagtgatatatttctcatagcattcattctatggaacaagaaattagatattgctgttaattttcaactgttctggtatgatctaaaacaagtttaacctgcttaatggctacagtttttacatgtgaaaactgtagccttggtctcttaaccatgtaatacataagttttgttagaggtaaaaattaaatttggactataatgtccttgctttatttgagaacatttgctgtgtttgcttttgtctcctcgtggtgttattcatagacctggaaatgcttctcagatcctgtgtggccggtgtttgcatcttcagtggccacaagcataataaagcccctttgcctttctctgtattatattcaatacaatacatcaatagtcttgaaaaatgttttgctgtctttgctttgtttgtatt

SEQ ID NO: 8938 - protein, 1311 aa, Homo sapiens
MLLFYLLVVLSIDSTKASALTNPNVALFLLADDCDDPLVSALPQASFSSSSELSSSHGPGFARLNRRDGAGGWSPLVSNKYQWLQIDLGERMEVTAVATQGGYGSSNWVTSYLLMFSDSGWNWKQYRQEDSIWGFSGNANADSVVYYRLQPSIKARFLRFIPLEWNPKGRIGMRIEVFGCAYRSEVVDLDGKSSLLYRFDQKSLSPIKDIISLKFKTMQSDGILLHREGPNGDHITLQLRRARLFLLINSGEAKLPSTSTLVNLTLGSLLDDQHWHSVLIQRLGKQVNFTVDEHRHHFHARGEFNLMNLDYEISFGGIPAPGKSVSFPHRNFHGCLENLYYNGVDIIDLAKQQKPQIIAMGNVSFSCSQPQSMPVTFLSSRSYLALPDFSGEEEVSATFQFRTWNKAGLLLFSELQLISGGILLFLSDGKLKSNLYQPGKLPSDITAGVELNDGQWHSVSLSAKKNHLSVAVDGQMASAAPLLGPEQIYSGGTYYFGGCPDKSFGSKCKSPLGGFQGCMRLISISGKVVDLISVQQGSLGNFSDLQIDSCGISDRCLPNYCEHGGECSQSWSTFHCNCTNTGYRGATCHNSIYEQSCEAYKHRGNTSGFYYIDSDGSGPLEPFLLYCNMTETAWTIIQHNGSDLTRVRNTNPENPYAGFFEYVASMEQLQATINRAEHCEQEFTYYCKKSRLVNKQDGTPLSWWVGRTNETQTYWGGSSPDLQKCTCGLEGNCIDSQYYCNCDADRNEWTNDTGLLAYKEHLPVTKIVITDTGRLHSEAAYKLGPLLCQGDRSFWNSASFDTEASYLHFPTFHGELSADVSFFFKTTASSGVFLENLGIADFIRIELRSPTVVTFSFDVGNGPFEISVQSPTHFNDNQWHHVRVERNMKEASLQVDQLTPKTQPAPADGHVLLQLNSQLFVGGTATRQRGFLGCIRSLQLNGMTLDLEERAQVTPEVQPGCRGHCSSYGKLCRNGGKCRERPIGFFCDCTFSAYTGPFCSNEISAYFGSGSSVIYNFQENYLLSKNSSSHAASFHGDMKLSREMIKFSFRTTRTPSLLLFVSSFYKEYLSVIIAKNGSLQIRYKLNKYQEPDVVNFDFKNMADGQLHHIMINREEGVVFIEIDDNRRRQVHLSSGTEFSAVKSLVLGRILEHSDVDQDTALAGAQGFTGCLSAVQLSHVAPLKAALHPSHPDPVTVTGHVTESSCMAQPGTDATSRERTHSFADHSGTIDDREPLANAIKSDSAVIGGLIAVVIFILLCITAIAVRIYQQKRLYKRSEAKRSENVDSAEAVLKSELNIQNAVNENQKEYFF

SEQ ID NO: 8939 - DNA, 417 bp, Homo sapiens
caatatgccccatttcgctaacctccactgagccccaagctctgaagatcaaagtcaaagcacgaaatgaacgtgagagagctggaaagctaactacaaagcctctaaaagttacgtaacatgaagaaacacactcgattctgcctctcccattgaatagagcaataaaacatggacacaacacacaaagcagctatttgaggactctgagaaggaaatggcagcacacagattgggggagaagaccagaatttgaaatgctgctgaaccacagtagagtgatacaagatgtgaccgttgaagaatgctggatgaaaggcgactgccttcatggaacccgtatggactccgtgtatattttttgggtaatttcctatgactcagtaattatttcaaaataaaaatgtttaaaaagtg

SEQ ID NO: 8940 - protein, 47 aa, Homo sapiens
MLLNHSRVIQDVTVEECWMKGDCLHGTRMDSVYIFWVISYDSVIISK

SEQ ID NO: 8941 - DNA, 833 bp, Homo sapiens
ttggacatcagctggggctggagtcacctgcaggctggcctggggtcgggcagggggatctgcttccaaggctctgcttcagaggcggctccctcccacggtaggcgcatggtttcctgtctccaaagtgggcctctgcacaaggctgcttggatgacctcatgatatggtggctgctgaccagggtagaggctggaaccccttggatggcccaacctgggaggtactagccatgcctctgccattgggcccggccacacaggttcctgccctcttctccgctgcccttgtgcctcccgtgtcctcgctgcgtcctaaccaaatgctggactggcagagactgaaaacgccccacggggcccctgtggcttgctcactcgggctctccggagagtgggtgccaaccccctgcgccctgagcatcttggctctgcttggcttgcagctggatcccctttttggactttggggctgcacacgcaccttgttctggagcgaatgggctcgtgagagccgcaggccctgaggcatggcctaactcaggcagagtagttggcgaaggccccagagggacccaggctatcgtcctgcagctgccggccagtccatttggttaaactcacgagagtgtgtgcttgtcgatgtagctgattctgtatgggtggggatttggaccagcccttcatgcttaatccaaaacaccttccgcctcccagagcttgtggctttgatgccatttgtctgaacatcacaaggaaccacgtgggaaaacaggacttcgtggcgtgccctggcagacaagccaaagcaactgtgggcatcaggctgtgggg

SEQ ID NO: 8942 - protein, 57 aa, Homo sapiens [sequence omitted]

SEQ ID NO: 8943 - DNA, 1508 bp, Homo sapiens
aaaccacagacctcctttctggaaacatctgggtcgggactccccaccgaggggtcatagaccctcacttccagggtgtgccctgacctcagcatgactggggctggggcatatcctggagccccagataggaacccaaccagagtgaccgcggcaagcagggcagtgggtcccatggaaaactccgcctccgcttcccgttgcttggccacctgtcctcaatgccgggcaccccactaggcctccgggctgggcaacaacggccagagggatggtcactaaacccgtttcctcgctctggacacatggctaagcaacattttcaccccctcgctgcaggcgggggccacaggactggctccagtcagcgcaatgtaggtcgaggtgacgtcacctctgtgccatcctctgctcatcactagcagtggggaggccgaggctccgggaaaccggaccccgagtcaccttgtggaagacccactgagcaccccgttggacccgattgaaggagaatgcgcttcggctgcatcacgccactgaagacgcagggttacttgtgacagccgctgacctcacccaccctgcccagcacaccgcacctcgacaaggccaaggccaagaattgacctcctggagctcatcacgttctcagcgtgagactggaagcggaagccgagaggcaggaggtgaaaatgcctggtgcagagcggctgctccaaagtggaaccctggcagacgaaaggacacacaaaacgtggtcggaccactccatggactattcctcggcgagagaggaatgaggcactgacaccccctgcaacgcagtagaccctgacgacgctgctgagtgaaagcagccagacaccaaaggccgcagtgtgtgagccccccagcctgtgagccagaggctgaaccagttgagggacaaagaccagcccggcctgggttcctcatcgggcgactgccccaggaccttgccatgtccttcaccagcaaacggtgggtgcctcctgcagatgctgacagctccaccctccccacctccaagatttgctggggctgaaatgccccccacccccagattccaatgacccagcacaaatgccgcctctcccaggaagcctgcctggaccccatggaagaaaacatcccactcgctgatcatacgaactcgtctgactttaaacttcccaaagctgcccacgatgactgttgcagctccgaccggcccactcttaatttattttcacagtccccagtcctccgggccagccgcactacaataacctattgttaacatggaagtctccccatgtgggaacggacatttggaagaccatcctttgaacggacaccaggctcaccaagtccttgattcagtaacacggactgcggcagcaatttgaggggagatgaggcaccagccgggcacaaagacacagacaccccctttttatttgtcacagctgagttgtcatacattccctcgaataaatgttcccatctgg

SEQ ID NO: 8944 - protein, 69 aa, Homo sapiens
MTQHKCRLSQEACLDPMEENIPLADHTNSSDFKLPKAAHDDCCSSDRPTLNLFSQSPVLRASRTTITYC

SEQ ID NO: 8945 - DNA, 577 bp, Homo sapiens
tttcaccagcggccggggaggaggcatcactgctgccatccccattgcacagagggcgcctcgaagcatggggaggcatcatgctgggttggcattgctcccgagacttcaggtccaccacagactcagcacatgacctcctttggaaagtgggtctttgagatgtaattatgaccagatgaggtcatgctgggttaaggtgggtccccatccaaagactggtgtcctccgtagaaggccgcgtgaagacacacagagaaggtcacatgatggcagaggcagcgatcacagcgatgaagttcagtgatcggagagatggcttctaggagccaaggaaccccaaggactgtgggcaatgccagaaactggaagaaaggcccggacagattcccactctagctccagcagaaggaagccgtcccgctgacaccctgattccggacttcggatctccagaactgagccccccagcctgtgagccagaggctgaaccagttgagggacaaagaccagcccggcctgggttcctcatcgggcgactgccccaggaccttgccatgtccttcaccagcaaacg

SEQ ID NO: 8946 - protein, 42 aa, Homo sapiens
MRSCWVKVGPHPKTGVLRRRPREDTQRRSHDGRGSDHSDEVQ

SEQ ID NO: 8947 - DNA, 656 bp, Homo sapiens
agaatccggaaacaaagcctcggggaagaaccgcacctgacctccctcctgcctggtggaagctgtccacgctgccggcacagcccccggagggaaataaccaagcccgcccctgaggatctagaacctgctatcagcttcacagctgaatccaaattcccaaactcccaagtactggtgtacagtgaaggattaactgaactcacagaaagtctgacctttcccccggctcctggggcggtcacctctaggcccttgaagagtcccgcctgatgagagtgtctttgtttacctgagggcttagccaccctgaacagcctatgctaatgataagattcatggtggggccttgaaccacagggcatcagcttgacgtgcggaggtgctggaggttaaggtcagtcacatggtgtcagccgtgcccacgtgaccaaggcccagcaaagactctggacaccgaggctggcggagcgtccctggttggcaatgctgtgtgccatcacacgctgttgtcatgaggagttaacactgtccaggactccacggagagggacagctcgaagctctgtgctgggaaccctcctgggctcaccccatgggtccctccccttggctgacttaaacctgcatctgtaataaactataactgtgagtgc

SEQ ID NO: 8948 - protein, 49 aa, Homo sapiens
MLCAITRCCHEELTLSRTPRRGTARSSVLGTLLGSPHGSLPLADLNLHL

SEQ ID NO: 8949 - DNA, 579 bp, Homo sapiens
caccactgtctgctgagctgtgtgtgtcagaaacagagggaaccaggtgccagtccctcccctggcctagctcttcccactaccatgactcttgttgggagtgaaaggattttaccccctttctttgtcagcagctggcctggactcccaggggagcctggtcaatattaatggacacgcaaggctgtggggcacacagggttttgtgattatggattatctcctgctcagcaccatcttgaaggtggagacaaaagttctcagccagggccaggaattccaagcccacagtgggtctggatttaaagtactattgtgcctgggcctgtgatgtcagcatcccccactcccagggggccctggagaacatggcatctcagagcagttcaaggggctcaagcagactgggcctcggaggactggccaggctgggaaaatgccattgtttcctgaatttccctggaccgcagccaccacctttaaagctttagttagttaatggggaaggatgaaagggggaaatttaatagggttcttccaaataaatggggattcacagcccaccgctgaatagcctaa

SEQ ID NO: 8950 - protein, 39 aa, Homo sapiens
MDYLLLSTILKVETKVLSQGQEFQAHSGSGFKVLLCLGL

SEQ ID NO: 8951 - DNA, 657 bp, Homo sapiens
cctgttcccaggatggcctggagcagagccagcccagagatggggagagaagaaaaccagccagcgccccgcagaagggctgcgtgaggagtcccggcggcctgagtccccccagcctgcagagcccacagccctgtcccccggctggtgctgagccgtctcctgcgggcggtgtgtccccaaggcaaggcagagtgcatggcacgtgtatctcctcgcatggaccctgcctggaacatgtggtctctgctggcccaggcttgtcacggtactaaatctggagactgagccctctgcctctgtctgccccccgccgctgcctccagcttctggagctgtcatgttgagttcacgaggttccaaagtcaccttccatgcagggagccttcgggttctgactcagcctggggcctccccggagcaccagggtgcgggaggcaccacctgccatctggccccctctggaggacgcgcgtcagcctcacacctgcatcgcctttgccccgcttccctggggactggtggccctgggctgtgggactgcaatgtggaggaaggcgcacatcccctgctgccctcctgaaggtctgatttaaattcaggagcttcccctgggatcctcctcctccagcccgcatagaaggaggtgtgaggctt

SEQ ID NO: 8952 - protein, 80 aa, Homo sapiens [sequence omitted]

SEQ ID NO: 8953 - DNA, 2152 bp, Homo sapiens
gcagacttgatggctcccggccccccgacccggcccggcctggcggcgccgcaccggccacctcctgtctcacctgccgccactgcccgccgcgaccgccctctacacccggtgtcccgcgaccggaagagagcaaggccgcgccgcggagcaccacgggatcgaggaagactccgcccgcacccggccgcacggaggtcaccgtggagcggaaaagggtagcgctgcgaacgtcgtaaaatgccgggccgggctgctttccggcaggcgttggagaggctgctttccggcggcgccgggcgagaagcgcgactggagtctggggctgcggcttcccagaggcgcgagtcgcttttccaggagccgaggcccaaacggggccgggcctgaagggtcccccgccagcccgcggccgcgccatcaatcgccgccgcctcgtcccgcttctcggctgaggcgccgcgcggccaggcagcgggtccaggcctcagccgcgcgcccaggggcctccggggccctcccgggtcagcatgcccggggtgaaactgaccacccaggcctactgcaagatggtgctgcacggcgccaagtacccgcactgcgccgtcaacgggctcctggtggccgagaagcagaagccgcgtaaggagcacctccccctgggcggccccggcgcccaccacaccctcttcgtggactgcatccccctcttccacggcaccctggccctcgcccccatgctggaggtggctctcaccctgattgattcatggtgcaaagatcatagctacgtgattgctggttattatcaagctaatgagcgagtaaaggatgccagtccaaaccaggttgcagagaaggtggcctccagaatcgccgagggcttcagcgacactgcgctcatcatgtgactactgtgaagactggccagaggcacagaggatctcagcctcgctcctggacagccggtcctacgagacgctcgtggatttcgataaccacctggatgacattcggaatgactggacaaacccagagatcaataaagctgtcctacacttgtgctaggcaggcaccgctgtgactgggctccgggcctttccactacgttgaagaagaaaacctatttttaaatgtaaataaaatatcttgtagcctgtgtggaaagctgaccgttttaagaagtggcatgtgccttgaaagggggcagaatgttcagtcggtcgtgtttttaacacagagtctctagaagaggtgcagacatcccgtctgactgtccctgtggactctctcagttgtatgttgctataatcctccaaatcaaagctctttctgcttgtgcaagattgttcctattaaacagttttaactaaccttttataatctggagagaatactttttaaggcttttgaactatctttttttaaaaaaaaaaaaaaaagcccacatcttatactccaatgagtgtgtttgtgagtttttatcctgtttgaattttgatgtcgtccaggcgtcctgggatcagggtagacacgtggagtgctggtgctgagctgtttgagaagctctgtgtgggtgtttctgtggtcaggtaggctgggctgtgaacagcactgctccacatggtgtcggctcacagagccaccgcaactctgcccagcgggagtgacaccactgatgccacagaagcctttatcgttaggggcaaaagcagacatctctggtagcaggagctcagtgtggtgctcttcagccacgcagaaagctcacgtgcctgcagggccaggaaagggaaatgatcgtttcttttgtattaggaaaaacaagacttagacttcccgagttgtgcagagtgacgtctgtactttttatacttagaacatttggtcaagttttgtaaccaaaccttagggaattgagagggaaactttatggtacgtttaccttttttcctttttatatgaattattttgtacaaagttcagagagcggtacctttcctactgtcttttctttgactccatggaggaatttgtaacgatcggtgtgacctgaaagggtttgtgatacagcggtcactattttctcttaacacataggaaaaaagttcagacatcgctacaataaatgtgctttatttgatccaccaaa

SEQ ID NO: 8954 - protein, 126 aa, Homo sapiens
MPGVKLTTQAYCKMVLHGAKYPHCAVNGLLVAEKQKPRKEHLPLGGPGAHHTLFVDCIPLFHGTLALAPMLEVALTLIDSWCKDHSYVIAGYYQANERVKDASPNQVAEKVASRIAEGFSDTALIM

SEQ ID NO: 8955 - DNA, 2247 bp, Homo sapiens
gcagacttgatggctcccggccccccgacccggcccggcctggcggcgccgcaccggccacctcctgtctcacctgccgccactgcccgccgcgaccgccctctacacccggtgtcccgcgaccggaagagagcaaggccgcgccgcggagcaccacgggatcgaggaagactccgcccgcacccggccgcacggaggtcaccgtggagcggaaaagggtagcgctgcgaacgtcgtaaaatgccgggccgggctgctttccggcaggcgttggagaggctgctttccggcggcgccgggcgagaagcgcgactggagtctggggctgcggcttcccagaggcgcgagtcgcttttccaggagccgaggcccaaacggggccgggcctgaagggtcccccgccagcccgcggccgcgccatcaatcgccgccgcctcgtcccgcttctcggctgaggcgccgcgcggccaggcagcgggtccaggcctcagccgcgcgcccaggggcctccggggccctcccgggtcagcatgcccggggtgaaactgaccacccaggcctactgcaagatggtgctgcacggcgccaagtacccgcactgcgccgtcaacgggctcctggtggccgagaagcagaagccgcgtaaggagcacctccccctgggcggccccggcgcccaccacaccctcttcgtggactgcatccccctcttccacggcaccctggccctcgcccccatgctggaggtggctctcaccctgattgattcatggtgcaaagatcatagctacgtgattgctggttattatcaagctaatgagcgagtaaaggatgccagtccaaaccaggttgcagagaaggtggcctccagaatcgccgagggcttcagcgacactgcgctcatcatggtagacaacaccaagtttacgatggactgcgtagcgcctacgatccacgtgtacgagcaccatgagaacagatggcggtgcagagacccacaccatgactactgtgaagactggccagaggcacagaggatctcagcctcgctcctggacagccggtcctacgagacgctcgtggatttcgataaccacctggatgacattcggaatgactggacaaacccagagatcaataaagctgtcctacacttgtgctaggcaggcaccgctgtgactgggctccgggcctttccactacgttgaagaagaaaacctatttttaaatgtaaataaaatatcttgtagcctgtgtggaaagctgaccgttttaagaagtggcatgtgccttgaaagggggcagaatgttcagtcggtcgtgtttttaacacagagtctctagaagaggtgcagacatcccgtctgactgtccctgtggactctctcagttgtatgttgctataatcctccaaatcaaagctctttctgcttgtgcaagattgttcctattaaacagttttaactaaccttttataatctggagagaatactttttaaggcttttgaactatctttttttaaaaaaaaaaaaaaaagcccacatcttatactccaatgagtgtgtttgtgagtttttatcctgtttgaattttgatgtcgtccaggcgtcctgggatcagggtagacacgtggagtgctggtgctgagctgtttgagaagctctgtgtgggtgtttctgtggtcaggtaggctgggctgtgaacagcactgctccacatggtgtcggctcacagagccaccgcaactctgcccagcgggagtgacaccactgatgccacagaagcctttatcgttaggggcaaaagcagacatctctggtagcaggagctcagtgtggtgctcttcagccacgcagaaagctcacgtgcctgcagggccaggaaagggaaatgatcgtttcttttgtattaggaaaaacaagacttagacttcccgagttgtgcagagtgacgtctgtactttttatacttagaacatttggtcaagttttgtaaccaaaccttagggaattgagagggaaactttatggtacgtttaccttttttcctttttatatgaattattttgtacaaagttcagagagcggtacctttcctactgtcttttctttgactccatggaggaatttgtaacgatcggtgtgacctgaaagggtttgtgatacagcggtcactattttctcttaacacataggaaaaaagttcagacatcgctacaataaatgtgctttatttgatccaccaaa

SEQ ID NO: 8956 - protein, 210 aa, Homo sapiens; identical to SEQ ID NO: 1101

SEQ ID NO: 8957 - DNA, 1555 bp, Homo sapiens
gcagacttgatggctcccggccccccgacccggcccggcctggcggcgccgcaccggccacctcctgtctcacctgccgccactgcccgccgcgaccgccctctacacccggtgtcccgcgaccggaagagagcaaggccgcgccgcggagcaccacgggatcgaggaagactccgcccgcacccggccgcacggaggtcaccgtggagcggaaaagggtagcgctgcgaacgtcgtaaaatgccgggccgggctgctttccggcaggcgttggagaggctgctttccggcggcgccgggcgagaagcgcgactggagtctggggctgcggcttcccagaggcgcgagtcgcttttccaggagccgaggcccaaacggggccgggcctgaagggtcccccgccagcccgcggccgcgccatcaatcgccgccgcctcgtcccgcttctcggctgaggcgccgcgcggccaggcagcgggtccaggcctcagccgcgcgcccaggggcctccggggccctcccgggtcagcatgcccggggtgaaactgaccacccaggcctactgcaagatggtgctgcacggcgccaagtacccgcactgcgccgtcaacgggctcctggtggccgagaagcagaagccgcgtaaggagcacctccccctgggcggccccggcgcccaccacaccctcttcgtggactgcatccccctcttccacggcaccctggccctcgcccccatgctggaggtggctctcaccctgattgattcatggtgcaaagatcatagctacgtgattgctggttattatcaagctaatgagcgagtaaaggatgccagtccaaaccaggttgcagagaaggtggcctccagaatcgccgagggcttcagcgacactgcgctcatcatggtagacaacaccaagtttacgatggactgcgtagcgcctacgatccacgtgtacgagcaccatgagaacagatggcggtgcagagacccacaccatgactactgtgaagactggccagaggcacagaggatctcagcctcgctcctggacagccggtcctacgagacgctcgtggatttcgataaccacctggatgacattcggaatgactggacaaacccagagatcaataaagctgtcctacacttgtgctaggcaggcaccgctgtgactgggctccgggcctttccactacgttgaagaagaaaacctatttttaaatgtaaataaaatatcttgtagcctgtgtggaaagctgaccgttttaagaagtggcatgtgccttgaaagggggcagaatgttcagtcggtcgtgtttttaacacagagtctctagaagaggtgcagacatcccgtctgactgtccctgtggactctctcagttgtatgttgctataatcctccaaatcaaagctctttctgcttgtgcaagattgttcctattaaacagttttaactaaccttttataatctggagagaatactttttaaggcttttgaactatctttttttaaaaaaaaaaaaaaaagcccacatcttatactcc

SEQ ID NO: 8958 - protein, 210 aa, Homo sapiens; identical to SEQ ID NO: 1101

SEQ ID NO: 8959 - DNA, 1460 bp, Homo sapiens
gcagacttgatggctcccggccccccgacccggcccggcctggcggcgccgcaccggccacctcctgtctcacctgccgccactgcccgccgcgaccgccctctacacccggtgtcccgcgaccggaagagagcaaggccgcgccgcggagcaccacgggatcgaggaagactccgcccgcacccggccgcacggaggtcaccgtggagcggaaaagggtagcgctgcgaacgtcgtaaaatgccgggccgggctgctttccggcaggcgttggagaggctgctttccggcggcgccgggcgagaagcgcgactggagtctggggctgcggcttcccagaggcgcgagtcgcttttccaggagccgaggcccaaacggggccgggcctgaagggtcccccgccagcccgcggccgcgccatcaatcgccgccgcctcgtcccgcttctcggctgaggcgccgcgcggccaggcagcgggtccaggcctcagccgcgcgcccaggggcctccggggccctcccgggtcagcatgcccggggtgaaactgaccacccaggcctactgcaagatggtgctgcacggcgccaagtacccgcactgcgccgtcaacgggctcctggtggccgagaagcagaagccgcgtaaggagcacctccccctgggcggccccggcgcccaccacaccctcttcgtggactgcatccccctcttccacggcaccctggccctcgcccccatgctggaggtggctctcaccctgattgattcatggtgcaaagatcatagctacgtgattgctggttattatcaagctaatgagcgagtaaaggatgccagtccaaaccaggttgcagagaaggtggcctccagaatcgccgagggcttcagcgacactgcgctcatcatgtgactactgtgaagactggccagaggcacagaggatctcagcctcgctcctggacagccggtcctacgagacgctcgtggatttcgataaccacctggatgacattcggaatgactggacaaacccagagatcaataaagctgtcctacacttgtgctaggcaggcaccgctgtgactgggctccgggcctttccactacgttgaagaagaaaacctatttttaaatgtaaataaaatatcttgtagcctgtgtggaaagctgaccgttttaagaagtggcatgtgccttgaaagggggcagaatgttcagtcggtcgtgtttttaacacagagtctctagaagaggtgcagacatcccgtctgactgtccctgtggactctctcagttgtatgttgctataatcctccaaatcaaagctctttctgcttgtgcaagattgttcctattaaacagttttaactaaccttttataatctggagagaatactttttaaggcttttgaactatctttttttaaaaaaaaaaaaaaaagcccacatcttatactcc

SEQ ID NO: 8960 - protein, 126 aa, Homo sapiens; identical to SEQ ID NO: 8954

SEQ ID NO: 8961 - DNA, 1379 bp, Homo sapiens
gcagacttgatggctcccggccccccgacccggcccggcctggcggcgccgcaccggccacctcctgtctcacctgccgccactgcccgccgcgaccgccctctacacccggtgtcccgcgaccggaagagagcaaggccgcgccgcggagcaccacgggatcgaggaagactccgcccgcacccggccgcacggaggtcaccgtggagcggaaaagggtagcgctgcgaacgtcgtaaaatgccgggccgggctgctttccggcaggcgttggagaggctgctttccggcggcgccgggcgagaagcgcgactggagtctggggctgcggcttcccagaggcgcgagtcgcttttccaggagccgaggcccaaacggggccgggcctgaagggtcccccgccagcccgcggccgcgccatcaatcgccgccgcctcgtcccgcttctcggctgaggcgccgcgcggccaggcagcgggtccaggcctcagccgcgcgcccaggggcctccggggccctcccgggtcagcatgcccggggtgaaactgaccacccaggcctactgcaagatggtgctgcacggcgccaagtacccgcactgcgccgtcaacgggctcctggtggccgagaagcagaagccgcgtaaggagcacctccccctgggcggccccggcgcccaccacaccctcttcgtggactgcatccccctcttccacggcaccctggccctcgcccccatgctggaggtggctctcaccctgattgattcatggtgcaaagatcatagctacgtgattgctggttattatcaagctaatgagcgagtaaaggatgccagtccaaaccaggttgcagagaaggtggcctccagaatcgccgagggcttcagcgacactgcgctcatcatgtgactactgtgaagactggccagaggcacagaggatctcagcctcgctcctggacagccggtcctacgagacgctcgtggatttcgataaccacctggatgacattcggaatgactggacaaacccagagatcaataaagctgtcctacacttgtgctaggcaggcaccgctgtgactgggctccgggcctttccactacgttgaagaagaaaacctatttttaaatgtaaataaaatatcttgtagcctgtgtggaaagctgaccgttttaagaagtggcatgtgccttgaaagggggcagaatgttcagtcggtcgtgtttttaacacagagtctctagaagaggtgcagacatcccgtctgactgtccctgtggactctctcagttgtatgttgctataatcctccaaatcaaagctctttctgcttgtgcaagattgttcctattaaacagttttaactaacctttt

SEQ ID NO: 8962 - protein, 126 aa, Homo sapiens; identical to SEQ ID NO: 8954

SEQ ID NO: 8963 - DNA, 1474 bp, Homo sapiens
gcagacttgatggctcccggccccccgacccggcccggcctggcggcgccgcaccggccacctcctgtctcacctgccgccactgcccgccgcgaccgccctctacacccggtgtcccgcgaccggaagagagcaaggccgcgccgcggagcaccacgggatcgaggaagactccgcccgcacccggccgcacggaggtcaccgtggagcggaaaagggtagcgctgcgaacgtcgtaaaatgccgggccgggctgctttccggcaggcgttggagaggctgctttccggcggcgccgggcgagaagcgcgactggagtctggggctgcggcttcccagaggcgcgagtcgcttttccaggagccgaggcccaaacggggccgggcctgaagggtcccccgccagcccgcggccgcgccatcaatcgccgccgcctcgtcccgcttctcggctgaggcgccgcgcggccaggcagcgggtccaggcctcagccgcgcgcccaggggcctccggggccctcccgggtcagcatgcccggggtgaaactgaccacccaggcctactgcaagatggtgctgcacggcgccaagtacccgcactgcgccgtcaacgggctcctggtggccgagaagcagaagccgcgtaaggagcacctccccctgggcggccccggcgcccaccacaccctcttcgtggactgcatccccctcttccacggcaccctggccctcgcccccatgctggaggtggctctcaccctgattgattcatggtgcaaagatcatagctacgtgattgctggttattatcaagctaatgagcgagtaaaggatgccagtccaaaccaggttgcagagaaggtggcctccagaatcgccgagggcttcagcgacactgcgctcatcatggtagacaacaccaagtttacgatggactgcgtagcgcctacgatccacgtgtacgagcaccatgagaacagatggcggtgcagagacccacaccatgactactgtgaagactggccagaggcacagaggatctcagcctcgctcctggacagccggtcctacgagacgctcgtggatttcgataaccacctggatgacattcggaatgactggacaaacccagagatcaataaagctgtcctacacttgtgctaggcaggcaccgctgtgactgggctccgggcctttccactacgttgaagaagaaaacctatttttaaatgtaaataaaatatcttgtagcctgtgtggaaagctgaccgttttaagaagtggcatgtgccttgaaagggggcagaatgttcagtcggtcgtgtttttaacacagagtctctagaagaggtgcagacatcccgtctgactgtccctgtggactctctcagttgtatgttgctataatcctccaaatcaaagctctttctgcttgtgcaagattgttcctattaaacagttttaactaacctttt

SEQ ID NO: 8964 - protein, 210 aa, Homo sapiens; identical to SEQ ID NO: 1101

SEQ ID NO: 8965 - DNA, 629 bp, Homo sapiens
ccggcggcgccgggcgagaagcgcgactggagtctggggctgcggcttcccagaggcgcgagtcgcttttccaggagccgaggcccaaacggggccgggcctgaagggtcccccgccagcccgcggccgcgccatcaatcgccgccgcctcgtcccgcttctcggctgaggcgccgcgcggccaggcagcgggtccaggcctcagccgcgcgcccaggggcctccggggccctcccgggtcagcatgcccggggtgaaactgaccacccaggcctactgcaagatggtgctgcacggcgccaagtacccgcactgcgccgtcaacgggctcctggtggccgagaagcagaagccgcgtaaggagcacctccccctgggcggccccggcgcccaccacaccctcttcgtggactgcatccccctcttccacggcaccctggccctcgcccccatgctggaggtggctctcaccctgattgattcatggtgcaaagatcatagctacgtgattgctggttattatcaagctaatgagcgagtaaaggatgccaggtacgtggatgcagaaccctctgtgggcgaggaagtgagcacgtgttgggcagaccccgtctctcgtgtgcttttcg

SEQ ID NO: 8966 - protein, 127 aa, Homo sapiens
MPGVKLTTQAYCKMVLHGAKYPHCAVNGLLVAEKQKPRKEHLPLGGPGAHHTLFVDCIPLFHGTLALAPMLEVALTLIDSWCKDHSYVIAGYYQANERVKDARYVDAEPSVGEEVSTCWADPVSRVL

SEQ ID NO: 8967 - DNA, 408 bp, Homo sapiens
caagttagctgtatggatggctatgaggggtgcacacagcccgttcaccaactgaggaatggagaactcgaagggaggaacggagactcggccaagcctcagcactcacagcggcagggtggatgagttctaataagggtagtttcctgtgacagtccggaatctggaactaggcatcagcccaaatggctcctgcatgaaaagctgcggtggatctaagtggcagctaggagtcaaggcaactagcttcctccgaagcgaggcaagacaaggcacagccgagaagccactcaacctctgttcccaatgaatccatttccatgtccctgcttcgctgtacgacaccccacaccctgatgtgcatcttgtgaaaaatcaagatgaaaataaaaggtcaggagaaaactc

SEQ ID NO: 8968 - protein, 37 aa, Homo sapiens
MDGYEGCTQPVHQLRNGELEGRNGDSAKPQHSQRQGG

SEQ ID NO: 8969 - DNA, 1048 bp, Homo sapiens
cagggtgagagccacctccagcatgggggcgagggccagggtgccgtggaagagggggatgcagtccacgaagagggtgtggtgggcgccggggccgcccagggggaggtgctccttacgcggcttctgcttctcggccaccaggagcccgttgacggcgcagtgcgggtacttggcgccgtgcagcaccatcttgcagtaggcctgggtggtcagtttcaccccgggcatgctgacccgggagggccccggaggcccctgggcgcgcggctgaggcctggacccgctgcctggccgcgcggcgcctcagccgagaagcgggacgaggcggcggcgattgatggcgcggccgcgggctggcgggggacccttcaggcccggccccgtttgggcctcggctcctggaaaagcgactcgcgcctctgggaagccgcagccccagactccagtcgcgcttctcgcccggcgccgccggaaagcagcctctccaacgcctgccggaaagcagcccggcccggcattttacgacgttcgcagcgctacccttttccgctccacggtgacctccgtgcggccgggtgcgggcggagtcttcctcgatcccgtggtgctccgcggcgcggccttgctctcttccggtcgcgggacaccgggtgtagagggcggtcgcggcgggcagtggcggcaggtgagacaggaggtggccggtgcggcgccgccaggccgggccgggtcggggggccgggagccatcaagtctgcacgtccgcagcctggccgctcggcttcagcaggaagcaccgaatgggcctcggagccaggtgacattgaggccggcccgtggggactccgggctcggtggctccaggctcggggggccgccccgaagtgcccggtccatcttacccggtctcgcagcggctgcggaccggcctcgggcactgaccttggagcgcccgctggccgagggctcaggctgcggggaggcgggcccgcgctctgtgcctgcagcctccgcccttgctccttcaaaagggattggaaattga

SEQ ID NO: 8970 - protein, 235 aa, Homo sapiens [sequence omitted]

SEQ ID NO: 8971 - DNA, 805 bp, Homo sapiens
acgacgttcgcagcgctacccttttccgctccacggtgacctccgtgcggccgggtgcgggcggagtcttcctcgatcccgtggtgctccgcggcgcggccttgctctcttccggtcgcgggacaccgggtgtagagggcggtcgcggcgggcagtggcggcagaatgttggctaccagggtatttagcctagttggcaagcgagcaatttccacctctgtgtgtgtacgagctcatgaaagtgttgtgaagagcgaagacttttcgctcccagcttatatggatcggcgtgaccaccccttgccggaggtggcccatgtcaagcacctgtctgccagccagaaggcattgaaggagaaggagaaggcctcctggagcagcctctccatggatgagaaagtcgagttgtatcgcattaagttcaaggagagctttgctgagatgaacaggggctcgaacgagtggaagacggttgtgggcggtgccatgttcttcatcggtttcaccgcgctcgttatcatgtggcagaagcactatgtgtacggccccctcccgcaaagctttgacaaagagtgggtggccaagcagaccaagaggatgctggacatgaaggtgaaccccatccagggcttagcctccaagtgggactacgaaaagaacgagtggaagaagtgagagatgctggcctgcgcctgcacctgcgcctggctctgtcaccgccatgcaactccatgcctatttactggaaacctgttatgccaaacagttgtaccactgctaataaatgaccagtttacctgaaacc

SEQ ID NO: 8972 - protein, 169 aa, Homo sapiens; identical to SEQ ID NO: 1105

SEQ ID NO: 8973 - DNA, 1083 bp, Homo sapiens
gacgttcgcagcgctacccttttccgctccacggtgacctccgtgcggccgggtgcgggcggagtcttcctcgatcccgtggtgctccgcggcgcggccttgctctcttccggtcgcgggacaccgggtgtagagggcggtcgcggcgggcagtggcggcagaatgttggctaccagggtatttagcctagttggcaagcgagcaatttccacctctgtgtgtgtacgagctcatgaaagtgttgtgaagagcgaagacttttcgctcccagcttatatggatcggcgtgaccaccccttgccggaggtggcccatgtcaagcacctgtctgccagccagaaggcattgaaggagaaggagaaggcctcctggagcagcctctccatggatgagaaagtcgagttgtatcgcattaagttcaaggagagctttgctgagatgaacaggggctcgaacgagtggaagacggttgtgggcggtgccatgttcttcatcggtttcaccgcgctcgttatcatgtggcagaagcactatggtcaccttgggctctgtttgtcagatcctgttatccatagcctttagagaggaccttctgcttttagcttattttgttgctaactttttacaaacaaagggctaattttaaaatgtcagtgttgtcagtggtcagaaaccgtgtgtttgagcgggtgttgagtggcaggtggctctgctgacctggtggctggtgtgtcgggaggatttaacctgtgtgagggattggcctagaaacaacctgttgagatagtcttgccccataacctgtctcacaccgtagtgtacggccccctcccgcaaagctttgacaaagagtgggtggccaagcagaccaagaggatgctggacatgaaggtgaaccccatccagggcttagcctccaagtgggactacgaaaagaacgagtggaagaagtgagagatgctggcctgcgcctgcacctgcgcctggctctgtcaccgccatgcaactccatgcctatttactggaaacctgttatgccaaacagttgtaccactgctaataaatgaccagtttacctgaaa

SEQ ID NO: 8974 - protein, 139 aa, Homo sapiens
MLATRVFSLVGKRAISTSVCVRAHESVVKSEDFSLPAYMDRRDHPLPEVAHVKHLSASQKALKEKEKASWSSLSMDEKVELYRIKFKESFAEMNRGSNEWKTVVGGAMFFIGFTALVIMWQKHYGHLGLCLSDPVIHSL

SEQ ID NO: 8975 - DNA, 1810 bp, Homo sapiens
tccgctccacggtgacctccgtgcggccgggtgcgggcggagtcttcctcgatcccgtggtgctccgcggcgcggccttgctctcttccggtcgcgggacaccgggtgtagagggcggtcgcggcgggcagtggcggcagaatgttggctaccagggtatttagcctagttggcaagcgagcaatttccacctctgtgtgtgtacgagctcatgaaagtgttgtgaagagcgaagacttttcgctcccagcttatatggatcggcgtgaccaccccttgccggaggtggcccatgtcaagcacctgtctgccagccagaaggcattgaaggagaaggagaaggcctcctggagcagcctctccatggatgagaaagtcgagtgtgggtattgaagggacccacaggcgcgcccagcagctctcggaagcctctgtgtttcctccttcacaagtgtggttttggggagaagtggttgaatgttgcagaggagggagctgctgacctttgtgcctgtaaatggctgtcctctctgcccccagtgtatcgcattaagttcaaggagagctttgctgagatgaacaggggctcgaacgagtggaagacggttgtgggcggtgccatgttcttcatcggtttcaccgcgctcgttatcatgtggcagaagcactatggtgagtagagagggaggaaggcatgggcgcctggactggggctccagcctgcagtgcccattggtgggctgtcggggacctccataccttgaggctatgagatagggactgcattccagagttcatctcaggattgtttccaggccttggtgacctggagaactgaagtcgtgggaggttagtttataagccagcatctgattattcatagccatgcttgttgggtggtgaaataccttaactactttgtacagcacaccacgttttcagtagcaatttatgtgctcaccagtcacttagcgaaagatgacttcgtgaaggttcgagcaaggataaggggactcattcattgaatgactgtctggactgttgtgaggactgcatctcaacagccagcatctgggggtcccgacctgatagtttgtgtgtgggcattgccgggttgctcgctcgtggtaatgactcttccccgaggttctttctgtccaggcagaacaggcatttttgcattctgaataggtatattctcgtacttttggtttgaatgtggatgtgggttaataacagacccgaatctatttgatcttccaggtcaccttgggctctgtttgtcagatcctgttatccatagcctttagagaggaccttctgcttttagcttattttgttgctaactttttacaaacaaagggctaattttaaaatgtcagtgttgtcagtggtcagaaaccgtgtgtttgagcgggtgttgagtggcaggtggctctgctgacctggtggctggtgtgtcgggaggatttaacctgtgtgagggattggcctagaaacaacctgttgagatagtcttgccccataacctgtctcacaccgtagtgtacggccccctcccgcaaagctttgacaaagagtgggtggccaagcagaccaagaggatgctggacatgaaggtgaaccccatccagggcttagcctccaagtgggactacgaaaagaacgagtggaagaagtgagagatgctggcctgcgcctgcacctgcgcctggctctgtcaccgccatgcaactccatgcctatttactggaaacctgttatgccaaacagttgtaccactgctaataaatgaccagtttacctgaaa

SEQ ID NO: 8976 - protein, 83 aa, Homo sapiens
MLATRVFSLVGKRAISTSVCVRAHESVVKSEDFSLPAYMDRRDHPLPEVAHVKHLSASQKALKEKEKASWSSLSMDEKVECGY

SEQ ID NO: 8977 - DNA, 2271 bp, Homo sapiens
cggtgacctccgtgcggccgggtgcgggcggagtcttcctcgatcccgtggtgctccgcggcgcggccttgctctcttccggtcgcgggacaccgggtgtagagggcggtcgcggcgggcagtggcggcagaatgttggctaccagggtatttagcctagttggcaagcgagcaatttccacctctgtgtgtgtacgagctcatgaaagtgttgtgaagagcgaagacttttcgctcccagcttatatggatcggcgtgaccaccccttgccggaggtggcccatgtcaagcacctgtctgccagccagaaggcattgaaggagaaggagaaggcctcctggagcagcctctccatggatgagaaagtcgagtgtgggtattgaagggacccacaggcgcgcccagcagctctcggaagcgtgtgtgtgacagagcctctgctcacttctgggcctactgtctagaggcagtcttgcacaggagggttgctctgctgggtttcggggtcactgtgccagggccccagtttatgtgctcaccagtcacttagctctgccagctgacaggatcttttgctaggcccccttctctgtgctgagtggaggtagcctctcagcatatctgctgggtaagacatagttaactgtaaattattgaaagaaactcagcaaaatgcatagtgtttggtatgaaaggggcagaaaaataacaagattaaatagaccctaatactgtaattcaagtaagaaataattttgcagttttaatttgcacctgaagcgaactgtatgcattttcttctttccttgccctgtcacatgcctgcgtgggcacgtgtgtgcacgtacgtgcgtgaacatgatgtggcctgggttggtgtatccttcagctctgtgtttcctccttcacaagtgtggttttggggagaagtggttgaatgttgcagaggagggagctgctgacctttgtgcctgtaaatggctgtcctctctgcccccagtgtatcgcattaagttcaaggagagctttgctgagatgaacaggggctcgaacgagtggaagacggttgtgggcggtgccatgttcttcatcggtttcaccgcgctcgttatcatgtggcagaagcactatggtgagtagagagggaggaaggcatgggcgcctggactggggctccagcctgcagtgcccattggtgggctgtcggggacctccataccttgaggctatgagatagggactgcattccagagttcatctcaggattgtttccaggccttggtgacctggagaactgaagtcgtgggaggttagtttataagccagcatctgattattcatagccatgcttgttgggtggtgaaataccttaactactttgtacagcacaccacgttttcagtagcaatttatgtgctcaccagtcacttagcgaaagatgacttcgtgaaggttcgagcaaggataaggggactcattcattgaatgactgtctggactgttgtgaggactgcatctcaacagccagcatctgggggtcccgacctgatagtttgtgtgtgggcattgccgggttgctcgctcgtggtaatgactcttccccgaggttctttctgtccaggcagaacaggcatttttgcattctgaataggtatattctcgtacttttggtttgaatgtggatgtgggttaataacagacccgaatctatttgatcttccaggtcaccttgggctctgtttgtcagatcctgttatccatagcctttagagaggaccttctgcttttagcttattttgttgctaactttttacaaacaaagggctaattttaaaatgtcagtgttgtcagtggtcagaaaccgtgtgtttgagcgggtgttgagtggcaggtggctctgctgacctggtggctggtgtgtcgggaggatttaacctgtgtgagggattggcctagaaacaacctgttgagatagtcttgccccataacctgtctcacaccgtagtgtacggccccctcccgcaaagctttgacaaagagtgggtggccaagcagaccaagaggatgctggacatgaaggtgaaccccatccagggcttagcctccaagtgggactacgaaaagaacgagtggaagaagtgagagatgctggcctgcgcctgcacctgcgcctggctctgtcaccgccatgcaactccatgcctatttactggaaacctgttatgccaaacagttgtaccactgctaataaatgaccagtttacctgaaa

SEQ ID NO: 8978 - protein, 83 aa, Homo sapiens; identical to SEQ ID NO: 8976

SEQ ID NO: 8979 - DNA, 347 bp, Homo sapiens
ctcgatcccgtggtgctccgcggcgcggccttgctctcttccggtcgcgggacaccgggtgtagagggcggtcgcggcgggcagtggcggcagaatgttggctaccagggtatttagcctagttggcaacagaccaagaggatgctggacatgaaggtgaaccccatccagggcttagcctccaagtgggactacgaaaagaacgagtggaagaagtgagagatgctggcctgcgcctgcacctgcgcctggctctgtcaccgccatgcaactccatgcctatttactggaaacctgttatgccaaacagttgtaccactgctaataaatgaccagtttacctgaaa

SEQ ID NO: 8980 - protein, 40 aa, Homo sapiens
MLACACTCAWLCHRHATPCLFTGNLLCQTVVPLLINDQFT

SEQ ID NO: 8981 - DNA, 2087 bp, Homo sapiens
ggtcgcgggacaccgggtgtagagggcggtcgcggcgggcagtggcggcagaatgttggctaccagggtatttagcctagttggcaagcgagcaatttccacctctgtgtgtgtacgagctcatgaaagtgttgtgaagagcgaagacttttcgctcccacagcctctccatggatgagaaagtcgagtgtgggtattgaagggacccacaggcgcgcccagcagctctcggaagcgtgtgtgtgacagagcctctgctcacttctgggcctactgtctagaggcagtcttgcacaggagggttgctctgctgggtttcggggtcactgtgccagggccccagtttatgtgctcaccagtcacttagctctgccagctgacaggatcttttgctaggcccccttctctgtgctgagtggaggtagcctctcagcatatctgctgggtaagacatagttaactgtaaattattgaaagaaactcagcaaaatgcatagtgtttggtatgaaaggggcagaaaaataacaagattaaatagaccctaatactgtaattcaagtaagaaataattttgcagttttaatttgcacctgaagcgaactgtatgcattttcttctttccttgccctgtcacatgcctgcgtgggcacgtgtgtgcacgtacgtgcgtgaacatgatgtggcctgggttggtgtatccttcagctctgtgtttcctccttcacaagtgtggttttggggagaagtggttgaatgttgcagaggagggagctgctgacctttgtgcctgtaaatggctgtcctctctgcccccagtgtatcgcattaagttcaaggagagctttgctgagatgaacaggggctcgaacgagtggaagacggttgtgggcggtgccatgttcttcatcggtttcaccgcgctcgttatcatgtggcagaagcactatggtgagtagagagggaggaaggcatgggcgcctggactggggctccagcctgcagtgcccattggtgggctgtcggggacctccataccttgaggctatgagatagggactgcattccagagttcatctcaggattgtttccaggccttggtgacctggagaactgaagtcgtgggaggttagtttataagccagcatctgattattcatagccatgcttgttgggtggtgaaataccttaactactttgtacagcacaccacgttttcagtagcaatttatgtgctcaccagtcacttagcgaaagatgacttcgtgaaggttcgagcaaggataaggggactcattcattgaatgactgtctggactgttgtgaggactgcatctcaacagccagcatctgggggtcccgacctgatagtttgtgtgtgggcattgccgggttgctcgctcgtggtaatgactcttccccgaggttctttctgtccaggcagaacaggcatttttgcattctgaataggtatattctcgtacttttggtttgaatgtggatgtgggttaataacagacccgaatctatttgatcttccaggtcaccttgggctctgtttgtcagatcctgttatccatagcctttagagaggaccttctgcttttagcttattttgttgctaactttttacaaacaaagggctaattttaaaatgtcagtgttgtcagtggtcagaaaccgtgtgtttgagcgggtgttgagtggcaggtggctctgctgacctggtggctggtgtgtcgggaggatttaacctgtgtgagggattggcctagaaacaacctgttgagatagtcttgccccataacctgtctcacaccgtagtgtacggccccctcccgcaaagctttgacaaagagtgggtggccaagcagaccaagaggatgctggacatgaaggtgaaccccatccagggcttagcctccaagtgggactacgaaaagaacgagtggaagaagtgagagatgctggcctgcgcctgcacctgcgcctggctctgtcaccgccatgcaactccatgcctatttactggaaacctgttatgccaaacagttgtaccactgctaataaatgaccagtttacctgaaa

SEQ ID NO: 8982 - protein, 41 aa, Homo sapiens
MLATRVFSLVGKRAISTSVCVRAHESVVKSEDFSLPQPLHG

SEQ ID NO: 8983 - DNA, 644 bp, Homo sapiens
gggacaccgggtgtagagggcggtcgcggcgggcagtggcggcagaatgttggctaccagggtatttagcctagttggcaagcgagcaatttccacctctgtgtgtgtacgagctcatgaaagtgttgtgaagagcgaagacttttcgctcccagcttatatggatcggcgtgaccaccccttgccggaggtggcccatgtcaagcacctgtctgccagccagaaggcattgaaggagaaggagaaggcctcctggagcagcctctccatggatgagaaagtcgagtgtgggtattgaagggacccacaggcgcgcccagcagctctcggaagcgttgtatcgcattaagttcaaggagagctttgctgagatgaacaggggctcgaacgagtggaagacggttgtgggcggtgccatgttcttcatcggtttcaccgcgctcgttatcatgtggcagaagcactatgggcttagcctccaagtgggactacgaaaagaacgagtggaagaagtgagagatgctggcctgcgcctgcacctgcgcctggctctgtcaccgccatgcaactccatgcctatttactggaaacctgttatgccaaacagttgtaccactgctaataaatgaccagtttacctgaaa

SEQ ID NO: 8984 - protein, 118 aa, Homo sapiens
MRKSSVGIEGTHRRAQQLSEALYRIKFKESFAEMNRGSNEWKTVVGGAMFFIGFTALVIMWQKHYGLSLQVGLRKERVEEVRDAGLRLHLRLALSPPCNSMPIYWKPVMPNSCTTANK

SEQ ID NO: 8985 - DNA, 773 bp, Homo sapiens
ggtgagacaggaggtggccggtgcggcgccgccaggccgggccgggtcggggggccgggagccatcaagtctgcacgtccgcagcctggccgctcggcttcagcaggaagcaccgaatgggcctcggagccagaatgttggctaccagggtatttagcctagttggcaagcgagcaatttccacctctgtgtgtgtacgagctcatgaaagtgttgtgaagagcgaagacttttcgctcccagcttatatggatcggcgtgaccaccccttgccggaggtggcccatgtcaagcacctgtctgccagccagaaggcattgaaggagaaggagaaggcctcctggagcagcctctccatggatgagaaagtcgagttgtatcgcattaagttcaaggagagctttgctgagatgaacaggggctcgaacgagtggaagacggttgtgggcggtgccatgttcttcatcggtttcaccgcgctcgttatcatgtggcagaagcactatgtgtacggccccctcccgcaaagctttgacaaagagtgggtggccaagcagaccaagaggatgctggacatgaaggtgaaccccatccagggcttagcctccaagtgggactacgaaaagaacgagtggaagaagtgagagatgctggcctgcgcctgcacctgcgcctggctctgtcaccgccatgcaactccatgcctatttactggaaacctgttatgccaaacagttgtaccactgctaataaatgaccagtttacctgaaac

SEQ ID NO: 8986 - protein, 175 aa, Homo sapiens
MGLGARMLATRVFSLVGKRAISTSVCVRAHESVVKSEDFSLPAYMDRRDHPLPEVAHVKHLSASQKALKEKEKASWSSLSMDEKVELYRIKFKESFAEMNRGSNEWKTVVGGAMFFIGFTALVIMWQKHYVYGPLPQSFDKEWVAKQTKRMLDMKVNPIQGLASKWDYEKNEWKK

SEQ ID NO: 8987 - DNA, 594 bp, Homo sapiens
caccacgttttcagtagcaatttatgtgctcaccagtcacttagcgaaagatgacttcgtgaaggttcgagcaaggataaggggactcattcattgaatgactgtctggactgttgtgaggactgcatctcaacagccagcatctgggggtcccgacctgatagtttgtgtgtgggcattgccgggttgctcgctcgtggtaatgactcttccccgaggttctttctgtccaggcagaacaggcatttttgcattctgaataggtatattctcgtacttttggtttgaatgtggatgtgggttaataacagacccgaatctatttgatcttccaggtcaccttgggctctgtttgtcagatcctgttatccatagcctttagagaaggatgctggacatgaaggtgaaccccatccagggcttagcctccaagtgggactacgaaaagaacgagtggaagaagtgagagatgctggcctgcgcctgcacctgcgcctggctctgtcaccgccatgcaactccatgcctatttactggaaacctgttatgccaaacagttgtaccactgctaataaatgaccagtttacctgaaa

SEQ ID NO: 8988 - protein, 53 aa, Homo sapiens
MTVWTVVRTASQQPASGGPDLIVCVWALPGCSLVVMTLPRGSFCPGRTGIFAF

SEQ ID NO: 8989 - DNA, 895 bp, Homo sapiens
ctaccgcctctgtgactaccgcctctatgaccgacgctgttactacgactgtagccattgttcctaccgcctctgtgactaccgcctctatgaccgacgctggtactacgactgtagccattgttcctaccgcctctgtgactaccgcctctatgaccgacgctggtactacgactgtagccattgttcctaccgcctctgtgactaccgcctctatgaccgacgctggtactacgactgtagccattgttcctaccgcctctgtgactaccgcctctatgaccgacgctggtactacgactgtagccattgttcctaccgcctctgtgactaccgcctctgtgaccgacgctggtactacgactgtagccattgttcctaccgcctctgtgactaccgcctctgtgaccgacgctggtactacgactgtagccattgttcctaccgcctctgtgactaccgcctctgtgaccgacgctggtactacgactgtagccattgttcctaccgcctctgtgactaccgcctctgtgaccgacgctggtactacgactgtagccattgttcctgccgcctctgtgactaccgcctctgtgaccgacgctggtactacgactgtagccattgttcctaccgcctctgtgactaccgcctctgtgaccgacgctggtactacgactgtagccattgttcctaccgcctctgtgactaccgcctctgtgaccgacgctggtactacgactgtagccattgttcctgccgcctctgtgactaccgcctctgtgaccgacgctggtactacgactgtagccattgttcctgccgcctctgtgactaccgcctctgtgaccgacgctggtactacgactgtagccattgttcctgccgcctctgt

SEQ ID NO: 8990 - protein, 288 aa, Homo sapiens
MTDAVTTTVAIVPTASVTTASMTDAGTTTVAIVPTASVTTASMTDAGTTTVAIVPTASVTTASMTDAGTTTVAIVPTASVTTASMTDAGTTTVAIVPTASVTTASVTDAGTTTVAIVPTASVTTASVTDAGTTTVAIVPTASVTTASVTDAGTTTVAIVPTASVTTASVTDAGTTTVAIVPAASVTTASVTDAGTTTVAIVPTASVTTASVTDAGTTTVAIVPTASVTTASVTDAGTTTVAIVPAASVTTASVTDAGTTTVAIVPAASVTTASVTDAGTTTVAIVPAA

SEQ ID NO: 8991 - DNA, 631 bp, Homo sapiens
tatggaagaatcccttgagcccaggagttggaggctgcggtgagctacgattgcaccagtgcactccagcttgggtgacagagcgagaccctgtctccaaaaaaaaaaaaaaaaaaaaaaagatgaggaaatcgcccgaggatggatccgacttgtggtttcaatggagccctcattcttctcttcacttaccctctccgtgaggaggaagccagtgcacatcaagcgtttcctgtgtagcacagactcttctcccaaacatctttgcattctgcactggtgagggccagtggtgccacaccaatgtcccaattcaccttgggaacgtccttgagcgcatttctttttgtctgtagaagtaaaagagtagaactgaatgccgaagccagcaagctgttggaaccttggaaacgcagagggcatgaaggctgagtccggggtcctacagtcagaggctcgcattcaaatcttgcctctgcctgtaattgccgtgggaccctagcaggtgacttagccatgccctgcctgggtttacctacctgtaaagagcccttgtaaggatgaaagtaggtggcacagaccaagcatctgtacctggcagaccagtccttaataaacaggaattattgtt

SEQ ID NO: 8992 - protein, 42 aa, Homo sapiens
MSQFTLGTSLSAFLFVCRSKRVELNAEASKLLEPWKRRGHEG

SEQ ID NO: 8993 - DNA, 715 bp, Homo sapiens
tgaaaaagttgagaagccagatactaaagagaaaaaaagaaggagaaggttcttgcagctgttacaaaaccagttggtggtgacaagaacggcggtacccgggtggttaaacttcgcaaaatgcctagatagtatcctactgaagatgtgcctcgaaagctgttgagccacggcaaaaaacccttcagtcagcacgtgagaaaactgcgagccagcattacccccgggaccattctgatcatcctcactggacgccacaggggcaagagggtggttttcctgaagcagctggctagtggcttattacttgtgactggacctctggtcctcaatcgagttcctctacgaagaacacaccagaaatttgtcattgccacctcaaccaaaatcgatatcagcaatgtaaaaatcccaaaacatcttactgatgcttacttcaagaagaagaagctgcggaagcccagacaccaggaaggtgagatcttcgacacagaaaaagagaaatatgagattacggagcagcgcaagattgatcagaaagctgtggactcacaaattttaccaaaaatcaaagctattcctcagctccagggctacctgcgatctgtgtttgctctgacgaatggaatttatcctcacaaattggtgttctaaatgtcttaagaacctaattaaatagctgactacaaaaaaaaaaaaaaaaaaaaaaagacac

SEQ ID NO: 8994 - protein, 63 aa, Homo sapiens
MLTSRRRSCGSPDTRKVRSSTQKKRNMRLRSSARLIRKLWTHKFYQKSKLFLSSRATCDLCLL

SEQ ID NO: 8995 - DNA, 831 bp, Homo sapiens
ctctttcccatcttgcaagatggcaggtgaaaaagttgagaagccagatactaaagagaagaaacccgaagccaagaaggttgatgctggtggcaagaaaggccatgtagaagaggaagtactcagccgctaaatccaaggttgaaaagaaaaagaaggagaaggttcttgcagctgttacaaaaccagttggtggtgacaagaacggcggtacccgggtggttaaacttcgcaaaatgcctagatagtatcctactgaagatgtgcctcgaaagctgttgagccacggcaaaaaacccttcagtcagcacgtgagaaaactgcgagccagcattacccccgggaccattctgatcatcctcactggacgccacaggggcaagagggtggttttcctgaagcagctggctagtggcttattacttgtgactggacctctggtcctcaatcgagttcctctacgaagaacacaccagaaatttgtcattgccacctcaaccaaaatcgatatcagcaatgtaaaaatcccaaaacatcttactgatgcttacttcaagaagaagaagctgcggaagcccagacaccaggaaggtgagatcttcgacacagaaaaagagaaatatgagattacggagcagcgcaagattgatcagaaagctgtggactcacaaattttaccaaaaatcaaagctattcctcagctccagggctacctgcgatctgtgtttgctctgacgaatggaatttatcctcacaaattggtgttctaaatgtcttaagaacctaattaaatagctgactacaaaaaaaaaaaaaaaaaaaaaaagacac

SEQ ID NO: 8996 - protein, 37 aa, Homo sapiens
MAGEKVEKPDTKEKKPEAKKVDAGGKKGHVEEEVLSR

SEQ ID NO: 8997 - DNA, 802 bp, Homo sapiens
tgctctttcccatcttgcaagatggcaggtgaaaaagttgagaagccagatactaaagagaagaaacccgaagccaagaaggttgatgctggtggcaaggtgaaaaagggtaacctcaaagctaaaaagcccaagaaggggaagccccattgcagccgcaaccctgtccttgtcagaggaattggcaggtattcccgatctgccatgtattccagaaaggccatgtagaagaggaagtactcagccgctaaatccaaggttgaaaagaaaaagaaggagaaggttcttgcagctgttacaaaaccagttggtggtgacattctgatcatcctcactggacgccacaggggcaagagggtggttttcctgaagcagctggctagtggcttattacttgtgactggacctctggtcctcaatcgagttcctctacgaagaacacaccagaaatttgtcattgccacctcaaccaaaatcgatatcagcaatgtaaaaatcccaaaacatcttactgatgcttacttcaagaagaagaagctgcggaagcccagacaccaggaaggtgagatcttcgacacagaaaaagagaaatatgagattacggagcagcgcaagattgatcagaaagctgtggactcacaaattttaccaaaaatcaaagctattcctcagctccagggctacctgcgatctgtgtttgctctgacgaatggaatttatcctcacaaattggtgttctaaatgtcttaagaacctaattaaatagctgactacaaaaaaaaaaaaaaaaaaaaaaagacac

SEQ ID NO: 8998 - protein, 68 aa, Homo sapiens [sequence omitted]

SEQ ID NO: 8999 - DNA, 528 bp, Homo sapiens
ctctttcccatcttgcaagatggcaggtgaaaaagttgagaagccagatactaaagagaagaaacccgaagccaagaaggttgatggtggttttcctgaagcagctggctagtggcttattacttgtgactggacctctggtcctcaatcgagttcctctacgaagaacacaccagaaatttgtcattgccacctcaaccaaaatcgatatcagcaatgtaaaaatcccaaaacatcttactgatgcttacttcaagaagaagaagctgcggaagcccagacaccaggaaggtgagatcttcgacacagaaaaagagaaatatgagattacggagcagcgcaagattgatcagaaagctgtggactcacaaattttaccaaaaatcaaagctattcctcagctccagggctacctgcgatctgtgtttgctctgacgaatggaatttatcctcacaaattggtgttctaaatgtcttaagaacctaattaaatagctgactacaaaaaaaaaaaaaaaaaaaaaaaga

SEQ ID NO: 9000 - protein, 128 aa, Homo sapiens
MVVFLKQLASGLLLVTGPLVLNRVPLRRTHQKFVIATSTKIDISNVKIPKHLTDAYFKKKKLRKPRHQEGEIFDTEKEKYEITEQRKIDQKAVDSQILPKIKAIPQLQGYLRSVFALTNGIYPHKLVF

SEQ ID NO: 9001 - DNA, 696 bp, Homo sapiens
gctctttcccatcttgcaagatggcaggtgaaaaagttgagaagccagatactaaagagaagaaacccgaagccaagaaggttgatgctggtggcaaggtgaaaaagggtaacctcaaagctaaaaagcccaagaaggggaagccccattgcagccgcaaccctgtccttgtcagaggaattggcaggtattcccgatctgccatgtattccagaaaggccatgtagaagaggaagtactcagccgctaaatccaaggttttcctgaagcagctggctagtggcttattacttgtgactggacctctggtcctcaatcgagttcctctacgaagaacacaccagaaatttgtcattgccacctcaaccaaaatcgatatcagcaatgtaaaaatcccaaaacatcttactgatgcttacttcaagaagaagaagctgcggaagcccagacaccaggaaggtgagatcttcgacacagaaaaagagaaatatgagattacggagcagcgcaagattgatcagaaagctgtggactcacaaattttaccaaaaatcaaagctattcctcagctccagggctacctgcgatctgtgtttgctctgacgaatggaatttatcctcacaaattggtgttctaaatgtcttaagaacctaattaaatagctgactacaaaaaaaaaaaaaaaaaaaaaaaga

SEQ ID NO: 9002 - protein, 68 aa, Homo sapiens [sequence omitted]

SEQ ID NO: 9003 - DNA, 872 bp, Homo sapiens
tctttttttttttttttttttttttgtagtcagctatttaattaggttcttaagacatttagaacaccaatttgtgaggataaattccattcgtcagagcaaacacagatcgcaggtagccctggagctgaggaatagctttgatttttggtaaaatttgtgagtccacagctttctgatcaatcttgcgctgctccgtaatctcatatttctctttttctgtgtcgaagatctcaccttcctggtgtctgggcttccgcagcttcttcttcttgaagtaagcatcagtaagatgttttgggatttttacattgctgatatcgattttggttgaggtggcaatgacaaatttctggtgtgttcttcgtagaggaactcgattgaggaccagaggtccagtcacaagtaataagccactagccagctgcttcaggaaaaccaccctcttgcccctgtggcgtccagtgaggatgatcagaatggtcccgggggtaatgctggctcgcagttttctcacgtgctgagaagtttaaccacccgggtaccgccgttcttgtcaccaccaactggttttgtaacagctgcaagaaccttctccttctttttcttttcaaccttggatttagcggctgagtacttcctcttctacatggcctttctggaatacatggcagatcgggaatacctgccaattcctctgacaaggacagggttgcggctgcaatggggcttccccttcttgggctttttagctttgaggttaccctttttcaccttgccaccagcatcaaccttcttggcttcgggtttcttctctttagtatctggcttctcaactttttcacctgccatcttgcaagatgggaaagagc

SEQ ID NO: 9004 - protein, 73 aa, Homo sapiens
MAFLEYMADREYLPIPLTRTGLRLQWGFPFLGFLALRLPFFTLPPASTFLASGFFSLVSGFSTFSPAILQDGK

SEQ ID NO: 9005 - DNA, 956 bp, Homo sapiens
aaaaaagacactgctctttcccatcttgcaagatggcaggtgaaaaagttgagaagccagatactaaagagaagaaacccgaagccaagaaggttgatgctggtggcaaggtgaaaaagggtaacctcaaagctaaaaagcccaagaaggggaagccccattgcagccgcaaccctgtccttgtcagaggaattggcaggtattcccgatctgccatgtattccagaaaggccatgtagaagaggaagtactcagccgctaaatccaaggttgaaaagaaaaagaaggagaaggttcttgcagctgttacaaaaccagttggtggtgacaagaacggcggtacccgggtggttaaacttcgcaaaatgcctagatagtatcctactgaagatgtgcctcgaaagctgttgagccacggcaaaaaacccttcagtcagcacgtgagaaaactgcgagccagcattacccccgggaccattctgatcatcctcactggacgccacaggggcaagagggtggttttcctgaagcagctggctagtggcttattacttgtgactggacctctggtcctcaatcgagttcctctacgaagaacacaccagaaatttgtcattgccacctcaaccaaaatcgatatcagcaatgtaaaaatcccaaaacatcttactgatgcttacttcaagaagaagaagctgcggaagcccagacaccaggaaggtgagatcttcgacacagaaaaagagaaatatgagattacggagcagcgcaagattgatcagaaagctgtggactcacaaattttaccaaaaatcaaagctattcctcagctccagggctacctgcgatctgtgtttgctctgacgaatggaatttatcctcacaaattggtgttctaaatgtcttaagaacctaattaaatagctgactacaaaaaaaaaaaaaaaaaaaaaaag

SEQ ID NO: 9006 - protein, 68 aa, Homo sapiens [sequence omitted]

SEQ ID NO: 9007 - DNA, 687 bp, Homo sapiens
tgaaaaagttgagaagccagatactaaagagaaaaaaagaaggagaaggttcttgcagctgttacaaaaccagttggtggtgacaagaacggcggtacccgggtggttaaacttcgcaaaatgcctagatagtatcctactgaagatgtgcctcgaaagctgttgagccacggcaaaaaacccttcagtcagcacgtgagaaaactgcgagccagcattacccccgggaccattctgatcatcctcactggacgccacaggggcaagagggtggttttcctgaagcagctggctagtggcttattacttgtgactggacctctggtcctcaatcgagttcctctacgaagaacacaccagaaatttgtcattgccacctcaaccaaaatcgatatcagcaatgtaaaaatcccaaaacatcttactgatgcttacttcaagaagaagaagctgcggaagcccagacaccaggaaggtgagatcttcgacacagaaaaagagaaatatgagattacggagcagcgcaagattgatcagaaagctgtggactcacaaattttaccaaaaatcaaagctattcctcagctccagggctacctgcgatctgtgtttgctctgacgaatggaatttatcctcacaaattggtgttctaaatgtcttaagaacctaattaaatagctgactac

SEQ ID NO: 9008 - protein, 63 aa, Homo sapiens; identical to SEQ ID NO: 8994

SEQ ID NO: 9009 - DNA, 803 bp, Homo sapiens
ctctttcccatcttgcaagatggcaggtgaaaaagttgagaagccagatactaaagagaagaaacccgaagccaagaaggttgatgctggtggcaagaaaggccatgtagaagaggaagtactcagccgctaaatccaaggttgaaaagaaaaagaaggagaaggttcttgcagctgttacaaaaccagttggtggtgacaagaacggcggtacccgggtggttaaacttcgcaaaatgcctagatagtatcctactgaagatgtgcctcgaaagctgttgagccacggcaaaaaacccttcagtcagcacgtgagaaaactgcgagccagcattacccccgggaccattctgatcatcctcactggacgccacaggggcaagagggtggttttcctgaagcagctggctagtggcttattacttgtgactggacctctggtcctcaatcgagttcctctacgaagaacacaccagaaatttgtcattgccacctcaaccaaaatcgatatcagcaatgtaaaaatcccaaaacatcttactgatgcttacttcaagaagaagaagctgcggaagcccagacaccaggaaggtgagatcttcgacacagaaaaagagaaatatgagattacggagcagcgcaagattgatcagaaagctgtggactcacaaattttaccaaaaatcaaagctattcctcagctccagggctacctgcgatctgtgtttgctctgacgaatggaatttatcctcacaaattggtgttctaaatgtcttaagaacctaattaaatagctgactac

SEQ ID NO: 9010 - protein, 37 aa, Homo sapiens; identical to SEQ ID NO: 8996

SEQ ID NO: 9011 - DNA, 671 bp, Homo sapiens
gctctttcccatcttgcaagatggcaggtgaaaaagttgagaagccagatactaaagagaagaaacccgaagccaagaaggttgatgctggtggcaaggtgaaaaagggtaacctcaaagctaaaaagcccaagaaggggaagccccattgcagccgcaaccctgtccttgtcagaggaattggcaggtattcccgatctgccatgtattccagaaaggccatgtagaagaggaagtactcagccgctaaatccaaggttttcctgaagcagctggctagtggcttattacttgtgactggacctctggtcctcaatcgagttcctctacgaagaacacaccagaaatttgtcattgccacctcaaccaaaatcgatatcagcaatgtaaaaatcccaaaacatcttactgatgcttacttcaagaagaagaagctgcggaagcccagacaccaggaaggtgagatcttcgacacagaaaaagagaaatatgagattacggagcagcgcaagattgatcagaaagctgtggactcacaaattttaccaaaaatcaaagctattcctcagctccagggctacctgcgatctgtgtttgctctgacgaatggaatttatcctcacaaattggtgttctaaatgtcttaagaacctaattaaatagctgactac

SEQ ID NO: 9012 - protein, 68 aa, Homo sapiens [sequence omitted]

SEQ ID NO: 9013 - DNA, 774 bp, Homo sapiens
tgctctttcccatcttgcaagatggcaggtgaaaaagttgagaagccagatactaaagagaagaaacccgaagccaagaaggttgatgctggtggcaaggtgaaaaagggtaacctcaaagctaaaaagcccaagaaggggaagccccattgcagccgcaaccctgtccttgtcagaggaattggcaggtattcccgatctgccatgtattccagaaaggccatgtagaagaggaagtactcagccgctaaatccaaggttgaaaagaaaaagaaggagaaggttcttgcagctgttacaaaaccagttggtggtgacattctgatcatcctcactggacgccacaggggcaagagggtggttttcctgaagcagctggctagtggcttattacttgtgactggacctctggtcctcaatcgagttcctctacgaagaacacaccagaaatttgtcattgccacctcaaccaaaatcgatatcagcaatgtaaaaatcccaaaacatcttactgatgcttacttcaagaagaagaagctgcggaagcccagacaccaggaaggtgagatcttcgacacagaaaaagagaaatatgagattacggagcagcgcaagattgatcagaaagctgtggactcacaaattttaccaaaaatcaaagctattcctcagctccagggctacctgcgatctgtgtttgctctgacgaatggaatttatcctcacaaattggtgttctaaatgtcttaagaacctaattaaatagctgactac

SEQ ID NO: 9014 - protein, 68 aa, Homo sapiens [sequence omitted]

SEQ ID NO: 9015 - DNA, 562 bp, Homo sapiens
gcttgaagtgtttgttcttacaataaggttctatggagagtagcctgaaacaaagataactacgggctatgcctgtcacagtgttcaatttagtgtgtgtgctgaaagggttatttactcctgatagtttatacaattctcaaggatatatttgtttacttttgttttgttttccaggattgtttttaaagtgataagttaacttttaaagaagagtaatgtcctgaatatgatgaaacacaaatatttatgctgagcattctactgaaacttaactggacaaacaatctcaaaaatagacaattttcaggttgaatcttccactttgccagggtcataagtgagtagacattttccctatttggcaggatagtcctctagaggctgttcacaatggcagctgtgaggggaccttggtttccttctaagggctagcgagctgcctggaactttccttgaaggaactcaggattttcctttatttccatgcttggaggagaggggattcacaggcccctaagaggggcctctgctccatctcactggttgtgaaacaacaaca

SEQ ID NO: 9016 - protein, 41 aa, Homo sapiens
MPVTVFNLVCVLKGLFTPDSLYNSQGYICLLLFCFPGLFLK

SEQ ID NO: 9017 - DNA, 1352 bp, Homo sapiens
agctcattcctttgattctagtctaccagttgccacttctggtccatttgcatataacactggagaagtgttcctttatctttgtgaagcccttaacattcaaggagccactactgcttctatgctgctgaaaaatacaagacactgcctctacctctgcatctgtcctttgctttttgcttggaaactatcacatcaaatcacactgagatcagttcctactgagctctcactggcaaactatcagtagaagaagcctggacaaaactgagttcaatgcttcacaattgctgcgctcttcttctccccagtggaaaaaaaaatgctctctgcaccacatggccgctggccgctgccagaggatggaggaaggggtgatgttggtcattcaagactgtttttcctacctcttcagtgcctctttcaactgtatgaagttaaaaccagcttggcaggctctagagagactgacctctgcagatggtttaaagggagaagctcaagggtccacagttcacagggctgccaatcaggcctgtgcagaaaactcaacagtctaaaagaatatatgaagacagaacctcaacctagaagaaatggacaaattcccagacacatcaaggaattcctagacaaactatcaaaactgaatcatgattagatagaaaatctgaacagatcaatataagtaaagagattaaagcagtaataaactctcccatcaaagaaaagctcaggacctgatggcttcactgctgaattctaccaaacgtttaaagaactaacaccaatgattctcaaactctttttaaaaattgaagatgagagaacacttccaaattcatatcacgaggccagcattaccctgataccaacgccagacaaagacactataagaaaaggcaattatggaccaatatccctgataaacatggatgtaaaaatcctcatcaaaatactagcaaatgaaattcaaccacaaatttaaaaaagcattcaccatgatcgagtgggatttatccctgggatgcaggaagtttcaacatacacaaatccataaacatgatacaccacatcaacaagatgaaggacaaaatctttataatctcaatagatgcaggaaaagcatttaacagaattcagcaccctttcatgatttaaaaaaactcaacaaaatatagaaggactgtaccccaacacaataaagaccagatatgacaaacccacagctaacattctcaacagtgaaaagttaaaagcttttcttctgagatcaggaacaagacaataatgctcactctctcgacttctgttcatcgtaacgttggaagttctagacagagcaattagac

SEQ ID NO: 9018 - protein, 112 aa, Homo sapiens
MLSAPHGRWPLPEDGGRGDVGHSRLFFLPLQCLFQLYEVKTSLAGSRETDLCRWFKGRSSRVHSSQGCQSGLCRKLNSLKEYMKTEPQPRRNGQIPRHIKEFLDKLSKLNHD

SEQ ID NO: 9019 - DNA, 786 bp, Homo sapiens
cctctactactgtgcataaaacttgaagagttggaggccatgttcaccagcccagaagatatacgtacacttgggatttttgagttgtgtggtggacggaggggttagtcttaaacactactgatgaacctatgtgattgctgcctgtttcccgccaaataacagggcagtcacggcttatcctttctggctccccttttaccaccttctcctggaatttacctgacctcctcttctcacagcttggcaggctctagagagactgacctctgcagatggtttaaagggagaagctcaagggtccacagttcacagggctgccaatcaggcctgtgcagaaaactcaacagtctaaaagaatatatgaagacagaacctcaacctagaagaaatggacaaattcccagacacatcaaggaattcctagacaaactatcaaaactgaatcatgattagatagaaaatctgaacagatcaatataagtaaagagattaaagcagtaataaactctcccatcaaagaaaagctcaggacctgatggcttcactgctgaattctaccaaacgtttaaagaactaacaccaatgattctcaaactctttttaaaaattgaagatgagagaacacttccaaattcatatcacgaggccagcattaccctgataccaacgccagacaaagacactataagaaaaggcaattatggaccaatatccctgataaacatggatgtaaaaatcctcatcaaaatactagcaaatgaaattcaaccacaaatttaaaaa

SEQ ID NO: 9020 - protein, 65 aa, Homo sapiens [sequence omitted]

SEQ ID NO: 9021 - DNA, 572 bp, Homo sapiens
attatgttcctgctgatggcagaagtgcaaaagagtgaggagaagcccccagtgctcttaaagcctcagcctaggactgtcacctctgcttagcttactatcagtggggtgaggaaatatacatcaccttttgtggaaggaacgtcaaggtcatacagctaaagatgtggagacagggaaaggacggaaattgctttcatctttcaaagtaaagccatggagagaaggctggatcaaccagggtgttgagatattagagaaaatctcagtctttcaatgagagggacaattgaagaagtttcccaggctgcatcaactgcaacgccattgtgtcacctgcagaagttagctgcacctcatgctgctgctgtccatgctgactgcagtcccctgggcatgtttacgttttgtctaagttcttagcactgattttttctggcattcaggtttcacatctgtaaccgctcttgccagaggtagaagctttgttgagattgaggactatgctggacacacagtaattccattatcaccagattaattcgtaatgaatgaacacatgacgctctgct

SEQ ID NO: 9022 - protein, 48 aa, Homo sapiens
MRGTIEEVSQAASTATPLCHLQKLAAPHAAAVHADCSPLGMFTFCLSS

SEQ ID NO: 9023 - DNA, 920 bp, Homo sapiens
cctggagccacacccaactgagatcagcagagtggccctacttgatccatagacacaccgatggaatctcactctgtcacccaggctggagtgcagtggcactatcttggctcactgcagcttccgcttcccgggttcaagcaattctcctgcctcaacctcccaagtagctggggttacagatgagctacttaacagccacagccctccgactttggaatagccctgcctgccatcatcatctgtcctgagaggaaggcttgcctttgaaattcctttattgtagcagacatttgctgctaggtctcttttgttagtgcacatgcctgctcttcagcctgcctgtgttcctgcacccatatttctgtgtgtctgcccctctccccaccttgcctagccttctattctagtgtttgcacttttccaggatcctggaatttgttctgttgctttaacttgctttcctgtggctgagctccactggctcctgactgcctgcttggtttgtctgccagcttgccttacccttgggcttcaatcttcacaatcctcataatcttgctctgagcatagggtaccatgcagcccaattctacgtggttcatctgctcctgacttaactgaatctacctcttacttgagccccttatattaaagagggtcgatggcttttataatgaaagtgactgcaatacaaatacattttaatggtgtcacaacctttaaacattagcagtccaggttgttcaaggaccaccttaagttctgaacttagtgtgtagaaaagtttccacaagtaaaaaatattttcatgcttctgaatattttatgggttttgtcctacataggaatacttgctatctttattgaaaggggtatgtggaatcaaatatctgaataaattatgtcatatatataca

SEQ ID NO: 9024 - protein, 41 aa, Homo sapiens
MESHSVTQAGVQWHYLGSLQLPLPGFKQFSCLNLPSSWGYR

SEQ ID NO: 9025 - DNA, 2311 bp, Homo sapiens
ctgtgtggaacttgggattcgaacggcaggcgggaagtgctctagcaggggagtctgaccttgtgagggaatacctgtgtccccccttttttcccctttttacccaataaaaccctgccttactcaccctttaaatcatctgcgagcctgaattttcatggccgtgggacggacaagaactttatcttcagctgaactaagaaaaagtcctgcaacatttttggcgcgcaatgtgggggcaccagaagcgggcaccgttgagctgttgcaactgttctgctggagccttatgtatgtggttgaaaccacctgtactactggaatgaaagcacctttacagaagaggcaatgcaagttgtattcatcacatgtgtagaatgaattaagatttatgccagttgcaaagaagaatattggctcactatttttcctctgggcatgggtacaagcaattttccagtcttgaccctttatctgttgaccaagctaaggcagaaaccagctaaattctggatttaatcttgagcagcaaaaaagatcagcttttgaagtggatctgcttttattcttggcaaaagttcagcggagaccaaccagagtggtgacaaagttcttcaacatcaagccaaatgtaatacaaggaattacggatagtgcttaatctaaaataaagaaattccacatctccctaaaaagttattggcttcaagaatgaaaacaaaagaagcatatttgtctcaatccaaacacagacaccagaaagacaaaccaggagtatacagcaaagtagcttgcaggataatacattgaaaaatgtaattgtgcataaatcatgcacaaagtagaaaccacaaattctgtatttggcaaggcttcggttcctttgcataattctttcattttcatcttgctgcttccattctcttttcatcaaaaaaagctacataaaacaaagacataaactgtatgcaattaaaatgagaaaatagctgaaaggaatgtattgataattatgttaaaatctataccataagtattcttgcattgttaagcatctaatttttcatgtgttgacatcagcatctcagttctctctaacatctgaaagcttttttttttaaggcaacttcttttagagtgaacaaacttatgtaccaccgagttgacaaaagtataactatatcctacagaaagagacctcaagtaaacctccagcagccatctggacttccatgaaaacagaacaatcagtgagatgcagagcttggaggagacagtttccatagactgaagcacgtgctgaagcaaagttcacacttgcaggattagaagaggttgaccgaaagaaggaaggacatggacagctatgttgttgtggagtcctgttttatagtcataaccttgagtcaagtgagtttgtctggacagacagagcttgttgcctttacttatagggaaggcaccggacacagacagcctcaaggacatttgttctagcctttcagtatcctttctcttaattatctcacctcatccatgaagctggtatgtacgatttttcctttctttctcaatcctttaaaaaattaaagctctaaatctcatttccacttagattttaatgttgcattgtaacttaagataaaaccttgctctgatgttaaaaatactaaagtaagaagcaatatggcatagtgcttatgagcaggactacatagttctttctgaatacaaatctcagataaaacactatctcagtgatcaaccaggttaagcaacctttttagtgcctcaattattccatttgtaaaattgtaataatgatagtactaacctataagattgtggtgaggattaagtcagataatacaaaagaagcatttagagtatttcctggcattatctaccatttattgaatttttatggttaagaagaataaggaaaagcagaagaaaaggaaaagagaaaaaatacataagaagaaggaagagtggtaagctctagtaaattacaacaaacggtaacgtagaaaacatttgttagcccttaatataggccaggcactgtgttcaatgcttaaacctcattactgttctttgaagtggataacattattccttccattttaaagaaaggaatactaaagacaactttgtcaatattattcatgtaataaatgacagaatttgaccaagacaatagagaatgaactcttaatcactatattgttttattttttgaaaatagattttaagttcttattaaatgttaatgactcacatcaaaataaagccaatcaaaattgacagc

SEQ ID NO: 9026 - protein, 72 aa, Homo sapiens
MAVGRTRTLSSAELRKSPATFLARNVGAPEAGTVELLQLFCWSLMYVVETTCTTGMKAPLQKRQCKLYSSHV

SEQ ID NO: 9027 - DNA, 581 bp, Homo sapiens
aaaggtaggaatcgtaagagtgtacagaaataagtcacatgcagaccatattgaaatacgcagagaattccatggagactctgatggctagggcaccgttgagctgttgcaactgttctgctggagccttatgtatgtggttgaaaccacctgtactactggaatgaaagcacctttacagaagaggcaatgcaagttgtattcatcacatgtgtagaatgaattaagatttatgccagttgcaaagaagaatattggctcactatttttcctctgggcatgggtacaagcaattttccagtcttgaccctttatctgttgaccaagctaaggcagaaaccagctaaattctggatttaatcttgagcagcaaaaaagatcagcttttgaagtggatctgcttttattcttggcaaaagttcagcggagaccaaccagagtggtgacaaagttcttcaacatcaagccaaatgtaatacaaggaattacggatagtgcttaatctaaaataaagaaattccacatctccctaaaaagttattggcttcaagaatgaaaacaaaagaagcatatttgtctca

SEQ ID NO: 9028 - protein, 42 aa, Homo sapiens
MQTILKYAENSMETLMARAPLSCCNCSAGALCMWLKPPVLLE

SEQ ID NO: 9029 - DNA, 625 bp, Homo sapiens
gtggaacttgggattcgaacggcaggcgggaagtgctctagcaggggagtctgaccttgtgagggaatacctgtgtccccccttttttcccctttttacccaataaaaccctgccttactcaccctttaaatcatctgcgagcctgaattttcatggccgtgggacggacaagaactttatcttcagctgaactaagaaaaagtcctgcaacatttttggcgcgcaatgtgggggcaccagaagcgggcaccgttgagctgttgcaactgttctgctggagccttatgtatgtggttgaaaccacctgtactactggaatgaaagcacctttacagaagaggcaatgcaagttgtattcatcacatgtgtagaatgaattaagatttatgccagttgcaaagaagaatattggctcactatttttcctctgggcatgtggaaatgtaaatcagtccatgttactcacctcggagaagcagaagtacgatttactattgttgcttgcttacttactcttatcaatttctatgagaggggtacaagcaattttccagtcttgaccctttatctgttgaccaagctaaggcagaaaccagctaaattctggatttaatcttgagcagc

SEQ ID NO: 9030 - protein, 72 aa, Homo sapiens; identical to SEQ ID NO: 9026

SEQ ID NO: 9031 - DNA, 564 bp, Homo sapiens
agcaggggagtctgaccttgtgagggaatacctgtgtccccccttttttcccctttttacccaataaaaccctgccttactcaccctttaaatcatctgcgagcctgaattttcatggccgtgggacggacaagaactttatcttcagctgaactaagaaaaagtcctgcaacatttttggcgcgcaatgtgggggcaccagaagcgggcaccgttgagctgttgcaactgttctgctgatttctatcatggaaaatatccctgcaagcagtaaccactatttgaatggtgaaatcagcagcacagcaaacatggttcttaatgaggagccttatgtatgtggttgaaaccacctgtactactggaatgaaagcacctttacagaagaggcaatgcaagttgtattcatcacatgtgtagaatgaattaagatttatgccagttgcaaagaagaatattggctcactatttttcctctgggcatgggtacaagcaattttccagtcttgaccctttatctgttgaccaagctaaggcagaaaccagctaaattctggatttaat

SEQ ID NO: 9032 - protein, 44 aa, Homo sapiens
MVKSAAQQTWFLMRSLMYVVETTCTTGMKAPLQKRQCKLYSSHV

SEQ ID NO: 9033 - DNA, 570 bp, Homo sapiens
gggagtctgaccttgtgagggaatacctgtgtccccccttttttcccctttttacccaataaaaccctgccttactcaccctttaaatcatctgcgagcctgaattttcatggccgtgggacggacaagaactttatcttcagctgaactaagaaaaagtcctgcaacatttttggcgcgcaatgtgggggcaccagaagcgggcaccgttgagctgttgcaactgttctgctggagccttatgtatgtggttgaaaccacctgtactactggaatgaaagcacctttacagaagaggcaatgcaagttgtattcatcacatgtgtagaatgaattaagatttatgccagttgcaaagaagaatattggctcactatttttcctctgggcatcagcatatgatcccctgttgaagacagacaagtacatctttctggtggctcctagacctggcattgggaacagaagattatcagtatgatccgtacgcttaaggaaagatctcatattattgaaatgaatattttatttgataaattgaactacagaataaagtacttttaacaaacc

SEQ ID NO: 9034 - protein, 72 aa, Homo sapiens; identical to SEQ ID NO: 9026

SEQ ID NO: 9035 - DNA, 398 bp, Homo sapiens
aatcgtaagagtgtacagaaataagtcacatgcagaccatattgaaatacgcagagaattccatggagactctgatggctagggcaccgttgagctgttgcaactgttctgctgatttctatcatggaaaatatccctgcaagcagtaaccactatttgaatggtgaaatcagcagcacagcaaacatggttcttaatgagattgttttgcatttaaaaattttatgcaccaggcattttacaatgcaaatgatcttgctttttaagccaatattatccttttaagataattttgataatgtagatatcgttcatcgtgttttgatataagttttaatcaggcaatatttcaattagatagaagtatgtacaaaagtaataaactatatctctgaatg

SEQ ID NO: 9036 - protein, 53 aa, Homo sapiens
MENIPASSNHYLNGEISSTANMVLNEIVLHLKILCTRHFTMQMILLFKPILSF

SEQ ID NO: 9037 - DNA, 775 bp, Homo sapiens
ccttgtgagggaatacctgtgtccccccttttttcccctttttacccaataaaaccctgccttactcaccctttaaatcatctgcgagcctgaattttcatggccgtgggacggacaagaactttatcttcagctgaactaagaaaaagtcctgcaacatttttggcgcgcaatgtgggggcaccagaagcgggcaccgttgagctgttgcaactgttctgctgctgaggaaaccaaatctgaaagagattaagaaacatgagcagtatcaaatgactagacaatgtctcagctgaattcaatcatctttttaaactccatctacctgctctatctgacattaataaacattccaagaagaatgtctgcaaagaggagagactgagaattactagccactcaattaggtcacttaacatcttatattagctgctcatttcatttgggagcaaggagaactgggttctcattcttcagccaatgagctggagaaacctggacaaataatttaattgcttgaggcttaattgtccaatcactgaaatgtaagaaaataagaaataatctttaaatttactttcaattaaataaaacactgattgttaatacatatttgaaaatatactagaaactgaacgtgcaaattaggataatgaattgcactctaaatttaaaatgcaagaaatgatgtattttatttcttatttatacatatatattatttcaagaattataaatctcaacatgctttccatataataaaaatgtttaatat

SEQ ID NO: 9038 - protein, 42 aa, Homo sapiens
MAVGRTRTLSSAELRKSPATFLARNVGAPEAGTVELLQLFCC

SEQ ID NO: 9039 - DNA, 954 bp, Homo sapiens
acggcaggcgggaagtgctctagcaggggagtctgaccttgtgagggaatacctgtgtccccccttttttcccctttttacccaataaaaccctgccttactcaccctttaaatcatctgcgagcctgaattttcatggccgtgggacggacaagaactttatcttcagctgaactaagaaaaagtcctgcaacatttttggcgcgcaatgtgggggcaccagaagcgaaagaacaccccctcttaaacatggagatcgttatatagaatgtccaaggcaaattaaggaaaataattattgtagctgatgaagcagaaaccctattagagctaaatgctacttcacagtactcagtggtggaggttctgaaggcaccgttgagctgttgcaactgttctgctgctgaggaaaccaaatctgaaagagattaagaaacatgagcagtatcaaatgactagacaatgtctcagctgaattcaatcatctttttaaactccatctacctgctctatctgacattaataaacattccaagaagaatgtctgcaaagaggagagactgagaattactagccactcaattaggtcacttaacatcttatattagctgctcatttcatttgggagcaaggagaactgggttctcattcttcagccaatgagctggagaaacctggacaaataatttaattgcttgaggcttaattgtccaatcactgaaatgtaagaaaataagaaataatctttaaatttactttcaattaaataaaacactgattgttaatacatatttgaaaatatactagaaactgaacgtgcaaattaggataatgaattgcactctaaatttaaaatgcaagaaatgatgtattttatttcttatttatacatatatattatttcaagaattataaatctcaacatgctttccatataataaaaatgtttaatat

SEQ ID NO: 9040 - protein, 43 aa, Homo sapiens
MAVGRTRTLSSAELRKSPATFLARNVGAPEAKEHPLLNMEIVI

SEQ ID NO: 9041 - DNA, 128 bp, Homo sapiens
aatatatagtgtttccttataaaatgtatcagagatgtcacatataaatatgagctagtgaaataactttcacgtctttctctcttttacacacacacacaccccatgtatatgcctaaaacacactg

SEQ ID NO: 9042 - DNA, 399 bp, Homo sapiens
tgaggacagaaaaggctttctaaaatgagacataaaaagcacaaaccattgaagaaaagacagataaattcaactatatttcaaaagcaccacaaagagagtgaaaatacagaaaaagaacttatttttctaacacatgtgggaaaagacgagattccaggaagtataaagtataaacattaagaaaaagatgaacaacccaatagaaaaactgcataagatcttaacgtagcctttacaaaagagcaaatctggccgggcacaggtatgaacatgaggttagaaataaaagatgacagtttttttaatgacaactgctctattccaagacagtctgcataaagttactaattactctgatgtttaaaagtctgtaagaggtggccgggcatggtggct

SEQ ID NO: 9043 - protein, 52 aa, Homo sapiens [sequence omitted]

SEQ ID NO: 9044 - DNA, 3492 bp, Homo sapiens
atggcttccagtccgctgccagggcccaacgacatcctgctggcgtcgccgtcgagcgccttccagcccgacacgctgagccagccgcggccagggcacgccaacctcaaacccaaccaggtgggccaggtgatcctctacggcattcccatcgtgtcgttggtgatcgacgggcaagagcgcctgtgcctggcgcagatctccaacactctgctcaagaacttcagctacaacgagatccacaaccgtcgcgtggcactgggcatcacgtgtgtgcagtgcacgccggtgcaactggagatcctgcggcgtgccggggccatgcccatctcatcgcgccgctgcggcatgatcaccaaacgcgaggccgagcgtctgtgcaagtcgttcctgggcgaaaacaggccgcccaagctgccagacaatttcgccttcgacgtgtcacacgagtgcgcctggggctgccgcggcagcttcattcccgcgcgctacaacagctcgcgcgccaagtgcatcaaatgcagctactgcaacatgtacttctcgcccaacaagttcattttccactcccaccgcacgcccgacgccaagtacactcagccagacgcagccaacttcaactcgtggcgccgtcatctcaagctcaccgacaagagtccccaggacgagctggtcttcgcctgggaggacgtcaaggccatgttcaacggcggcagccgcaagcgcgcactgccccagccgggcgcgcaccccgcctgccacccgctcagctctgtgaaggcggccgccgtggccgccgcggccgcggtggccggaggcgggggtctgctgggcccccacctgctgggtgcgcccccgccgccgccgccgccaccgccgcccttggcagagctggctggtgccccgcacgcccatcacaagcggccgcgcttcgacgacgacgacgactccttgcaggaggccgccgtagtggccgccgccagcctctcggccgcagccgccagcctctctgtggctgctgcttcgggcggggccaaaggcccgcgcagctacccagtcatcccggtgcccagcaagggctcgttcgggggcgtcctgcagaagttcccgggctgcggcgggctcttcccgcacccctacaccttccctgccgcggccgccgccttcagcttgtgccataagaaagaggatgcgggtgccgccgctgaggccctggggggcgcgggcgcaggcggcgcgggcgcggcgcccaaggccggcttgtccggcctcttctggcccgcgggccgcaaggacgccttctatccgcccttctgcatgttctggccgccgcggacccctggcgggctcccggtgcccacctacctgcagcccccgcctcagccgccctcggcgctaggctgcgcgctaggcgaaagcccggccctgctgcgccaggccttcctggacctggctgagccaggcggtgctgctgggagcgccgaggccgcgcccccgccggggcagcccccgcaggtagtggccaacggcccgggctccggcccacctcctcctgccgggggcgccggctctcgcgacgcgctcttcgagtcgcccccgggcggcagcggcggggactgcagcgcgggctccacgccgcccgcggactctgtggcagctgccggggcaggggccgcggccgccgggtctggccccgcgggctcccgggttccggcgccccaccatccgcaccttctggaggggcgcaaagcgggcggtggcagctaccaccattccagcgccttccggccagtgggcggcaaggacgacgcggagagcctggccaagctgcacggggcgtcggcgggcgcgccccactcggcccagacctgctgctaccccagcgaggacagctccgaggacgaggacgacgaggaagaagagcaggaggtggacgtggagggccacaagccccccgaggtcgggggcggccggttcctccagggccgagggccgtcggagaaggggagcagccgggaccgcgcgccggccgtcgcgggcgcgttcccgctcggcctgaactcctccaggctgctgcaggaagacgggaaactcggggaccccggctcggacctgcccccgcccccgccgccgcccctggccccccagaaggcgagtggcggcggcagcagcagcccgggcagcccagttcaccatccatcactggaggagcagccctcctacaaagatagtcagaaaactaaggaaaataaccaagtaattgtatctacaaaggatgacaacagcttttcagataagaacaaggagcatagctttttcatcacagactctgatgcttctggaggagatttttggagagaaagatcaggtgaacatacacaagaaaccaactcacctcattcactgaaaaaggatgtagaaaatatggggaaagaagaacttcagaaggttttatttgaacaaatagatttacggagacgactggaacaagaattccaggtgttaaaaggaaacacatctttcccagtattcatttaccaccctggtcaaaggcatcttggatccctagaggctcagaggaaagttttcttcttcacaaagggagccatgcttgccatgtgctccagtgtctggaaccacactgatcttcctggaggcctgcgggccacagcgcaggaccaagtgttggaaccagggcagtttgtggagggctggttcccctgttgccctgtacccttagacccacctctagagcatcctgacctgaatgctgttctccacgtgtctgctcaagcagctctcccctctaatgttcccagaatgaatgacagctcttctctcaatctttgcatggcaccacatacttccctctattacagtgactttgacatcaaaatcagagatcccctatgcagcaagtttgatcaggaaagaaaagcttggcgcccatctcagcaaaagctaaaagattttctgctctttatggttctgacaccccagttactgccccaaggaaaccaaagtgtcagcagtcatcctcagggtgtctcatctctgtctctccttcgcttccaaaaagcctgcctgaaatctgactttcagagagttactgcaggtgaaaggggccacgttcatgaaagccagcccaagaccacatgtcttccagtagtgttgctgatagagcccatcgtaggccttcctacttactgtgatgttaaatccaagtccacaagatcatattatgccccaaattctgcttttcagatgagagagttaaatagtgaacactttgcagccaagatttctaagtatacgcaggtgaagatacggaaaggggatgaacctgaacttggctggctttccaggactcaacgccatgtggaagctgccagggcttggggctttccccctctgaagccacaccctgagctctacgttggccgctttcagacatggctggggcggctgggacacagggcaccaagtccctag

SEQ ID NO: 9045 - protein, 1163 aa, Homo sapiens [sequence omitted]

SEQ ID NO: 9046 - DNA, 891 bp, Homo sapiens
atggcttccagtccgctgccagggcccaacgacatcctgctggcgtcgccgtcgagcgccttccagcccgacacgctgagccagccgcggccagggcacgccaacctcaaacccaaccaggtgggccaggtgatcctctacggcattcccatcgtgtcgttggtgatcgacgggcaagagcgcctgtgcctggcgcagatctccaacactctgctcaagaacttcagctacaacgagatccacaaccgtcgcgtggcactgggcatcacgtgtgtgcagtgcacgccggtgcaactggagatcctgcggcgtgccggggccatgcccatctcatcgcgccgctgcggcatgatcaccaaacgcgaggccgagcgtctgtgcaagtcgttcctgggcgaaaacaggccgcccaagctgccagacaatttcgccttcgacgtgtcacacgagtgcgcctggggctgccgcggcagcttcattcccgcgcgctacaacagctcgcgcgccaagtgcatcaaatgcagctactgcaacatgtacttctcgcccaacaagttcattttccactcccaccgcacgcccgacgccaagtacactcagccagacgcagccaacttcaactcgtggcgccgtcatctcaagctcaccgacaagagtccccaggacgagctggtcttcgcctgggaggacgtcaaggccatgttcaacggcggcagccgcaagcgcgcactgccccagccgggcgcgcaccccgcctgccacccgctcagctctataagaacaaggagcatagctttttcatcacagactctgatgcttctggaggagatttttggagagaaagatcaggaggattatatgcgaataaatgaggacaacatttggttatga

SEQ ID NO: 9047 - protein, 296 aa, Homo sapiens
MASSPLPGPNDILLASPSSAFQPDTLSQPRPGHANLKPNQVGQVILYGIPIVSLVIDGQERLCLAQISNTLLKNFSYNEIHNRRVALGITCVQCTPVQLEILRRAGAMPISSRRCGMITKREAERLCKSFLGENRPPKLPDNFAFDVSHECAWGCRGSFIPARYNSSRAKCIKCSYCNMYFSPNKFIFHSHRTPDAKYTQPDAANFNSWRRHLKLTDKSPQDELVFAWEDVKAMFNGGSRKRALPQPGAHPACHPLSSIRTRSIAFSSQTLMLLEEIFGEKDQEDYMRINEDNIWL

SEQ ID NO: 9048 - DNA, 2432 bp, Homo sapiens
atggcttccagtccgctgccagggcccaacgacatcctgctggcgtcgccgtcgagcgccttccagcccgacacgctgagccagccgcggccagggcacgccaacctcaaacccaaccaggtgggccaggtgatcctctacggcattcccatcgtgtcgttggtgatcgacgggcaagagcgcctgtgcctggcgcagatctccaacactctgctcaagaacttcagctacaacgagatccacaaccgtcgcgtggcactgggcatcacgtgtgtgcagtgcacgccggtgcaactggagatcctgcggcgtgccggggccatgcccatctcatcgcgccgctgcggcatgatcaccaaacgcgaggccgagcgtctgtgcaagtcgttcctgggcgaaaacaggccgcccaagctgccagacaatttcgccttcgacgtgtcacacgagtgcgcctggggctgccgcggcagcttcattcccgcgcgctacaacagctcgcgcgccaagtgcatcaaatgcagctactgcaacatgtacttctcgcccaacaagttcattttccactcccaccgcacgcccgacgccaagtacactcagccagacgcagccaacttcaactcgtggcgccgtcatctcaagctcaccgacaagagtccccaggacgagctggtcttcgcctgggaggacgtcaaggccatgttcaacggcggcagccgcaagcgcgcactgccccagccgggcgcgcaccccgcctgccacccgctcagctctgtgaaggcggccgccgtggccgccgcggccgcggtggccggaggcgggggtctgctgggcccccacctgctgggtgcgcccccgccgccgccgccgccaccgccgcccttggcagagctggctggtgccccgcacgcccatcacaagcggccgcgcttcgacgacgacgacgactccttgcaggaggccgccgtagtggccgccgccagcctctcggccgcagccgccagcctctctgtggctgctgcttcgggcggggccaaaggcccgcgcagctacccagtcatcccggtgcccagcaagggctcgttcgggggcgtcctgcagaagttcccgggctgcggcgggctcttcccgcacccctacaccttccctgccgcggccgccgccttcagcttgtgccataagaaagaggatgcgggtgccgccgctgaggccctggggggcgcgggcgcaggcggcgcgggcgcggcgcccaaggccggcttgtccggcctcttctggcccgcgggccgcaaggacgccttctatccgcccttctgcatgttctggccgccgcggacccctggcgggctcccggtgcccacctacctgcagcccccgcctcagccgccctcggcgctaggctgcgcgctaggcgaaagcccggccctgctgcgccaggccttcctggacctggctgagccaggcggtgctgctgggagcgccgaggccgcgcccccgccggggcagcccccgcaggtagtggccaacggcccgggctccggcccacctcctcctgccgggggcgccggctctcgcgacgcgctcttcgagtcgcccccgggcggcagcggcggggactgcagcgcgggctccacgccgcccgcggactctgtggcagctgccggggcaggggccgcggccgccgggtctggccccgcgggctcccgggttccggcgccccaccatccgcaccttctggaggggcgcaaagcgggcggtggcagctaccaccattccagcgccttccggccagtgggcggcaaggacgacgcggagagcctggccaagctgcacggggcgtcggcgggcgcgccccactcggcccagacctgctgctaccccagcgaggacagctccgtcgggggcggccggttcctccagggccgagggccgtcggagaaggggagcagccgggaccgcgcgccggccgtcgcgggcgcgttcccgctcggcctgaactcctccaggctgctgcaggaagacgggaaactcggggaccccggctcggacctgcccccgcccccgccgccgcccctggccccccagaaggcgagtggcggcggcagcagcagcccgggcagcccagttcaccatccatcactggaggagcagccctcctacaaagatagtcagaaaactaaggaaaataaccaagtaattgtatctacaaaggatgacaacagcttttcagataagaacaaggagcatagctttttcatcacagactctgatgcttctggaggagatttttggagagaaagatcaggtaggctgggaattcagaaatagattacctaagaaggcagtatgagtactataatcgtagtctacacaaaaaaccatctgataagatttatataaccctgtgtccctttagccaatccaatgtttaa

SEQ ID NO: 9049 - protein, 775 aa, Homo sapiens
MASSPLPGPNDILLASPSSAFQPDTLSQPRPGHANLKPNQVGQVILYGIPIVSLVIDGQERLCLAQISNTLLKNFSYNEIHNRRVALGITCVQCTPVQLEILRRAGAMPISSRRCGMITKREAERLCKSFLGENRPPKLPDNFAFDVSHECAWGCRGSFIPARYNSSRAKCIKCSYCNMYFSPNKFIFHSHRTPDAKYTQPDAANFNSWRRHLKLTDKSPQDELVFAWEDVKAMFNGGSRKRALPQPGAHPACHPLSSVKAAAVAAAAAVAGGGGLLGPHLLGAPPPPPPPPPPLAELAGAPHAHHKRPRFDDDDDSLQEAAVVAAASLSAAAASLSVAAASGGAKGPRSYPVIPVPSKGSFGGVLQKFPGCGGLFPHPYTFPAAAAAFSLCHKKEDAGAAAEALGGAGAGGAGAAPKAGLSGLFWPAGRKDAFYPPFCMFWPPRTPGGLPVPTYLQPPPQPPSALGCALGESPALLRQAFLDLAEPGGAAGSAEAAPPPGQPPQVVANGPGSGPPPPAGGAGSRDALFESPPGGSGGDCSAGSTPPADSVAAAGAGAAAAGSGPAGSRVPAPHHPHLLEGRKAGGGSYHHSSAFRPVGGKDDAESLAKLHGASAGAPHSAQTCCYPSEDSSVGGGRFLQGRGPSEKGSSRDRAPAVAGAFPLGLNSSRLLQEDGKLGDPGSDLPPPPPPPLAPQKASGGGSSSPGSPVHHPSLEEQPSYKDSQKTKENNQVIVSTKDDNSFSDKNKEHSFFITDSDASGGDFWRERSGRLGIQK

SEQ ID NO: 9050 - DNA, 742 bp, Homo sapiens
tgtgttgctccctgttgctttctacggggtctgcgctggcctcctcctcgggcgactgggccctgaggcaacagcgccttctcgagccccgaggattgaccgccccgagcctgcttggagcagggcctctctccagcgcggtgtgatgaaacaccagctgctgtgaagatatacccttagaaacgaaccgtctgttaatatgcttatgaaaacaggggctcagagaggatgtacttttctcaagaccacacagctggaaaaaaaccattcttccaggagaggctcctccaagcaaacttccccttacatctcttaccagaactgggtcacatgctcccatctaaaacaaccactggccattagaaatggtgttaccatgcctgtcttggaccaatcacatttgatcctctgaggatagagacatgttgccacctgaacaactgtggggtgctgtactcctggcaagcagggagaatggctgtggctaggcaactgacagcatctaccacaaatatgttactcagaagaagaatcgaggatggccataatttttatttaaagatttctattttacagaggcatatctgattaagggacatttaaacttccctgttaaacttatcaagacaaaaagacaaggcatcttgccacatttcttaaatattctctgcagtctctcttgaccttttcccagctgtgctgtaaacataaagataataacatatctgaataacattttatg

SEQ ID NO: 9051 - protein, 70 aa, Homo sapiens [sequence omitted]

SEQ ID NO: 9052 - DNA, 821 bp, Homo sapiens
gtggtggtttcccctgttctcgctctttcctgctgccttgtgaggaaggtacttgcttctcctttgccttgtgccgtgattgtaagtttcctgaggcctccccaaccatgcagaactgagcagacaattgagaggcctggctcatggatgggtttgaaccacctcaggactgaagatgagcggctcagtttcactaacaacaagaacagtgacaaattccctgcccggcccaagctctgtggtccttatgcaggtagagtcctcatgctgaatgtttgcaagctgactcttcaataagaccgtgagctccttgagaaaggaattgggtctctgtgcagtgtatcacatctacctcaatgctctgcttagaggaagtgtttgaaaattttttgtgtgataaataataatactaatccagttaagatatactgccctcggtatgaaaaactctatcccaaggtggagcagctttgaaaatgtggttggacgaaaatgaaatttcagatgtgtgtgtctcagcattgatttttctatttgtaataacacaccctggcatatctcctttgatatcaagaggataaaatgtccctaacagcatgctcttcattctgggatgccagtggcacccctgtcccagatgtgacaaccaaaaatgatgtcagacattgctgaattgtcccctggaggaggagaaaaatcaacccctttgagaactgctgggcagctctaaaggtcatccctaagttcagggtgaggagatgacctacccttctgccccgcaacgccatcctacatctgaaattcttcttaagggcatggtg

SEQ ID NO: 9053 - protein, 49 aa, Homo sapiens
MGLNHLRTEDERLSFTNNKNSDKFPARPKLCGPYAGRVLMLNVCKLTLQ

SEQ ID NO: 9054 - DNA, 5756 bp, Homo sapiens
ctttccctgtgtcagatcagggatcattttttttccttcctctactccctcccccctacccgcccctccctccctgtttcccttccctccctccctcccctctctgctgggtctgtgcgctggggcgcccgatcccctccgcagctgggacgctccgaactcgaggcaggagtcggctctccggagcctcgtccctcccttccccttccctgcccccttcccccacccccgactcgggcttggcgcggcggccagaggaaccccgagtcccggcccaggcccctgagctggagggatggaaaactcctctgcagcatcagcctcctcggaggcagggagcagccgctcccaggagatcgaggagctggagcgcttcatcgacagctacgtgctggagtaccaggtgcaggggctgctggctgacaagacggagggtgatggcgagagcgagaggacccagtcccacatctcccagtggacagcggactgcagcgaaccgctggacagcagctgttccttctcccgagggcgagcccccccacagcagaatggcagcaaagacaactctctggacatgctgggcacggacatctgggcggccaacaccttcgattccttcagtggtgccacctgggacctgcagccggaaaagctggacttcacccagttccaccgcaaagtccgacacacgcccaagcagcccctgccacacatcgaccgcgaagggtgtggcaaagggaagctggaagatggggatggcatcaacctgaatgacatcgagaaggtccttccagcctggcagggctaccacccgatgccccatgaagtggagatcgcacacaccaagaagctgttccgcaggaggagaaatgatcgaaggcggcagcagagacctccggggggcaacaagccccaacagcatggtgaccaccagccaggcagtgccaaacacaacagggaccaccagaaatcctaccaggggggctcagcaccccacccctcagggaggcccactcaccatggctacagccagaaccggcgctggcaccatggcaacatgaagcacccaccaggcgacaagggggaggcaggcgcacaccgcaatgccaaagagaccatgaccatcgagaacccaaaactggaggacactgcaggggacaccgggcacagcagccttgaggccccccgcagccctgacaccctggccccggtggcttctgagcggctgcccccacagcagtcaggggggccagaggttgagacaaaacgtaaagacagtattcttcccgagcgcatcggggagcggcccaaaattaccctgctccagtcttccaaagacagactgcggcgaaggctaaaggaaaaggtaccggatgaagtggccgtggagacgaccactccccagcagaacaagatggacaagctgatcgagatcctgaacagcatgcggaacaacagcagcgacgtggacaccaagctcaccaccttcatggaggaggcccagaactccaccaactccgaggagatgctgggcgagatcgtgcgcacaatctaccagaaggctgtgtccgaccgcagcttcgccttcaccgctgccaagctctgcgacaagatggcgctctttatggtggaggggaccaagttccggagcctgctcctcaacatgctgcagaaggacttcacggtgcgcgaggagctgcagcagcaggacgtggagcgctggctgggcttcatcaccttcctgtgcgaggtcttcggcaccatgcgcagcagcacaggcgagcccttccgtgtgctcgtgtgccccatctacacctgcctcagggagctcttgcaatctcaggatgtgaaggaagatgctgtcctttgctgctctatggagctgcagagtacaggccggctgctggaggaacagctgcctgagatgatgacagagctcctggccagcgcacgggacaagatgctgtgcccctcggagtccatgctgacccggtcgctgctcctagaggtcatcgagctccacgctaacagctggaaccctctgacgccccccatcacgcagtactacaacagaaccatccagaaactgacagcctgacagccagggggcctggcaggcggcccacgggcagctggggccctggtgcacagggccagatggacaggcgggaggacaggggtggccctggcgggagaaagaaatggggaggagggcaggcagagtcggtggccagtctggagccagacggggaagggagcaaatccctgagaggagtgcccccgcacaagccccccagcccgagcatgcaagctcacaccaataagggaagcatgtttctttttcctggtggccctggccctccccttcctcactcccgcctctcccctccccatcagacccatcccccacggagctttgtgtgagggatctcatcgctgtgactcctcggagaccttggcagcctcgcacgccggggcaccgcttgggtcagaaaggacctcggaaggctgaaaaagtgggtcggagacgggctcgcattgttcccgcatgctgtcagccgcagtcgccaactggcagcaggcgacgtgtagcagatgtccgggaggacaaaggcaggcacggtccccaccagccgcccgtaattgacggcctttgtcagccatggcagagctgacgctccacctcccacctccaagtcctcctcactgcagcccccacagcctcaggcctagggggtcaggcgcagcgggggagatggagtttgcagttccacttgcactcttttgtttattgtgttttatttttcaaaagtcggttgctttgaagtctctttggccaatgaaaatgcccgtgatgtgatcacacagtcagcactgttgaggacccccggattagtgggagatcaaacccagctcccctctagaagaaggattcgagccacagacagcttgccagtagccaattagggtaattggaaacttctgccccggcggggggtccccgctggaatcctgtgttcctcgccactggcttccagcgcctctgttttctcaaagggctgatactgtcaccactgggaccaagttaaacctggtcctggccccaggggccttgtggcaaacagggcacagaacgagactggcaaattaaaaccaaaattctagatggtgtcttgcgctccacacgcaggtcttactggggaaaaggatgggagtgggggctccccaggactcgattttagctaatgcgctgtgtcactgccccagctcggacgtagaagcccagccctccgtgagctcttgggaaaggggtgaattcactgggtcatggaagggacagtcaggtgaccagcggggtcgccagatgaagcttcccagccgggaaacaagacggggtttcttggcaggccctggtcctggggagcaggccctgttgttggctggagaggaaggtgtggggtggaacaggtgtccacatagctccatctctgggggctggagcacacactttgatgagcccccccggaaatgatgtcagagcctagccgcttccttatttgctcttttattgaggccgggcaggccctgggtcactttggaggcccctcttggtccacactggactggccgggaggtgatgggcggggaaggttctcgtgattgattgattctgagtctgagagtggcgagtggggagaggcttccccagttctctccagctttccctgcagctgcaacctgccctctggtcccaggtgtggagcctttgcctgtctctaaaaagagcctgttggcgacaaggtgtagggggcacaagtttacctgaaacaggtcagtggtctctcccaagaagcgcacgccacctctggtccctggccctgaaccctgccttcttcctccctccacggtttcttcccagactttctcaagctcctcctcactgcccttcctccccagcccagcctgggaacacagatgccccgcgggtaggaggcctcgagggaggagccgggctgatgcggggctgctcagggcaggccccagggcgagcttgccatcgtggccaggcagcctccacctgtgcttcagtggcccctgcccccctgaagcatgtggggtttgtccgctaggaggaggcaaggcccccgaagagaggagagacctgggagtgggagctcaggtcagggaggaggcaggggagtggggtctcccagacccaacggtgagctcagagcaagcttcacgcaggacgctccgaaacactgtgtggagggggctgtgttgtgggcaccttggggcctgattctccttcctccgaacgggctccttgatggcctggccacaggggcagctccccattggctgttaggaccagagtgtgaagaagaagtgaaatataaatatgtatacatatataaatatatttttaattacatgtcgtgtcacggtggctccagacatactgtttgcctagtttattccactgcttgaaagcgcttcctagccaatctgaacaacaacactttaagctgtttttctaaatgcaggttgctgctcctttttcagatatggaaggaaaacgttaagactattttttttttaaagaaacaacagtcaagcctaaaatttgagaccccgaggcagcttcccgagggagactgctcagacaggaactgcaggacagaagtggatgccccacagaccctggccccctccccaagtccatcccctctctgtggcatgaggaaggccgcgtccgagttgacctctgaatgtatgtgatgagaggcagagctggatattgcatttctaaggcttgcattgctttcccctcgcccgcggttcttggcgcatggaagaggcggtccagccatctgatgttgatcctgtctcagtctccccactgcctgtcaggatgagttagtcattgtttttctccgaggcggcctgcttgccacagccctgctccccaaggcctggtggctttgccgaagctctgggaccgcagccccagcgaggcccccaacctcacccagacgaggccaggagccccgccaccctccacgggatgtgcaccctcagaccccattctctctgttcgtccttccttgaccagtctgtaaaccttcactgtttggggatcgtcctgtccatccatgtaaatgtaaatgttggccgagtcggtatttattctgattgatttttattttattctattattttctccgagggatgagggtggggggtgtgggaagggtaccacagatcaggccggggcagctgtaggggcgggggcccagacagccaggccgccaccagagcagccccatggggtgccccagacgcgggcctccaagaagccaagtcccagtctgttttctggcatcagacaccggcccgtgttccttgtcagacagacagactctcaggcctgcctggggagtcgtgtccctcagctgcagggcactgtgttgggaaaccattggctgggcctttgaggacacagatcagaagaaagaaagacaactttcctctgcgcggaacactcacacggaagggctggccgcctccctgagccggctgggagtggacgacaggacctacctccccagagcaagggcctggggcttcccgccaaagctgccgcggaaccccgctagtgcgaccaccctccctccgtcggtatgtcctgctttccagctgaacccaaactacaagtgggtttaaaaaaataaacaccaccaccaaaaacaaaa

SEQ ID NO: 9055 - protein, 600 aa, Homo sapiens
MENSSAASASSEAGSSRSQEIEELERFIDSYVLEYQVQGLLADKTEGDGESERTQSHISQWTADCSEPLDSSCSFSRGRAPPQQNGSKDNSLDMLGTDIWAANTFDSFSGATWDLQPEKLDFTQFHRKVRHTPKQPLPHIDREGCGKGKLEDGDGINLNDIEKVLPAWQGYHPMPHEVEIAHTKKLFRRRRNDRRRQQRPPGGNKPQQHGDHQPGSAKHNRDHQKSYQGGSAPHPSGRPTHHGYSQNRRWHHGNMKHPPGDKGEAGAHRNAKETMTIENPKLEDTAGDTGHSSLEAPRSPDTLAPVASERLPPQQSGGPEVETKRKDSILPERIGERPKITLLQSSKDRLRRRLKEKVPDEVAVETTTPQQNKMDKLIEILNSMRNNSSDVDTKLTTFMEEAQNSTNSEEMLGEIVRTIYQKAVSDRSFAFTAAKLCDKMALFMVEGTKFRSLLLNMLQKDFTVREELQQQDVERWLGFITFLCEVFGTMRSSTGEPFRVLVCPIYTCLRELLQSQDVKEDAVLCCSMELQSTGRLLEEQLPEMMTELLASARDKMLCPSESMLTRSLLLEVIELHANSWNPLTPPITQYYNRTIQKLTA

SEQ ID NO: 9056 - DNA, 4484 bp, Homo sapiens
ccttcctctactccctcccccctacccgcccctccctccctgtttcccttccctccctccctcccctctctgctgggtctgtgcgctggggcgcccgatcccctccgcagctgggacgctccgaactcgaggcaggagtcggctctccggagcctcgtccctcccttccccttccctgcccccttcccccacccccgactcgggcttggcgcggcggccagaggaaccccgagcccgcatttgctgcatcgagcagttggtttagtatcagccaaacttgcagctgttcagaccgcgctccgccgagtcccggcccaggcccctgagctggagggatggaaaactcctctgcagcatcagcctcctcggaggcagggagcagccgctcccaggagatcgaggagctggagcgcttcatcgacagctacgtgctggagtaccaggtgcaggggctgctggctgacaagacggagggtgatggcgagagcgagaggacccagtcccacatctcccagtggacagcggactgcagcgaaccgctggacagcagctgttccttctcccgagggcgagcccccccacagcagaatggcagcaaagacaactctctggacatgctgggcacggacatctgggcggccaacaccttcgattccttcagtggtgccacctgggacctgcagccggaaaagctggacttcacccagttccaccgcaaagtccgacacacgcccaagcagcccctgccacacatcgaccgcgaagggtgtggcaaagggaagctggaagatggggatggcatcaacctgaatgacatcgagaaggtccttccagcctggcagggctaccacccgatgccccatgaagtggagatcgcacacaccaagaagctgttccgcaggaggagaaatgatcgaaggcggcagcagagacctccggggggcaacaagccccaacagcatggtgaccaccagccaggcagtgccaaacacaacagggaccaccagaaatcctaccaggggggctcagcaccccacccctcagggaggcccactcaccatggctacagccagaaccggcgctggcaccatggcaacatgaagcacccaccaggcgacaagggggaggcaggcgcacaccgcaatgccaaagagaccatgaccatcgagaacccaaaactggaggacactgcaggggacaccgggcacagcagccttgaggccccccgcagccctgacaccctggccccggtggcttctgagcggctgcccccacagcagtcaggggggccagaggttgagacaaaacgtaaagacagtattcttcccgagcgcatcggggagcggcccaaaattaccctgctccagtcttccaaagacagactgcggcgaaggctaaaggaaaaggtaccggatgaagtggccgtggagacgaccactccccagcagaacaagatggacaagctgatcgagatcctgaacagcatgcggaacaacagcagcgacgtggacaccaagctcaccaccttcatggaggaggcccagaactccaccaactccgaggagatgctgggcgagatcgtgcgcacaatctaccagaaggctgtgtccgaccgcagcttcgccttcaccgctgccaagctctgcgacaagatggcgctctttatggtggaggggaccaagttccggagcctgctcctcaacatgctgcagaaggacttcacggtgcgcgaggagctgcagcagcaggacgtggagcgctggctgggcttcatcaccttcctgtgcgaggtcttcggcaccatgcgcagcagcacaggcgagcccttccgtgtgctcgtgtgccccatctacacctgcctcagggagctcttgcaatctcaggatgtgaaggaagatgctgtcctttgctgctctatggagctgcagagtacaggccggctgctggaggaacagctgcctgagatgatgacagagctcctggccagcgcacgggacaagatgctgtgcccctcggagtccatgctgacccggtcgctgctcctagaggtcatcgagctccacgctaacagctggaaccctctgacgccccccatcacgcagtactacaacagaaccatccagaaactgacagcctgacagccagggggcctggcaggcggcccacgggcagctggggccctggtgcacagggccagatggacaggcgggaggacaggggtggccctggcgggagaaagaaatggggaggagggcaggcagagtcggtggccagtctggagccagacggggaagggagcaaatccctgagaggagtgcccccgcacaagccccccagcccgagcatgcaagctcacaccaataagggaagcatgtttctttttcctggtggccctggccctccccttcctcactcccgcctctcccctccccatcagacccatcccccacggagctttgtgtgagggatctcatcgctgtgactcctcggagaccttggcagcctcgcacgccggggcaccgcttgggtcagaaaggacctcggaaggctgaaaaagtgggtcggagacgggctcgcattgttcccgcatgctgtcagccgcagtcgccaactggcagcaggcgacgtgtagcagatgtccgggaggacaaaggcaggcacggtccccaccagccgcccgtaattgacggcctttgtcagccatggcagagctgacgctccacctcccacctccaagtcctcctcactgcagcccccacagcctcaggcctagggggtcaggcgcagcgggggagatggagtttgcagttccacttgcactcttttgtttattgtgttttatttttcaaaagtcggttgctttgaagtctctttggccaatgaaaatgcccgtgatgtgatcacacagtcagcactgttgaggacccccggattagtgggagatcaaacccagctcccctctagaagaaggattcgagccacagacagcttgccagtagccaattagggtaattggaaacttctgccccggcggggggtccccgctggaatcctgtgttcctcgccactggcttccagcgcctctgttttctcaaagggctgatactgtcaccactgggaccaagttaaacctggtcctggccccaggggccttgtggcaaacagggcacagaacgagactggcaaattaaaaccaaaattctagatggtgtcttgcgctccacacgcaggtcttactggggaaaaggatgggagtgggggctccccaggactcgattttagctaatgcgctgtgtcactgccccagctcggacgtagaagcccagccctccgtgagctcttgggaaaggggtgaattcactgggtcatggaagggacagtcaggtgaccagcggggtcgccagatgaagcttcccagccgggaaacaagacggggtttcttggcaggccctggtcctggggagcaggccctgttgttggctggagaggaaggtgtggggtggaacaggtgtccacatagctccatctctgggggctggagcacacactttgatgagcccccccggaaatgatgtcagagcctagccgcttccttatttgctcttttattgaggccgggcaggccctgggtcactttggaggcccctcttggtccacactggactggccgggaggtgatgggcggggaaggttctcgtgattgattgattctgagtctgagagtggcgagtggggagaggcttccccagttctctccagctttccctgcagctgcaacctgccctctggtcccaggtgtggagcctttgcctgtctctaaaaagagcctgttggcgacaaggtgtagggggcacaagtttacctgaaacaggtcagtggtctctcccaagaagcgcacgccacctctggtccctggccctgaaccctgccttcttcctccctccacggtttcttcccagactttctcaagctcctcctcactgcccttcctccccagcccagcctgggaacacagatgccccgcgggtaggaggcctcgagggaggagccgggctgatgcggggctgctcagggcaggccccagggcgagcttgccatcgtggccaggcagcctccacctgtgcttcagtggcccctgcccccctgaagcatgtggggtttgtccgctaggaggaggcaaggcccccgaagagaggagagacctgggagtgggagctcaggtcagggaggaggcaggggagtggggtctcccagacccaacggtgagctcagagcaagcttcacgcaggacgctccgaaacactgtgtggagggggctgtgttgtgggcaccttggggcctgattctccttcctccgaacgggctccttgatggcctggccacaggggcagctccccattggctgttaggaccagagtgtgaagaagaagtgaaatataaatatgtatacatatataaatatatttttaattacatgtcgtgtc

SEQ ID NO: 9057 - protein, 600 aa, Homo sapiens; identical to SEQ ID NO: 9055

SEQ ID NO: 9058 - DNA, 465 bp, Homo sapiens
catccttggcacccctatacctgagcctgccctcatctgaccctctcttcttcaccagccccatcgcaagtatacccagctttatcctccacatcaggggctgaggtgacaacatgtcggtaggaggaatccttgcaggtgatctgctggaaaaggagcacttccagggaggcttccccctgccacccagtgtgcttcggtgtcagcgcccgccgctgcagaggttctgcacgcagggaacaaactcctctccctgtcggcctctgcccagcacgctgtggatggttcatctgccacacacacaaagcagtgcgctggaaggaaagatctggaacactgagcccagggcttcgccccatccagggccacttggataccatggattgagatggcagggccacagaacgcaatccacctggaccctggagtccccaaggagctaccctggagaccagctggaccctc

SEQ ID NO: 9059 - protein, 116 aa, Homo sapiens
MSVGGILAGDLLEKEHFQGGFPLPPSVLRCQRPPLQRFCTQGTNSSPCRPLPSTLWMVHLPHTQSSALEGKIWNTEPRASPHPGPLGYHGLRWQGHRTQSTWTLESPRSYPGDQLD

SEQ ID NO: 9060 - DNA, 7324 bp, Homo sapiens
ggccaacgctggttctatccctgcttgttgcttttttttttccctccgcttcttgcgacggagactgctgtccaggaagtgcgcagtagtgattctagagaggctggaagctctcctggcgacgctggggccgcgaagggctcacgtaatgactcctactcctggtgagcgcaggcgttgcggaactcaccgtcccacaggacgtgtttccgggggtacattaattgtggctggacgcagtggcgcggcagtttaattctccggcggctgcagattgacgggacgagatggtcctggcagggctcatcaggaaactcggtcatcagctggccgagatcagggagcgcgctctcaagagtattctctgcaagattgagcacaacttaatctgctacgctgatctcattcaggagaggcaactttttcttcatttgctggaatggttcaatttcccgtccgttccgatgaaggaagaggttctgaacctgttaagcagattggttaagtatcccccagcagtccaacatttggttgacgttggtgcagtagagttcttatctaagcttcggtctaatgtggagccaaatctgcaggctgaaattgatggcattctggatggactttttcttcttccttcggaagttcctgcactatcttctgcctcataccaaaccaatcaaactgaattgtcaaaaaaccctgaaatcttaacaggatattttccccaagacaaaagtaatttccagcagatggaagtgccgccacgaccagtggtaaatcagactgtgaagtgcttgaagttttctacatttccttggctacccctgaccaccacagacagacatgtcctctcctctaatgaaagctctttaagaagtagtaaccacactttaatctggaacacctgtgaactattgaaggatgttatcatgcaagattttcctgctgagattttccttcaaaggccaaaaattgttcagagccttttatctctgttgaaactggcctttggagatggaaagcatcgcctggcattacagtcggtgtcctgcctgcagcagctgtgcatgtatttaagaaacagacttaactttcaccgagatccaggttttttctccaataaacacgacacagtttcccaaaattcttctttgtcttattgtcatgaagcaagaggtactcatcattcccagaatccttccccaggaagcagcagccctcggccttctgtggttgggcgcacaggccagcgacccagaggagatggccaggactgggatgcagcgtcctctagtggaagtagtagtcatgctcatgtaaactccaggatatccgttcattcacctttggatatgggacacatagatctgccagagctggaaactgaagacacattggaactacaattccagcagctcagtcttccccagttttgtgtctccattctggaatcagctgttcctctcttaagaacaggtagcagacaagtgataataagagttctggaattgcttacagaggatatgacacttattggtgaagcaatttcaacagatatctgggatgacagcagcctttttggtatagatatgaaggagaaactactcctggtgttgggagcccttggagaaaccatgtgctaccataaaagtagtatcagtttggagcagccagaggtgatgcttgtgcaccacagaatggcctttatcagcatttccctgtttgcagttcgactgctacaaacgcttctccctgttgaaaaggcaagcgagtttttatcagagcctatgtcaacagcattatttctcctttctttggacatgcctatttctttggaatatccaaatattcatgaagctgttgtggcctatttggaacagctgaattctgaaaactacagtatttataaacgaactgcagaggccgtttattcaattgaatgcacctgtaacttcctgtctgatattgggaaagagggagagaagaatctcttagaattagtggagctggcagaccaagccttgcgtagcttttcctatcatcagcatttcccgctaataaaggaaatcatcagcatttgttcaaagatctggaaatctgctcaggccagtccattactacaaggagaaagtcagaaggtgcttctccatatgttgtctcacccattgccacgagtgaaagctgaaacttaccactgctgtctggaaatcacgaaggaatgtttaggtgtccataatgtcactaaacccgtgtcttcactttgcaatggaattcattttctacttcatccaaaagttctgtatgaaatctctgtatttggcattcaagagcccgaaagtgaggtgaacactgctgccaaggccattctgttatacctgcttcagggacgattgatgatgacagcattgacctggaacaagtttattgaatctctctgtcctgtcatcccaatactacagggctatgccgacacagaagatcctctgggtaactgcattctccttctaagcaaagcaagttctgacacagaagagatgcttccgtgtactacccgattaaagtccatgctgcgacttttgctagtgaaaaagccatcggtccgttcgctagcattaaagcttttagcattccatcttaccagtgaagaaggggctgatacaaagcgtcctctaatagacgccagagttctctccagagttactgatttattcattgggaagaaacctattgaactcagactggatgacagaagagagctggttattaagttggagactgttgaaaaggtatatgaaatcttcacctcagatgatgttgatctcgttttgagaaagtcagctgctgaacagttagctgtgattatgcaagatattaaaatgcatgctgtggtgaaaaagttatgcttaattgacaaaataattgagtatttaaatgaatgtgtgagtcaagatggcaaggttgtagaatgtttggtacaaccatgcctcacactcttgaggaaggttttatgtggtgatccagtcatgcgtgtttcgctctcgcaacagtcttctcttttgaccgtgttattcagagtttccttaatatttcatgaagattgtagtgtcgtgactgaagttggagcactattttgtcttctattatttgatgaagtatcgagaatggatatgtggtctgttaatccttccaataaaccttctttgccatcggtcttcagtttgcctgtttccgtttttagaaggtaccatctacctgttcatgtaattggacaccatgctgtgagtccttactccatagttttgcccttatctgctgattgtttggccttgaagccggtgtcagatatgctgagaatagcttggaacctgtcatggtatcatgggagtgataatctgttgaagcaaatgaactctgaaactaaaacgcaagaaattttagatgcattgaagttatctacagaggacatcctcactctgaagataacacacatggctagtgggctgcaggactgcctccattccattgttcaggctgcaacccacagggaagttagggctgctgtcaccaggatgagtttttatcttctgaatgacagattgtctttaaagggttgccctggtccatgtggggttaccttgaagtccttggcttggcacaccgcactaaacaggtttttacaggtgcttcctgcttgcactgaagatgagaaactgctaatagatatcatacattttttaaataaattaataaaggaacaaagaaaaaattcttcactagaacttctaaactggattctcgaattacttcttagacatagtgcaaacccactgttagacctcttggttctgacagagtcacaggcacgagaagaaacagatgatatccggactgctgtcaggcaacaacttcagaaagaactgattgctctttttgataccttgctgctcaatttcatggaagttactgacaggaaatgctcggaacttctttacgtttttcaaacgcagctggctctgaaactgctccagtgtctgaaagtgacggatgcgcctcatttctatggcctgccgtcccttgagcggaccttacgagggatggctaacctcactgcgtttccgggatggagctcacactctcctctcacaaagcctctagatatctgtgtgaagtacttgtcaggtctccttgaggtcattacttctttttatgtggagcgtggaggaaatgctatgtccttcatgggaaaaggtgttacaaagagcacaattctttgcttgcttcacttatcccatgagatgatggcccaggctgggagcttggagtggatgtcactttggttcttgcctttgggtagtcatagtgaagaacatattcctactcaacaaggattggcttggttgattccattatgggttgatcgggacccagaggtgagattcacttcactgggattaggatcagcactgaccacccttgaaacgggctgtgtggccttagcaaacagttgtcagaacatttccggtgggctctggggaactgtggtgaacattcttctggaccagtcagaatgtagtatggtgcgccgggaggcggcatttattcttcagaatctccttgtaattccaatgcctacagaaattataaaggattatacttggcagggtccctgtgttcatgatgaggactctggcctatcgctcattggaaaacctgcccttcaggctcttttatatcactgccatttttatgaacatttgaatcagatggtaaagcattgttacctaggacggtgtatgtttgatttgaatttttctgcttttgatagaaattcagaaagcaatgatttaaatggtttagatgactcattcaagttttggagggctccatctaggacaagtcaggatcgagatccaagttctctctccacctcagaaacaacggtggcaccttcattggggagtactgaatttcagccacttgtgcagtcaacaacacttctacctgaagcctcccatgaccagtttgtggctcaaggtcaccaggaaagtacatcaccacggccacctcatgattcatctctttctgctcccctgcccaaactgtgtgtttttgttactccatctcttctttcagcaatgtgcagcctcttggacaacctcttgacgattgctcccagagacactgcaaaggcttttcgacaagctcatctcatagaacttctctgtagcattgcagatgctaccctcatacagacatgtgtccaggaactcagagccctgctgccttcatcacctccagctgaacacactcaggctcaggtttcctttctcctggaatacctatcctctttgtccaggcttctgcagtcatgtttattggtggagcctgaccttgtgattcaggatgagcttgtgaaacctcttatcaccaatatcattggaattctcaccatatgtaccaaagatgtattagataaagagttaatatcagctttttatcacacatggacacatttatttaatcttctggccatgctcctgaggaaagctggtgccatcacactcccgtttgttaccgtggccctggccaagcactggacagcggcgattgatatgttctgcacatgtgcaggcttgtctgccacgtgtcctgccctgtatactgccagcttgcaattcctttctgttctcttgaccgaagaagcaaaagggcatctccaggctaagagcaaaacacatttatgctgtagtccaacagtggcttcacttcttgatgactctcaggaaaatcagaaatctctagaacaacttagtgatgtaatccttcagtgctatgaagggaaatcctccaaagatatcctgaaaagagtagctgcaaatgcattgatgtcactgctggctgtcagtagaagagcacagaaacatgctttgaaagccaatcttatagacaattgcatggagcagatgaaacacataaatgcacaactgaacctagattctctgaggcctgggaaagcagcattgaaaaaaaaggaggatggtgttattaaagagttaagcattgccatgcagctcctaagaaactgtctttatcaaaatgaggaatgtaaagaagcagctcttgaagctcaccttgtccctgtcttgcactctctctggccttggattttgatggatgattcattgatgcaaatttctctgcagctcctttgtgtctatactgcaaattttccaaatggttgcagttctctttgttggtcaagttgtggacaacaccctgttcaagctacacatagaggagccgtgagcaactctctgatgctgtgtatcctaaagttggcttcccagatgccactggagaacaccacggttcagcagatggtttttatgcttctttcaaacctggccttgtcgcatgactgtaaaggagtaattcagaagagtaacttcttacagaacttcctctctctagcattgccaaaaggaggaaataaacatctaagtaatctgactattctttggttgaagttactcctgaatatatcatctggagaagatgggcaacaaatgattctgaggcttgatggctgtctagacttactaacagagatgagcaaatacaagcacaagagcagccctttattgcctcttcttatctttcataatgtttgcttcagtcctgcaaataaacccaagatcctggctaatgaaaaagtcattactgtgcttgctgcctgtctggaaagtgagaatcaaaatgctcagaggattggagcagctgccctttgggctctgatttacaattatcagaaggcaaaaacagctttgaaaagcccatcagtaaaaagaagagtggatgaagcatactccttagcaaagaaaactttcccaaactcagaagcaaaccctctaaatgcctattatttgaaatgtcttgaaaacctcgtgcagctccttaattcttcctgagtgccatgggatgctacaccttgaagctgacagtcatcaacaggggagctaaagttgaagccagctgtgtgtagcagctgttacctgaagacgtgctacctctctacaaagtgttgatccccttctttcccatgagagagagaactggtgatactccaacaccgtccagttgtggcagctctccagaagtaatagcagctgacaactttctgtgccttttcctttctgttgaaaaggcatagaaagttctgggaacataaacatttttacccttttctatgccatttattttgtaaaaatcctatttaacagttatttaataaaacaatatttttagaaactaaaaattgactaat

SEQ ID NO: 9061 - protein, 2226 aa, Homo sapiens; identical to SEQ ID NO: 1144

SEQ ID NO: 9062 - DNA, 2574 bp, Homo sapiens
ggccaacgctggttctatccctgcttgttgcttttttttttccctccgcttcttgcgacggagactgctgtccaggaagtgcgcagtagtgattctagagaggctggaagctctcctggcgacgctggggccgcgaagggctcacgtaatgactcctactcctggtgagcgcaggcgttgcggaactcaccgtcccacaggacgtgtttccgggggtacattaattgtggctggacgcagtggcgcggcagtttaattctccggcggctgcagattgacgggacgagatggtcctggcagggctcatcaggaaactcggtcatcagctggccgagatcagggagcgcgctctcaagagtattctctgcaagattgagcacaacttaatctgctacgctgatctcattcaggagaggcaactttttcttcatttgctggaatggttcaatttcccgtccgttccgatgaaggaagaggttctgaacctgttaagcagattggttaagtatcccccagcagtccaacatttggttgacgttggtgcagtagagttcttatctaagcttcggtctaatgtggagccaaatctgcaggctgaaattgatggcattctggatggactttttcttcttccttcggaagttcctgcactatcttctgcctcataccaaaccaatcaaactgaattgtcaaaaaaccctgaaatcttaacaggatattttccccaagacaaaagtaatttccagcagatggaagtgccgccacgaccagtggtaaatcagactgtgaagtgcttgaagttttctacatttccttggctacccctgaccaccacagacagacatgtcctctcctctaatgaaagctctttaagaagtagtaaccacactttaatctggaacacctgtgaactattgaaggatgttatcatgcaagattttcctgctgagattttccttcaaaggccaaaaattgttcagagccttttatctctgttgaaactggcctttggagatggaaagcatcgcctggcattacagtcggtgtcctgcctgcagcagctgtgcatgtatttaagaaacagacttaactttcaccgagatccaggttttttctccaataaacacgacacagtttcccaaaattcttctttgtcttattgtcatgaagcaagaggtactcatcattcccagaatccttccccaggaagcagcagccctcggccttctgtggttgggcgcacaggccagcgacccagaggagatggccaggactgggatgcagcgtcctctagtggaagtagtagtcatgctcatgtaaactccaggatatccgttcattcacctttggatatgggacacatagatctgccagagctggaaactgaagacacattggaactacaattccagcagctcagtcttccccagttttgtgtctccattctggaatcagctgttcctctcttaagaacaggtagcagacaagtgataataagagttctggaattgcttacagaggatatgacacttattggtgaagcaatttcaacagatatctgggatgacagcagcctttttggtatagatatgaaggagaaactactcctggtgttgggagcccttggagaaaccatgtgctaccataaaagtagtatcagtttggagcagccagaggtgatgcttgtgcaccacagaatggcctttatcagcatttccctgtttgcagttcgactgctacaaacgcttctccctgttgaaaaggcaagcgagtttttatcagagcctatgtcaacagcattatttctcctttctttggacatgcctatttctttggaatatccaaatattcatgaagctgttgtggcctatttggaacagctgaattctgaaaactacagtatttataaacgaactgcagaggccgtttattcaattgaatgcacctgtaacttcctgtctgatattgggaaagagggagagaagaatctcttagaattagtggagctggcagaccaagccttgcgtagcttttcctatcatcagcatttcccgctaataaaggaaatcatcagcatttgttcaaagatgtaatattttctttcttaatgtgattacgttattattggacacttagggtgtgtgtaaacttagaaacagtgaaagtgaaactgactgtatatctttgttattattttttagtttaattgcttttatatgtgtctgatttttaaagggtatatgtacagctgcattaggatacttaactgttatattcaagattaaacttcaaaaatgtcatgcctacaatcaaaatgaataatccttggatttttatacatttgtttttggtatccatccagactattcacacacattgtttatttatctttaaagttttaattaataacttaaactgagagttttgtaacttttattactttgtacctttttcttatgtggatttttagaaaagactgtgtattggttaatttattttgaggacatcagcaaatttctatttagaacttagtgtctttattgcttttggaaagaataaattctgtgatgtgat

SEQ ID NO: 9063 - protein, 601 aa, Homo sapiens
MVLAGLIRKLGHQLAEIRERALKSILCKIEHNLICYADLIQERQLFLHLLEWFNFPSVPMKEEVLNLLSRLVKYPPAVQHLVDVGAVEFLSKLRSNVEPNLQAEIDGILDGLFLLPSEVPALSSASYQTNQTELSKNPEILTGYFPQDKSNFQQMEVPPRPVVNQTVKCLKFSTFPWLPLTTTDRHVLSSNESSLRSSNHTLIWNTCELLKDVIMQDFPAEIFLQRPKIVQSLLSLLKLAFGDGKHRLALQSVSCLQQLCMYLRNRLNFHRDPGFFSNKHDTVSQNSSLSYCHEARGTHHSQNPSPGSSSPRPSVVGRTGQRPRGDGQDWDAASSSGSSSHAHVNSRISVHSPLDMGHIDLPELETEDTLELQFQQLSLPQFCVSILESAVPLLRTGSRQVIIRVLELLTEDMTLIGEAISTDIWDDSSLFGIDMKEKLLLVLGALGETMCYHKSSISLEQPEVMLVHHRMAFISISLFAVRLLQTLLPVEKASEFLSEPMSTALFLLSLDMPISLEYPNIHEAVVAYLEQLNSENYSIYKRTAEAVYSIECTCNFLSDIGKEGEKNLLELVELADQALRSFSYHQHFPLIKEIISICSKM

SEQ ID NO: 9064 - DNA, 2847 bp, Homo sapiens
ttccaaataaggtcacatgcacaggtacaggggttaggacatcaacttctctcttggaagaacagaattcaactgatacaacactggaggggtgaaaacaagacagagagagagagagagagagagagagagatgaggggcccgcacatgccctgctcatctcaaaacttctcgagaagcaaatctaacttgcaggaactttgagaaaggcaggagaagcaaaaaagcaaaatgagattgttttcataacttaaagaggctgaaaatgatgaaactgggctgagatgtgttacaggagcctacacagctagaaggatagattcgaggtcatgctttgagcaaaagccattaaaatacataaataacattgtatcacacttttgcctctcaagttgagactgcctctaaattgactagcgttacaaatatcctaacagaaaactatccctaaaacctagaaagccatattatgctttggcaatcatctgaccatgtacaacaaatgtaatgaaaacggtaaacctgaaccaaggcaaacccaacagtttaatttaaaaacttgaagatactaagtattcccttcaactggacattcagaaacttcacgtggctacattgtatttccccccacgagttgcttcagggttgtgaaattcactggactgtggagggagccttaaacctttgtgggtgattgacgtctaaagtacctgagcttttctggttctgctgaccctcagtctcctggaccctagaagaagaatcagacccatccttcagtctcatctctagaagcccagaataaaatgaaaaagagatgggttttcgccatgttgcccaggctggtctcaaacttgtgagctcaagaaatccacctgccttagcctcccaaagtgctgggattacaggatgagccactgagcccagctgactccaagcttttctaatgaggtttctgggccacagagtggagacagtccctatcctcaaaggatgctacagtgcattgtcaaagaccaatgcgtcaaaatacttatggaagaaggtgcccaaaagttcgaagacagttatctacacgggaggtgtaagaaaatcaccttggaatacccatctcggaagaacaggtgtgaatgcccttgaatcacttggagagcttctcttcgatgttaaattattgtagtaacaccaagctcaccacccagaatgatgcagtcagcctcccctggaaggaatgaaggtcgtagtctcctctccatagatgtgtctcattttctatttaaaaaaaaaaatgtgaattcaggcactgcgtttgaaaagtttggcagcaaaacaaatgtccagtccatgtcctgggtcctaggggagggcaaaaaatggcctcctggcccatggtgtggcacacacatgccctcctctcctggctgccttgtgcccaggcccagccagaggcctgaaatgtggccatgtatggcaacacggaccgtgaagcccggagatctgcagcatcaagccccatgcatgagcgaagagagcactgacagcagaggatagtccttcctctgagaaacacggttcttacagggttggggacaagaggcattctgcagctgggatcagcctcagcttggcaggagaggatcaagcaccctaggggactcagtgtggcaggaagaactcagagctccatcctgtggctgctcaggggctgaagcagaggcattgcctttggactgtccaatgccctgaggattttggatacggtgagtctttctgctaaagaggcatgtgaggtccttgggcaattgtttaaaataagaacaggtgaccatatttgcaccccaatatgaggaagagtttacaaaggcttccattatttccacaaaactacagaaacaggcctcgtgattcaggagactgaagggacctggtggacaagaataagagccaagtgaatcaaaggtttctttaagggaacaaacatcaggacagaatttcatgaagtggtaacacaactagaaaggagcacagaaaaaccagtgcatcccgcttttgtataatgaagaccctgtaaggggtaacaagactcagtcaaggtcaagtgaagcagatgggtacaaacgcgacgcaatgcaagcaaatgaaagtgatgccgtgacctgactgccgtggttagaggacttcttatgctcaagcacaaagaacagaccgtaaggagcagctgtgatccagggaaccggataggaagatgttgcctgggccagaatgaccctacgaacagaaaaactgagatctacagaagtttatggaaaagtacccatgatcacactgctgatatgtggcaaacctgagctatagataccaggctttacagaagcagaatcaggttgtggttgcagaaaaaataagaacagcgaaagacgcgtggggcatcacatctccatcttgcaggaactggcagcgatggtccaggccaacgcctctcgaggtggcctcctcctcccatgtgagggaaggactcaccaggggcttccctgctggtagggctcagagacgttactgttatttaactccaaacccatcaccggcgcctgagatgcaggcttgtgtgcggggcagatggccagctgtcagggaggacgtgagcacttcactttcaaggaccggttctgaccctggagcacgcagggtgcggcctggcgctgagtcccgtgttactcacctcaacgtgttttaacgctgtttcctccttcccatttgataacccacctcttcgacaaacgaccttcaatatttgagtggtaacagaaacggagccactgtggcaataaattgctcataagcttggac

SEQ ID NO: 9065 - protein, 54 aa, Homo sapiens
MLKHKEQTVRSSCDPGNRIGRCCLGQNDPTNRKTEIYRSLWKSTHDHTADMWQT

SEQ ID NO: 9066 - DNA, 806 bp, Homo sapiens
ctgatgtatgagctgcacagaaagttcaccaaaccacccaaagccattgccataggcatctgaactgcaagccagcacaagaagtcgatgctttcatacactttccaagatgtcagaacaaggttccaaatcataataagaattcactccttacctagaagtaaaaaaagaggacacacttttgaaccgctcacatgaccacaccattctgcggggacgtccttgtgttgaggggaggtctgaagtccatggaagaagacgcagtggctgctggagctcgtgcagaggaagggaccctcagaaggacaggtgaactgtcggtggcaggaaaaatggtgggcacatttccagaatgacaaatgggagaagcaatcgtgacatctccaggtgggggaagcataggaggaagaggttgttctctcaggaagttgcctcctagcctccaacgaggcctttcctatcactgctcattctcttctgtgtgtggattggatactgcggtcacccagagaagctggtgcacaccaggcacatgaaggggcgatccttgtctccttccgactcatgcgcgtgtcttgatgtttaaactcagaaggatgtttaaactcggttgtctatgagacaaaatggctagtttttggagggtctggggcattacattctgcagattaagatttttgcccgatattggccaagtcaaggaaatagatgctaaggccaaatgctttgaaaaaccacaaactcctgtttctgtgggaaatgtttggcctgttgaatcaaactcaataaagaacagtaaaatctgt

SEQ ID NO: 9067 - protein, 36 aa, Homo sapiens
MLSYTFQDVRTRFQIIIRIHSLPRSKKRGHTFEPLT

SEQ ID NO: 9068 - DNA, 600 bp, Homo sapiens
tgagctcctggctggagaattcgctcacaagggtgatgtgatcatcttacgtgtaaaagaaaaccgaatttcacttctggtggtgactattgtctgattcatcattacagtaaccacccaaggaaaccctgcccacaaaaagcattcttctggagaagtaacagtttttggtgacacacatgatggcaacaatgaacgctttgtggcacgatgacctctatgaaaaagagagatatacaggttttgcttttgttcactcaactaattaccaacctttcattatacctctactcggacatctaaacttcagttaagctctatgtttaagtgggatggatcttcaatttgcctacctaaggatttgaagtcaggtttacagaggcatcattttacaattatcaactttgataaatgcagattgtcatggaactaccaccagaatccagatagagaacatgctatcatccctgttatatccctttgtggctaatccaccacactgttccatccaccaaagtccctagaagccactgatctgttttatgtccctctggttttgtctttttcaaagtctgaaataaatggaattgtggagtgtgt

SEQ ID NO: 9069 - protein, 56 aa, Homo sapiens
MFKWDGSSICLPKDLKSGLQRHHFTIINFDKCRLSWNYHQNPDREHAIIPVISLCG

SEQ ID NO: 9070 - DNA, 594 bp, Homo sapiens
ataaagacatgatcatctggaaacatctgcaagaaaatctaccaaaatgaagacacactcacaaaatgaccttcctcctacatcccagctcttgtcatcttaaaggcattcactccatggaggccccaggaggcgaatggcttctctcatcttgggctgcagctttgctgatgacttctggctcctcatggaaaacagaagtgcagggcatgcttttccattaagctctttctgctaaagcagattcgaagttaagagaagcaggcactgctcattcttgtccaacattcatggacaaagaactctgggcttcagtcttgtcaaccctcgtgcagggctctgctcattagcaggaatcttcagatgactcatattcctgggcatttgatcttttgtgataagaagaaccagcctggctcactgactgagtgaacacttcagtggtctgtagtccctcagttgcactggacacagttgaggccctcaggagccacgcggggtcagcggtggtggcattgggcagagcagctcaccgagttccagaagctgcatgccacccattccgagtctgtgaccctccacagcctggcccac

SEQ ID NO: 9071 - protein, 52 aa, Homo sapiens
MTFLLHPSSCHLKGIHSMEAPGGEWLLSSWAAALLMTSGSSWKTEVQGMLFH

SEQ ID NO: 9072 - DNA, 392 bp, Homo sapiens
agttgctctctgctggataagtggtggccaagagaaccacgtgtgctggtggaaaagcgctggacctgctgcccagcaccacagccgacagcagcaaatggccattgaacacttcaaaatgcggttatcagtggatgcctcaccttagaaaagtcccgtaaaactgaggaagattgtgggaggtatccttgggggtcatctagaccagcactccagcctgccccaaatctacagatcaaaaaagcaaagtccagagaagtaacgtctcaaggtcacataagtcagtccctatcaacaacagcactaaaatcaaggcttcctaaaaccagtcggatcattgttccattatagcatatggtaattcttgttagatggaaaacagaaatatttag

SEQ ID NO: 9073 - protein, 80 aa, Homo sapiens
TLQNAVISGCLTLEKSRKTEEDCGRYPWGSSRPALQPAPNLQIKKAKSREVTSQGHISQSLSTTALKSRLPKTSRIIVPL

SEQ ID NO: 9074 - DNA, 910 bp, Homo sapiens
aaggaggggctatgaaatatcttcactccaggttctttatgagctgcagtgtatcatttttatcagcaattggaagcatgctgcatgtttgactctgtggactcctgctttacacaacagaacattccgatggtgtgcatgtgccatagtacgtatagaaattctaagaattcatataatttacctgctaaatcagggactattacagtctgctgtgtaaattcacattttggcactctttaaaaagtggattattattgacccaatagaccataacagctccaaagaagccgttactgtacatcgtgtaaagccttcgtggtgtgtgttttattgaagctctgtagctgtcgggatctgcttgtcaatctagctgccatgcgcgtgcaccaaatgcattgctaaagatgccttgtaaattgaagctttagtcaaattacccttgttcttgtccaataagccatggtataaaattggatatttccactgcagtttctttctccacctccagaattctatttccctgtatttatagaggttgaaattttgaaatgtggataagggagtggtgatttgatttcaagtttcaaaaaaaaaaaaaaaaaaaaagcaggaagaaaattgaagacagtttttgctttgcatgaaaaaacatctcaaagaatgcatgaatttaccagcttccaggaggctgacaacggtcacagtgagatttctctactttaggcttttgggaatccaaataagatttttatttaattttctatgtgctaattttgtgtttttccacctgtctgtcctcttctttcatttaacaaaaaaatgaacattggaacatttgtcaggaaaaaaaaaaaactttttagttacttgtaccttcagtaaaaataaaataatactttgaggtctc

SEQ ID NO: 9075 - protein, 60 aa, Homo sapiens
MKKHLKECMNLPASRRLTTVTVRFLYFRLLGIQIRFLFNFLCANFVFFHLSVLFFHLTKK

SEQ ID NO: 9076 - DNA, 462 bp, Homo sapiens
tctgctgtcctctggggagaatgcatttgaactcatctcaaaaagctggttttctaccctggaggtctccgatggctactgcgagaagaaagccatgtcccgaaagcagtgatacagattggcagccactgcagagatgcagaatgtcgaagagtgtgtgtgttggaattcctggacagacactgctctgaaagaaaaaccctctggttttggaagtctggctgggcaaggcaggcggaggtcatggaggggccggcgtgatggaatcctcggtgcagctgactgcgcagcccgacactggcgtggacactgggacgcgtcatgcaacatccaaccagagcacactcacgaggacaaacatgggcccacctatttaccatcagaaaaacaaaatcatgctctttcactttgaaagaagggggaaactggaaagttattatttgaaataaaatggaattttag

SEQ ID NO: 9077 - protein, 91 aa, Homo sapiens
MQNVEECVCWNSWTDTALKEKPSGFGSLAGQGRRRSWRGRRDGILGAADCAARHWRGHWDASCNIQPEHTHEDKHGPTYLPSEKQNHALSL

SEQ ID NO: 9078 - DNA, 1667 bp, Homo sapiens
tcattcacttaccaagtatttctctgctttctgccatgtcacgggcccatgatcccctggagattgagggaaataagatcacaggagctcccagtctgagtgagaaaaggcagctgctctgtggtactgtgcactggacctgggaatggcctaaggagacaagcattgagggctgagctcagaagccagggagaagagctcagaaccccaggagaggagctcagaaccctgggagaggagctcagaaccctgggagggcttggtaaccttcgaggatgtggccgtggagttcacccaggaggagtgggcgttgctggaccctgcccaaaggacactgtacagggatgtgatgctggagaactgcaggaacctggcctcactagggtgtcgtgttaataaacccagtctgatatcccagttggaacaagacaagaaggtggtgacagaggaaagaggaattctaccaagcacctgtccagatttggagactctacttaaagccaaatggttaactcctaagaagaatgttttcagaaaagaacagtctaaaggtgtaaaaacggaaagaagtcatcgtggagtgaaactcaatgaatgtaatcagtgttttaaagtcttcagcacgaaatctaacctaactcagcacaagagaattcatactggagaaaaaccctatgactgtagtcaatgtgggaagtccttcagtagcagatcttaccttactattcataagagaatccataatggggagaaaccctatgaatgcaatcactgtgggaaagcatttagtgatccctcatcccttagactgcatttgagaattcacactggagaaaaaccctatgaatgtaaccagtgttttcacgttttccgcaccagttgtaacctcaaaagccacaagaggattcacacgggggagaatcaccatgaatgtaatcagtgtggaaaagctttcagcacaaggtcctctctcactgggcacaatagcattcatacaggggagaaaccttatgaatgtcacgattgtgggaaaaccttcaggaagagctcctatctgacacagcacgtaagaactcatactggagaaaaaccctatgaatgtaacgagtgtgggaaatccttcagcagtagcttttctcttactgtgcacaagagaatacataccggagagaaaccctacgagtgcagtgactgtggaaaagcctttaataatctctcagctgtgaagaaacacttaagaactcacactggagaaaaaccctatgaatgtaatcattgtgggaaatccttcacaagtaactcctatctttctgtgcacaagagaatacataatagatggatatgaattactgcaggaacttctggaggaaagcactcattgatctttcatccctaagatagtttgagagagctcacactggatatataagttatttgttgcagcataacaaatgatccccgcaaattttgtggcttcaaacacgaaatgtttattctctaacaatttctacagatcaggaattcaagaacagcttatctctgtagttacactgcaggatctctcatgcctttacttacaatcaagatgtcagccaaagctatagtcatctaacatctttactgatgaacagtccacttccaagatgacttattcacatgcctggaaa

SEQ ID NO: 9079 - protein, 331 aa, Homo sapiens
MLENCRNLASLGCRVNKPSLISQLEQDKKVVTEERGILPSTCPDLETLLKAKWLTPKKNVFRKEQSKGVKTERSHRGVKLNECNQCFKVFSTKSNLTQHKRIHTGEKPYDCSQCGKSFSSRSYLTIHKRIHNGEKPYECNHCGKAFSDPSSLRLHLRIHTGEKPYECNQCFHVFRTSCNLKSHKRIHTGENHHECNQCGKAFSTRSSLTGHNSIHTGEKPYECHDCGKTFRKSSYLTQHVRTHTGEKPYECNECGKSFSSSFSLTVHKRIHTGEKPYECSDCGKAFNNLSAVKKHLRTHTGEKPYECNHCGKSFTSNSYLSVHKRIHNRWI

SEQ ID NO: 9080 - DNA, 701 bp, Homo sapiens
gaattcatactggagaaaaaccctatgactgtagtcaattgttttcacgttttccgcaccagttgtaacctcaaaagccacaagaggattcacacgggggagaatcaccatgaatgtaatcagtgtggaaaagctttcagcacaaggtcctctctcactgggcacaatagcattcatacaggggagaaaccttatgaatgtcacgattgtgggaaaaccttcaggaagagctcctatctgacacagcacgtaagaactcatactggagaaaaaccctatgaatgtaacgagtgtgggaaatccttcagcagtagcttttctcttactgtgcacaagagaatacataccggagagaaaccctacgagtgcagtgactgtggaaaagcctttaataatctctcagctgtgaagaaacacttaagaactcacactggagaaaaaccctatgaatgtaatcattgtgggaaatccttcacaagtaactcctatctttctgtgcacaagagaatacataatagatggatatgaattactgcaggaacttctggaggaaagcactcattgatctttcatccctaagatagtttgagagagctcacactggatatataagttatttgttgcagcataacaaatgatccccgcaaattttgtggcttcaaacacgaaatgtttattctctaacaatttctacagatcag

SEQ ID NO: 9081 - protein, 167 aa, Homo sapiens
MTVVNCFHVFRTSCNLKSHKRIHTGENHHECNQCGKAFSTRSSLTGHNSIHTGEKPYECHDCGKTFRKSSYLTQHVRTHTGEKPYECNECGKSFSSSFSLTVHKRIHTGEKPYECSDCGKAFNNLSAVKKHLRTHTGEKPYECNHCGKSFTSNSYLSVHKRIHNRWI

SEQ ID NO: 9082 - DNA, 540 bp, Homo sapiens
caggtggccctgaattcattgcctgctcagcaaaataaaggcccagtgtggaagccggaacttgcatttgaagaaggatgggaaggatgggttgaggagggcccatccccagcagcccgagagggaggaggccacggagacttggagcattcccgtttcttccagagcgctgcgggataaaggaggagcgtcctgcttcccggctgccctgttgctgtcggagtcacaggatggcggctgtcatcctgccctcgactgctgctccgtcttccctgttcccagcctctcagcaaaaaggacacacacagggcggagagctggttaatgagctcctgacaagctggctacggggcttggtaaccttcgaggatgtggccgtggagttcacccaggaggagtgggcgttgctggaccctgcccaaaggacactgtacagggatgtgatgctggagaactgcaggaacctggcctcactagggtgtcgtgttaataaacccagtctgatatcccagttggaacaagacaagaaggtggtgacag

SEQ ID NO: 9083 - protein, 102 aa, Homo sapiens
MAAVILPSTAAPSSLFPASQQKGHTQGGELVNELLTSWLRGLVTFEDVAVEFTQEEWALLDPAQRTLYRDVMLENCRNLASLGCRVNKPSLISQLEQDKKVV

SEQ ID NO: 9084 - DNA, 511 bp, Homo sapiens
cctcaatgcttgtctccttaggccattcccaggtccagtgcacagtaccacagagcagctgccttttctcactcagactgggagctcctgtgatcttatttccctcaatctccaggggatcatgggcccgtgacatggcagaaagcagagaaatacttgcccagcagaactccagccaggcgtgacttcaatcatccacctgctccaggggacattcgggcagaccaccctgtgcaaaggctgtgacgttgccactctggaataacacggtcaccaacgtgtagagaaccctcagcctgcagggcgatcccacaggtcagcatggcttcccactcgtcaaacctcctctcctctctttaaacttcacacctcctcccctgtcccctctgtggtaactgcttcctaacgagcccttgacgatcccagcctcccggtgctcacaccctgtgtaggcccgacgcacacacggaattagagctgacctgtgtgaccagcagaatatggctgagga

SEQ ID NO: 9085 - protein, 59 aa, Homo sapiens
MLVSLGHSQVQCTVPQSSCLFSLRLGAPVILFPSISRGSWARDMAESREILAQQNSSQA

SEQ ID NO: 9086 - DNA, 292 bp, Homo sapiens
ggcgcttttggccccgcgggaggggccgggctcgatgagaaaagcatcattcaagctcagattcgtgttgaagcctgccacaaggtccacctgttgttgtgggtttttgggtgaccaggtgagtacagtgtggaacctacaacaaggtttcagcaggctctgctgtgtagaagaactcctcgtgggcttttcctgtgctggggttgtaaccacattgaagtcactaagagtgaaggtatcttaaggaaagttcaaggtaaaaagacagaggtgtttatggttacatgtgtgt

SEQ ID NO: 9087 - protein, 69 aa, Homo sapiens
MRKASFKLRFVLKPATRSTCCCGFLGDQVSTVWNLQQGFSRLCCVEELLVGFSCAGVVTTLKSLRVKVS

SEQ ID NO: 9088 - DNA, 748 bp, Homo sapiens
tccttgtcctgagaaggcaggcttcattgatcaatttgaccccatttcatgatttattttaatagtgtaagaggaaaagaagtgtgatggccaagagttcacagaggaagcaacgtgactgtgtaaaccaatgcaaatcaaagcctggcttgagcacctcaatccctttgagaatgtccagttacacattcaagaggccagtaacgagaattacaccccatcctggcaatgaggtcagataccatcaatgggaggagagcttggagaagcctcagcaggtctgctggcagaggagactgcagggactccaggcttacagcagtgcaggagaactttcaagcactttggatcttgccaataccttgcaaaaacttgtccctagttacacaggtggatctctgctggaggatcttgccagtggtctggagcactcctgccccatgccccaccttgcctgctcttcagatgcggtggagataattcctgcagagggagtgggtatctcgcagctcctctgcaaacaatttctggttactgaggaagatatcaggaaacaggaagggaaagtgaagacagtcagagagagactcgcaatagcactgattgcggatggactcgctaatgaggcagagaaagtgagagaccaagaaggccgtcctgaaaaacgctaagaaaaaaagggaagatagtgcagatgaaataaagtgtaatcctttattaacatctctttgcagtgtccccaatgagg

SEQ ID NO: 9089 - protein, 194 aa, Homo sapiens
MAKSSQRKQRDCVNQCKSKPGLSTSIPLRMSSYTFKRPVTRITPHPGNEVRYHQWEESLEKPQQVCWQRRLQGLQAYSSAGELSSTLDLANTLQKLVPSYTGGSLLEDLASGLEHSCPMPHLACSSDAVEIIPAEGVGISQLLCKQFLVTEEDIRKQEGKVKTVRERLAIALIADGLANEAEKVRDQEGRPEKR

SEQ ID NO: 9090 - DNA, 4100 bp, Homo sapiens
tcccaccttcactatagccaccggccctctcctggtgccattcacactcaacttcaccatcactaacctacagtatgaggagaacatgggtcaccctggctccaggaagttcaacatcacggagagtgttctgcagggtctgctcaagcccttgttcaagagcaccagtgttggccctctgtattctggctgcagactgaccttgctcaggcctgagaaggatggagtagccaccagagtggacgccatctgcacccaccgccctgaccccaaaatccctgggctagacagacagcagctatactgggagctgagccagctgacccacagcatcactgagctgggaccctacaccctggatagggacagtctctatgtcaatggtttcacccagcggagctctgtgcccaccaccagcactcctgggactttcacagtacagccggaaacctctgagactccatcatccctccctggccccacagccactggccctgtcctgctgccattcaccctcaattttaccatcactaacctgcagtatgaggaggacatgcgtcgccctggctccaggaagttcaacaccacggagagggtccttcagggtctgcttatgcccttgttcaagaacaccagtgtcagctctctgtactctggttgcagactgaccttgctcaggcctgagaaggatggggcagccaccagagtggatgctgtctgcacccatcgtcctgaccccaaaagccctggactggacagagagcggctgtactggaagctgagccagctgacccacggcatcactgagctgggcccctacaccctggacaggcacagtctctatgtcaatggtttcacccatcagagctctatgacgaccaccagaactcctgatacctccacaatgcacctggcaacctcgagaactccagcctccctgtctggacccatgaccgccagccctctcctggtgctattcacaattaacttcaccatcactaacctgcggtatgaggagaacatgcatcaccctggctctagaaagtttaacaccacggagagagtccttcagggtctgctcaggcctgtgttcaagaacaccagtgttggccctctgtactctggctgcagactgaccttgctcaggcccaagaaggatggggcagccaccaaagtggatgccatctgcacctaccgccctgatcccaaaagccctggactggacagagagcagctatactgggagctgagccagctgacccacagcatcactgagctgggcccctacaccctggacagggacagtctctatgtcaatggtttcacacagcggagctctgtgcccaccactagcattcctgggacccccacagtggacctgggaacatctgggactccagtttctaaacctggtccctcggctgccagccctctcctggtgctattcactctcaacttcaccatcaccaacctgcggtatgaggagaacatgcagcaccctggctccaggaagttcaacaccacggagagggtccttcagggcctgctcaggtccctgttcaagagcaccagtgttggccctctgtactctggctgcagactgactttgctcaggcctgaaaaggatgggacagccactggagtggatgccatctgcacccaccaccctgaccccaaaagccctaggctggacagagagcagctgtattgggagctgagccagctgacccacaatatcactgagctgggcccctatgccctggacaacgacagcctctttgtcaatggtttcactcatcggagctctgtgtccaccaccagcactcctgggacccccacagtgtatctgggagcatctaagactccagcctcgatatttggcccttcagctgccagccatctcctgatactattcaccctcaacttcaccatcactaacctgcggtatgaggagaacatgtggcctggctccaggaagttcaacactacagagagggtccttcagggcctgctaaggcccttgttcaagaacaccagtgttggccctctgtactctggctgcaggctgaccttgctcaggccagagaaagatggggaagccaccggagtggatgccatctgcacccaccgccctgaccccacaggccctgggctggacagagagcagctgtatttggagctgagccagctgacccacagcatcactgagctgggcccctacacactggacagggacagtctctatgtcaatggtttcacccatcggagctctgtacccaccaccagcaccggggtggtcagcgaggagccattcacactgaacttcaccatcaacaacctgcgctacatggcggacatgggccaacccggctccctcaagttcaacatcacagacaacgtcatgcagcacctgctcagtcctttgttccagaggagcagcctgggtgcacggtacacaggctgcagggtcatcgcactaaggtctgtgaagaacggtgctgagacacgggtggacctcctctgcacctacctgcagcccctcagcggcccaggtctgcctatcaagcaggtgttccatgagctgagccagcagacccatggcatcacccggctgggcccctactctctggacaaagacagcctctaccttaacggttacaatgaacctggtccagatgagcctcctacaaccatggggtaccacctgaagaccctcacactcaacttcaccatctccaatctccagtattcaccagatatgggcaagggctcagctacattcaactccaccgagggggtccttcagcacctgctcagacccttgttccagaagagcagcatgggccccttctacttgggttgccaactgatctccctcaggcctgagaaggatggggcagccactggtgtggacaccacctgcacctaccaccctgaccctgtgggccccgggctggacatacagcagctttactgggagctgagtcagctgacccatggtgtcacccaactgggcttctatgtcctggacagggatagcctcttcatcaatggctatgcaccccagaatttatcaatccggggcgagtaccagataaatttccacattgtcaactggaacctcagtaatccagaccccacatcctcagagtacatcaccctgctgagggacatccaggacaaggtcaccacactctacaaaggcagtcaactacatgacacattccgcttctgcctggtcaccaacttgacgatggactccgtgttggtcactgtcaaggcattgttctcctccaatttggaccccagcctggtggagcaagtctttctagataagaccctgaatgcctcattccattggctgggctccacctaccagttggtggacatccatgtgacagaaatggagtcatcagtttatcaaccaacaagcagctccagcacccagcacttctacctgaatttcaccatcaccaacctaccatattcccaggacaaagcccagccaggcaccaccaattaccagaggaacaaaaggaatattgaggatgcgctcaaccaactcttccgaaacagcagcatcaagagttatttttctgactgtcaagtttcaacattcaggtctgtccccaacaggcaccacaccggggtggactccctgtgtaacttctcgccactggctcggagagtagacagagttgccatctatgaggaatttctgcggatgacccggaatggtacccagctgcagaacttcaccctggacaggagcagtgtccttgtggatgggtattctcccaacagaaatgagcccttaactgggaattctgaccttcccttctgggctgtcatcctcatcggcttggcaggactcctgggagtcatcacatgcctgatctgcggtgtcctggtgaccacccgccggcggaagaaggaaggagaatacaacgtccagcaacagtgcccaggctactaccagtcacacctagacctggaggatctgcaatgactggaacttgccggtgcctggggtgcctttcccccagccagggtccaaagaagcttggctggggcagaaataaaccatattggtcggacac

SEQ ID NO: 9091 - protein, 1307 aa, Homo sapiens
MGHPGSRKFNITESVLQGLLKPLFKSTSVGPLYSGCRLTLLRPEKDGVATRVDAICTHRPDPKIPGLDRQQLYWELSQLTHSITELGPYTLDRDSLYVNGFTQRSSVPTTSTPGTFTVQPETSETPSSLPGPTATGPVLLPFTLNFTITNLQYEEDMRRPGSRKFNTTERVLQGLLMPLFKNTSVSSLYSGCRLTLLRPEKDGAATRVDAVCTHRPDPKSPGLDRERLYWKLSQLTHGITELGPYTLDRHSLYVNGFTHQSSMTTTRTPDTSTMHLATSRTPASLSGPMTASPLLVLFTINFTITNLRYEENMHHPGSRKFNTTERVLQGLLRPVFKNTSVGPLYSGCRLTLLRPKKDGAATKVDAICTYRPDPKSPGLDREQLYWELSQLTHSITELGPYTLDRDSLYVNGFTQRSSVPTTSIPGTPTVDLGTSGTPVSKPGPSAASPLLVLFTLNFTITNLRYEENMQHPGSRKFNTTERVLQGLLRSLFKSTSVGPLYSGCRLTLLRPEKDGTATGVDAICTHHPDPKSPRLDREQLYWELSQLTHNITELGPYALDNDSLFVNGFTHRSSVSTTSTPGTPTVYLGASKTPASIFGPSAASHLLILFTLNFTITNLRYEENMWPGSRKFNTTERVLQGLLRPLFKNTSVGPLYSGCRLTLLRPEKDGEATGVDAICTHRPDPTGPGLDREQLYLELSQLTHSITELGPYTLDRDSLYVNGFTHRSSVPTTSTGVVSEEPFTLNFTINNLRYMADMGQPGSLKFNITDNVMQHLLSPLFQRSSLGARYTGCRVIALRSVKNGAETRVDLLCTYLQPLSGPGLPIKQVFHELSQQTHGITRLGPYSLDKDSLYLNGYNEPGPDEPPTTMGYHLKTLTLNFTISNLQYSPDMGKGSATFNSTEGVLQHLLRPLFQKSSMGPFYLGCQLISLRPEKDGAATGVDTTCTYHPDPVGPGLDIQQLYWELSQLTHGVTQLGFYVLDRDSLFINGYAPQNLSIRGEYQINFHIVNWNLSNPDPTSSEYITLLRDIQDKVTTLYKGSQLHDTFRFCLVTNLTMDSVLVTVKALFSSNLDPSLVEQVFLDKTLNASFHWLGSTYQLVDIHVTEMESSVYQPTSSSSTQHFYLNFTITNLPYSQDKAQPGTTNYQRNKRNIEDALNQLFRNSSIKSYFSDCQVSTFRSVPNRHHTGVDSLCNFSPLARRVDRVAIYEEFLRMTRNGTQLQNFTLDRSSVLVDGYSPNRNEPLTGNSDLPFWAVILIGLAGLLGVITCLICGVLVTTRRRKKEGEYNVQQQCPGYYQSHLDLEDLQ

SEQ ID NO: 9092 - DNA, 3570 bp, Homo sapiens
tcccaccttcactatagccaccggccctctcctggtgccattcacactcaacttcaccatcactaacctacagtatgaggagaacatgggtcaccctggctccaggaagttcaacatcacggagagtgttctgcagggtctgctcaagcccttgttcaagagcaccagtgttggccctctgtattctggctgcagactgaccttgctcaggcctgagaaggatggagtagccaccagagtggacgccatctgcacccaccgccctgaccccaaaatccctgggctagacagacagcagctatactgggagctgagccagctgacccacagcatcactgagctgggaccctacaccctggatagggacagtctctatgtcaatggtttcacccagcggagctctgtgcccaccaccagcactcctgggactttcacagtacagccggaaacctctgagactccatcatccctccctggccccacagccactggccctgtcctgctgccattcaccctcaattttaccatcactaacctgcagtatgaggaggacatgcgtcgccctggctccaggaagttcaacaccacggagagggtccttcagggtctgcttatgcccttgttcaagaacaccagtgtcagctctctgtactctggttgcagactgaccttgctcaggcctgagaaggatggggcagccaccagagtggatgctgtctgcacccatcgtcctgaccccaaaagccctggactggacagagagcggctgtactggaagctgagccagctgacccacggcatcactgagctgggcccctacaccctggacaggcacagtctctatgtcaatggtttcacccatcagagctctatgacgaccaccagaactcctgatacctccacaatgcacctggcaacctcgagaactccagcctccctgtctggacccatgaccgccagccctctcctggtgctattcacaattaacttcaccatcactaacctgcggtatgaggagaacatgcatcaccctggctctagaaagtttaacaccacggagagagtccttcagggtctgctcaggcctgtgttcaagaacaccagtgttggccctctgtactctggctgcagactgaccttgctcaggcccaagaaggatggggcagccaccaaagtggatgccatctgcacctaccgccctgatcccaaaagccctggactggacagagagcagctatactgggagctgagccagctgacccacagcatcactgagctgggcccctacaccctggacagggacagtctctatgtcaatggtttcacacagcggagctctgtgcccaccactagcattcctgggacccccacagtggacctgggaacatctgggactccagtttctaaacctggtccctcggctgccagccctctcctggtgctattcactctcaacttcaccatcaccaacctgcggtatgaggagaacatgcagcaccctggctccaggaagttcaacaccacggagagggtccttcagggcctgctcaggtccctgttcaagagcaccagtgttggccctctgtactctggctgcagactgactttgctcaggcctgaaaaggatgggacagccactggagtggatgccatctgcacccaccaccctgaccccaaaagccctaggctggacagagagcagctgtattgggagctgagccagctgacccacaatatcactgagctgggcccctatgccctggacaacgacagcctctttgtcaatggtttcactcatcggagctctgtgtccaccaccagcactcctgggacccccacagtgtatctgggagcatctaagactccagcctcgatatttggcccttcagctgccagccatctcctgatactattcaccctcaacttcaccatcactaacctgcggtatgaggagaacatgtggcctggctccaggaagttcaacactacagagagggtccttcagggcctgctaaggcccttgttcaagaacaccagtgttggccctctgtactctggctgcaggctgaccttgctcaggccagagaaagatggggaagccaccggagtggatgccatctgcacccaccgccctgaccccacaggccctgggctggacagagagcagctgtatttggagctgagccagctgacccacagcatcactgagctgggcccctacacactggacagggacagtctctatgtcaatggtttcacccatcggagctctgtacccaccaccagcaccggggtggtcagcgaggagccattcacactgaacttcaccatcaacaacctgcgctacatggcggacatgggccaacccggctccctcaagttcaacatcacagacaacgtcatgcagcacctgctcagtcctttgttccagaggagcagcctgggtgcacggtacacaggctgcagggtcatcgcactaaggtctgtgaagaacggtgctgagacacgggtggacctcctctgcacctacctgcagcccctcagcggcccaggtctgcctatcaagcaggtgttccatgagctgagccagcagacccatggcatcacccggctgggcccctactctctggacaaagacagcctctaccttaacggtcaccacactctacaaaggcagtcaactacatgacacattccgcttctgcctggtcaccaacttgacgatggactccgtgttggtcactgtcaaggcattgttctcctccaatttggaccccagcctggtggagcaagtctttctagataagaccctgaatgcctcattccattggctgggctccacctaccagttggtggacatccatgtgacagaaatggagtcatcagtttatcaaccaacaagcagctccagcacccagcacttctacctgaatttcaccatcaccaacctaccatattcccaggacaaagcccagccaggcaccaccaattaccagaggaacaaaaggaatattgaggatgcgctcaaccaactcttccgaaacagcagcatcaagagttatttttctgactgtcaagtttcaacattcaggtctgtccccaacaggcaccacaccggggtggactccctgtgtaacttctcgccactggctcggagagtagacagagttgccatctatgaggaatttctgcggatgacccggaatggtacccagctgcagaacttcaccctggacaggagcagtgtccttgtggatgggtattctcccaacagaaatgagcccttaactgggaattctgaccttcccttctgggctgtcatcctcatcggcttggcaggactcctgggagtcatcacatgcctgatctgcggtgtcctggtgaccacccgccggcggaagaaggaaggagaatacaacgtccagcaacagtgcccaggctactaccagtcacacctagacctggaggatctgcaatgactggaacttgccggtgcctggggtgcctttcccccagccagggtccaaagaagcttggctggggcagaaataaaccatattggtcggacac

SEQ ID NO: 9093 - protein, 867 aa, Homo sapiens
MGHPGSRKFNITESVLQGLLKPLFKSTSVGPLYSGCRLTLLRPEKDGVATRVDAICTHRPDPKIPGLDRQQLYWELSQLTHSITELGPYTLDRDSLYVNGFTQRSSVPTTSTPGTFTVQPETSETPSSLPGPTATGPVLLPFTLNFTITNLQYEEDMRRPGSRKFNTTERVLQGLLMPLFKNTSVSSLYSGCRLTLLRPEKDGAATRVDAVCTHRPDPKSPGLDRERLYWKLSQLTHGITELGPYTLDRHSLYVNGFTHQSSMTTTRTPDTSTMHLATSRTPASLSGPMTASPLLVLFTINFTITNLRYEENMHHPGSRKFNTTERVLQGLLRPVFKNTSVGPLYSGCRLTLLRPKKDGAATKVDAICTYRPDPKSPGLDREQLYWELSQLTHSITELGPYTLDRDSLYVNGFTQRSSVPTTSIPGTPTVDLGTSGTPVSKPGPSAASPLLVLFTLNFTITNLRYEENMQHPGSRKFNTTERVLQGLLRSLFKSTSVGPLYSGCRLTLLRPEKDGTATGVDAICTHHPDPKSPRLDREQLYWELSQLTHNITELGPYALDNDSLFVNGFTHRSSVSTTSTPGTPTVYLGASKTPASIFGPSAASHLLILFTLNFTITNLRYEENMWPGSRKFNTTERVLQGLLRPLFKNTSVGPLYSGCRLTLLRPEKDGEATGVDAICTHRPDPTGPGLDREQLYLELSQLTHSITELGPYTLDRDSLYVNGFTHRSSVPTTSTGVVSEEPFTLNFTINNLRYMADMGQPGSLKFNITDNVMQHLLSPLFQRSSLGARYTGCRVIALRSVKNGAETRVDLLCTYLQPLSGPGLPIKQVFHELSQQTHGITRLGPYSLDKDSLYLNGHHTLQRQSTT

SEQ ID NO: 9094 - DNA, 5239 bp, Homo sapiens
cccatgttcaagaacaccagtgttggccctctgtactctggctgcagactgaccttgctcaggtccgagaaggatggagcagccactggagtggatgccatctgcacccaccgtcttgaccccaaaagccctggagtggacagggagcagctatactgggagctgagccagctgaccaatggcatcaaagagctgggtccctacaccctggacagaaacagtctctatgtcaatggtcctgggacctccacagtggaccttgggacctcagggactccatcctccctccccagccctacatctgctggccctctcctggtgccattcaccctcaacttcaccatcaccaacctgcagtacgaggaggacatgcatcacccaggctccaggaagttcaacaccacggagcgggtcctgcagggtctgcttggtcccatgttcaagaacaccagtgtcggccttctgtactctggctgcagactgaccttgctcaggcctgagaagaatggggcagccactggaatggatgccatctgcagccaccgtcttgaccccaaaagccctggactcaacagagagcagctgtactgggagctgagccagctgacccatggcatcaaagagctgggcccctacaccctggacaggaacagtctctatgtcaatggtttcacccatcggagctctgtggcccccaccagcactcctgggacctccacagtggaccttgggacctcagggactccatcctccctccccagccccacaacagctgttcctctcctggtgccgttcaccctcaactttaccatcaccaatctgcagtatggggaggacatgcgtcaccctggctccaggaagttcaacaccacagagagggtcctgcagggtctgcttggtcccttgttcaagaactccagtgtcggccctctgtactctggctgcagactgatctctctcaggtctgagaaggatggggcagccactggagtggatgccatctgcacccaccaccttaaccctcaaagccctggactggacagggagcagctgtactggcagctgagccagatgaccaatggcatcaaagagctgggcccctacaccctggaccggaacagtctctacgtcaatggtttcacccatcggagctctgggctcaccaccagcaccaccggccctctcctggtgccattcacactcaacttcaccatcactaacctacagtatgaggagaacatgggtcaccctggctccaggaagttcaacatcacggagagtgttctgcagggtctgctcaagcccttgttcaagagcaccagtgttggccctctgtattctggctgcagactgaccttgctcaggcctgagaaggatggagtagccaccagagtggacgccatctgcacccaccgccctgaccccaaaatccctgggctagacagacagcagctatactgggagctgagccagctgacccacagcatcactgagctgggaccctacaccctggatagggacagtctctatgtcaatggtttcacccagcggagctctgtgcccaccaccagcactcctgggactttcacagtacagccggaaacctctgagactccatcatccctccctggccccacagccactggccctgtcctgctgccattcaccctcaattttaccatcactaacctgcagtatgaggaggacatgcgtcgccctggctccaggaagttcaacaccacggagagggtccttcagggtctgcttatgcccttgttcaagaacaccagtgtcagctctctgtactctggttgcagactgaccttgctcaggcctgagaaggatggggcagccaccagagtggatgctgtctgcacccatcgtcctgaccccaaaagccctggactggacagagagcggctgtactggaagctgagccagctgacccacggcatcactgagctgggcccctacaccctggacaggcacagtctctatgtcaatggtttcacccatcagagctctatgacgaccaccagaactcctgatacctccacaatgcacctggcaacctcgagaactccagcctccctgtctggacccatgaccgccagccctctcctggtgctattcacaattaacttcaccatcactaacctgcggtatgaggagaacatgcatcaccctggctctagaaagtttaacaccacggagagagtccttcagggtctgctcaggcctgtgttcaagaacaccagtgttggccctctgtactctggctgcagactgaccttgctcaggcccaagaaggatggggcagccaccaaagtggatgccatctgcacctaccgccctgatcccaaaagccctggactggacagagagcagctatactgggagctgagccagctgacccacagcatcactgagctgggcccctacaccctggacagggacagtctctatgtcaatggtttcacacagcggagctctgtgcccaccactagcattcctgggacccccacagtggacctgggaacatctgggactccagtttctaaacctggtccctcggctgccagccctctcctggtgctattcactctcaacttcaccatcaccaacctgcggtatgaggagaacatgcagcaccctggctccaggaagttcaacaccacggagagggtccttcagggcctgctcaggtccctgttcaagagcaccagtgttggccctctgtactctggctgcagactgactttgctcaggcctgaaaaggatgggacagccactggagtggatgccatctgcacccaccaccctgaccccaaaagccctaggctggacagagagcagctgtattgggagctgagccagctgacccacaatatcactgagctgggcccctatgccctggacaacgacagcctctttgtcaatggtttcactcatcggagctctgtgtccaccaccagcactgccagccatctcctgatactattcaccctcaacttcaccatcactaacctgcggtatgaggagaacatgtggcctggctccaggaagttcaacactacagagagggtccttcagggcctgctaaggcccttgttcaagaacaccagtgttggccctctgtactctggctgcaggctgaccttgctcaggccagagaaagatggggaagccaccggagtggatgccatctgcacccaccgccctgaccccacaggccctgggctggacagagagcagctgtatttggagctgagccagctgacccacagcatcactgagctgggcccctacacactggacagggacagtctctatgtcaatggtttcacccatcggagctctgtacccaccaccagcaccggggtggtcagcgaggagccattcacactgaacttcaccatcaacaacctgcgctacatggcggacatgggccaacccggctccctcaagttcaacatcacagacaacgtcatgcagcacctgctcagtcctttgttccagaggagcagcctgggtgcacggtacacaggctgcagggtcatcgcactaaggtctgtgaagaacggtgctgagacacgggtggacctcctctgcacctacctgcagcccctcagcggcccaggtctgcctatcaagcaggtgttccatgagctgagccagcagacccatggcatcacccggctgggcccctactctctggacaaagacagcctctaccttaacggttacaatgaacctggtccagatgagcctcctacaactcccaagccagccaccacattcctgcctcctctgtcagaagccacaacagccatggggtaccacctgaagaccctcacactcaacttcaccatctccaatctccagtattcaccagatatgggcaagggctcagctacattcaactccaccgagggggtccttcagcacctgctcagacccttgttccagaagagcagcatgggccccttctacttgggttgccaactgatctccctcaggcctgagaaggatggggcagccactggtgtggacaccacctgcacctaccaccctgaccctgtgggccccgggctggacatacagcagctttactgggagctgagtcagctgacccatggtgtcacccaactgggcttctatgtcctggacagggatagcctcttcatcaatggctatgcaccccagaatttatcaatccggggcgagtaccagataaatttccacattgtcaactggaacctcagtaatccagaccccacatcctcagagtacatcaccctgctgagggacatccaggacaaggtcaccacactctacaaaggcagtcaactacatgacacattccgcttctgcctggtcaccaacttgacgatggactccgtgttggtcactgtcaaggcattgttctcctccaatttggaccccagcctggtggagcaagtctttctagataagaccctgaatgcctcattccattggctgggctccacctaccagttggtggacatccatgtgacagaaatggagtcatcagtttatcaaccaacaagcagctccagcacccagcacttctacctgaatttcaccatcaccaacctaccatattcccaggacaaagcccagccaggcaccaccaattaccagaggaacaaaaggaatattgaggatgcgctcaaccaactcttccgaaacagcagcatcaagagttatttttctgactgtcaagtttcaacattcaggtctgtccccaacaggcaccacaccggggtggactccctgtgtaacttctcgccactggctcggagagtagacagagttgccatctatgaggaatttctgcggatgacccggaatggtacccagctgcagaacttcaccctggacaggagcagtgtccttgtggatgggtattctcccaacagaaatgagcccttaactgggaattctgaccttcccttctgggctgtcatcctcatcggcttggcaggactcctgggagtcatcacatgcctgatctgcggtgtcctggtgaccacccgccggcggaagaaggaaggagaatacaacgtccagcaacagtgcccaggctactaccagtcacacctagacctggaggatctgcaatgactggaacttgccggtgcctggggtgcctttcccccagccagggtccaaagaagcttggctggggcagaaataaaccatattggtcggacac

SEQ ID NO: 9095 - protein, 1714 aa, Homo sapiens
MFKNTSVGPLYSGCRLTLLRSEKDGAATGVDAICTHRLDPKSPGVDREQLYWELSQLTNGIKELGPYTLDRNSLYVNGPGTSTVDLGTSGTPSSLPSPTSAGPLLVPFTLNFTITNLQYEEDMHHPGSRKFNTTERVLQGLLGPMFKNTSVGLLYSGCRLTLLRPEKNGAATGMDAICSHRLDPKSPGLNREQLYWELSQLTHGIKELGPYTLDRNSLYVNGFTHRSSVAPTSTPGTSTVDLGTSGTPSSLPSPTTAVPLLVPFTLNFTITNLQYGEDMRHPGSRKFNTTERVLQGLLGPLFKNSSVGPLYSGCRLISLRSEKDGAATGVDAICTHHLNPQSPGLDREQLYWQLSQMTNGIKELGPYTLDRNSLYVNGFTHRSSGLTTSTTGPLLVPFTLNFTITNLQYEENMGHPGSRKFNITESVLQGLLKPLFKSTSVGPLYSGCRLTLLRPEKDGVATRVDAICTHRPDPKIPGLDRQQLYWELSQLTHSITELGPYTLDRDSLYVNGFTQRSSVPTTSTPGTFTVQPETSETPSSLPGPTATGPVLLPFTLNFTITNLQYEEDMRRPGSRKFNTTERVLQGLLMPLFKNTSVSSLYSGCRLTLLRPEKDGAATRVDAVCTHRPDPKSPGLDRERLYWKLSQLTHGITELGPYTLDRHSLYVNGFTHQSSMTTTRTPDTSTMHLATSRTPASLSGPMTASPLLVLFTINFTITNLRYEENMHHPGSRKFNTTERVLQGLLRPVFKNTSVGPLYSGCRLTLLRPKKDGAATKVDAICTYRPDPKSPGLDREQLYWELSQLTHSITELGPYTLDRDSLYVNGFTQRSSVPTTSIPGTPTVDLGTSGTPVSKPGPSAASPLLVLFTLNFTITNLRYEENMQHPGSRKFNTTERVLQGLLRSLFKSTSVGPLYSGCRLTLLRPEKDGTATGVDAICTHHPDPKSPRLDREQLYWELSQLTHNITELGPYALDNDSLFVNGFTHRSSVSTTSTASHLLILFTLNFTITNLRYEENMWPGSRKFNTTERVLQGLLRPLFKNTSVGPLYSGCRLTLLRPEKDGEATGVDAICTHRPDPTGPGLDREQLYLELSQLTHSITELGPYTLDRDSLYVNGFTHRSSVPTTSTGVVSEEPFTLNFTINNLRYMADMGQPGSLKFNITDNVMQHLLSPLFQRSSLGARYTGCRVIALRSVKNGAETRVDLLCTYLQPLSGPGLPIKQVFHELSQQTHGITRLGPYSLDKDSLYLNGYNEPGPDEPPTTPKPATTFLPPLSEATTAMGYHLKTLTLNFTISNLQYSPDMGKGSATFNSTEGVLQHLLRPLFQKSSMGPFYLGCQLISLRPEKDGAATGVDTTCTYHPDPVGPGLDIQQLYWELSQLTHGVTQLGFYVLDRDSLFINGYAPQNLSIRGEYQINFHIVNWNLSNPDPTSSEYITLLRDIQDKVTTLYKGSQLHDTFRFCLVTNLTMDSVLVTVKALFSSNLDPSLVEQVFLDKTLNASFHWLGSTYQLVDIHVTEMESSVYQPTSSSSTQHFYLNFTITNLPYSQDKAQPGTTNYQRNKRNIEDALNQLFRNSSIKSYFSDCQVSTFRSVPNRHHTGVDSLCNFSPLARRVDRVAIYEEFLRMTRNGTQLQNFTLDRSSVLVDGYSPNRNEPLTGNSDLPFWAVILIGLAGLLGVITCLICGVLVTTRRRKKEGEYNVQQQCPGYYQSHLDLEDLQ

SEQ ID NO: 9096 - DNA, 17347 bp, Homo sapiens
caacagagagaagtgcttctctttctggaatgcccactggtgctactactaaggtctccagaacagaagccctctccttaggcagaacatccaccccaggtcctgctcaatccacaatatcaccagaaatctccacggaaaccatcactagaatttctactcccctcaccacgacaggatcagcagaaatgaccatcacccccaaaacaggtcattctggggcatcctcacaaggtacctttaccttggacacatcaagcagagcctcctggccaggaactcactcagctgcaactcacagatctccacactcagggatgaccactcctatgagcagaggtcctgaggatgtgtcatggccaagccgcccatcagtggaaaaaactagccctccatcttccctggtgtctttatctgcagtaacctcaccttcgccactttattccacaccatctgagagtagccactcatctcctctccgggtgacttctcttttcacccctgtcatgatgaagaccacagacatgttggacacaagcttggaacctgtgaccacttcacctcccagtatgaatatcacctcagatgagagtctggccacttctaaagccaccatggagacagaggcaattcagctttcagaaaacacagctgtgactcagatgggcaccatcagcgctagacaagaattctattcctcttatccaggcctcccagagccatccaaagtgacatctccagtggtcacctcttccaccataaaagacattgtttctacaaccatacctgcttcctctgagataacaagaattgagatggagtcaacatccaccctgacccccacaccaagggagaccagcacctcccaggagatccactcagccacaaagccaagcactgttccttacaaggcactcactagtgccacgattgaggactccatgacacaagtcatgtcctctagcagaggacctagccctgatcagtccacaatgtcacaagacatatccactgaagtgatcaccaggctctctacctcccccatcaagacagaatctacagaaatgaccattaccacccaaacaggttctcctggggctacatcaaggggtacccttaccttggacacttcaacaacttttatgtcagggacccactcaactgcatctcaaggattttcacactcacagatgaccgctcttatgagtagaactcctggagatgtgccatggctaagccatccctctgtggaagaagccagctctgcctctttctcactgtcttcacctgtcatgacctcatcttctcccgtttcttccacattaccagacagcatccactcttcttcgcttcctgtgacatcacttctcacctcagggctggtgaagaccacagagctgttgggcacaagctcagaacctgaaaccagttcacccccaaatttgagcagcacctcagctgaaatactggccatcactgaagtcactacagatacagagaaactggagatgaccaatgtggtaacctcaggttatacacatgaatctccttcctctgtcctagctgactcagtgacaacaaaggccacatcttcaatgggtatcacctaccccacaggagatacaaatgttctcacatcaacccctgccttctctgacaccagtaggattcaaacaaagtcaaagctctcactgactcctgggttgatggagaccagcatctctgaagagaccagctctgccacagaaaaaagcactgtcctttctagtgtgcccactggtgctactactgaggtctccaggacagaagccatctcttctagcagaacatccatcccaggccctgctcaatccacaatgtcatcagacacctccatggaaaccatcactagaatttctacccccctcacaaggaaagaatcaacagacatggccatcacccccaaaacaggtccttctggggctacctcgcagggtacctttaccttggactcatcaagcacagcctcctggccaggaactcactcagctacaactcagagatttccacagtcagtggtgacaactcctatgagcagaggtcctgaggatgtgtcatggccaagcccgctgtctgtggaaaaaaacagccctccatcttccctggtatcttcatcttcagtaacctcaccttcgccactttattccacaccatctgggagtagccactcctctcctgtccctgtcacttctcttttcacctctatcatgatgaaggccacagacatgttggatgcaagtttggaacctgagaccacttcagctcccaatatgaatatcacctcagatgagagtctggccgcttctaaagccaccacggagacagaggcaattcacgtttttgaaaatacagcagcgtcccatgtggaaaccaccagtgctacagaggaactctattcctcttccccaggcttctcagagccaacaaaagtgatatctccagtggtcacctcttcctctataagagacaacatggtttccacaacaatgcctggctcctctggcattacaaggattgagatagagtcaatgtcatctctgacccctggactgagggagaccagaacctcccaggacatcacctcatccacagagacaagcactgtcctttacaagatgccctctggtgccactcctgaggtctccaggacagaagttatgccctctagcagaacatccattcctggccctgctcagtccacaatgtcactagacatctccgatgaagttgtcaccaggctgtctacctctcccatcatgacagaatctgcagaaataaccatcaccacccaaacaggttattctctggctacatcccaggttacccttcccttgggcacctcaatgacctttttgtcagggacccactcaactatgtctcaaggactttcacactcagagatgaccaatcttatgagcaggggtcctgaaagtctgtcatggacgagccctcgctttgtggaaacaactagatcttcctcttctctgacatcattacctctcacgacctcactttctcctgtgtcctccacattactagacagtagcccctcctctcctcttcctgtgacttcacttatcctcccaggcctggtgaagactacagaagtgttggatacaagctcagagcctaaaaccagttcatctccaaatttgagcagcacctcagttgaaataccggccacctctgaaatcatgacagatacagagaaaattcatccttcctcaaacacagcggtggccaaagtgaggacctccagttctgttcatgaatctcattcctctgtcctagctgactcagaaacaaccataaccataccttcaatgggtatcacctccgctgtggacgataccactgttttcacatcaaatcctgccttctctgagactaggaggattccgacagagccaacattctcattgactcctggattcagggagactagcacctctgaagagaccacctcaatcacagaaacaagtgcagtcctttatggagtgcccactagtgctactactgaagtctccatgacagaaatcatgtcctctaatagaatacacatccctgactctgatcagtccacgatgtctccagacatcatcactgaagtgatcaccaggctctcttcctcatccatgatgtcagaatcaacacaaatgaccatcaccacccaaaaaagttctcctggggctacagcacagagtactcttaccttggccacaacaacagcccccttggcaaggacccactcaactgttcctcctagatttttacactcagagatgacaactcttatgagtaggagtcctgaaaatccatcatggaagagctctctctttgtggaaaaaactagctcttcatcttctctgttgtccttacctgtcacgacctcaccttctgtttcttccacattaccgcagagtatcccttcctcctctttttctgtgacttcactcctcaccccaggcatggtgaagactacagacacaagcacagaacctggaaccagtttatctccaaatctgagtggcacctcagttgaaatactggctgcctctgaagtcaccacagatacagagaaaattcatccttcttcaagcatggcagtgaccaatgtgggaaccaccagttctggacatgaactatattcctctgtttcaatccactcggagccatccaaggctacatacccagtgggtactccctcttccatggctgaaacctctatttccacatcaatgcctgctaattttgagaccacaggatttgaggctgagccattttctcatttgacttctggatttaggaagacaaacatgtccctggacaccagctcagtcacaccaacaaatacaccttcttctcctgggtccactcaccttttacagagttccaagactgatttcacctcttctgcaaaaacatcatccccagactggcctccagcctcacagtatactgaaattccagtggacataatcaccccctttaatgcttctccatctattacggagtccactgggataacctccttcccagaatccaggtttactatgtctgtaacagaaagtactcatcatctgagtacagatttgctgccttcagctgagactatttccactggcacagtgatgccttctctatcagaggccatgacttcatttgccaccactggagttccacgagccatctcaggttcaggtagtccattctctaggacagagtcaggccctggggatgctactctgtccaccattgcagagagcctgccttcatccactcctgtgccattctcctcttcaaccttcactaccactgattcttcaaccatcccagccctccatgagataacttcctcttcagctaccccatatagagtggacaccagtcttgggacagagagcagcactactgaaggacgcttggttatggtcagtactttggacacttcaagccaaccaggcaggacatcttcatcacccattttggataccagaatgacagagagcgttgagctgggaacagtgacaagtgcttatcaagttccttcactctcaacacggttgacaagaactgatggcattatggaacacatcacaaaaatacccaatgaagcagcacacagaggtaccataagaccagtcaaaggccctcagacatccacttcgcctgccagtcctaaaggactacacacaggagggacaaaaagaatggagaccaccaccacagctctgaagaccaccaccacagctctgaagaccacttccagagccaccttgaccaccagtgtctatactcccactttgggaacactgactcccctcaatgcatcaatgcaaatggccagcacaatccccacagaaatgatgatcacaaccccatatgttttccctgatgttccagaaacgacatcctcattggctaccagcctgggagcagaaaccagcacagctcttcccaggacaaccccatctgttttcaatagagaatcagagaccacagcctcactggtctctcgttctggggcagagagaagtccggttattcaaactctagatgtttcttctagtgagccagatacaacagcttcatgggttatccatcctgcagagaccatcccaactgtttccaagacaacccccaattttttccacagtgaattagacactgtatcttccacagccaccagtcatggggcagacgtcagctcagccattccaacaaatatctcacctagtgaactagatgcactgaccccactggtcactatttcggggacagatactagtacaacattcccaacactgactaagtccccacatgaaacagagacaagaaccacatggctcactcatcctgcagagaccagctcaactattcccagaacaatccccaatttttctcatcatgaatcagatgccacaccttcaatagccaccagtcctggggcagaaaccagttcagctattccaattatgactgtctcacctggtgcagaagatctggtgacctcacaggtcactagttctgggacagacagaaatatgactattccaactttgactctttctcctggtgaaccaaagacgatagcctcattagtcacccatcctgaagcacagacaagttcggccattccaacttcaactatctcgcctgctgtatcacggttggtgacctcaatggtcaccagtttggcggcaaagacaagtacaactaatcgagctctgacaaactcccctggtgaaccagctacaacagtttcattggtcacgcatcctgcacagaccagcccaacagttccctggacaacttccatttttttccatagtaaatcagacaccacaccttcaatgaccaccagtcatggggcagaatccagttcagctgttccaactccaactgtttcaactgaggtaccaggagtagtgacccctttggtcaccagttctagggcagtgatcagtacaactattccaattctgactctttctcctggtgaaccagagaccacaccttcaatggccaccagtcatggggaagaagccagttctgctattccaactccaactgtttcacctggggtaccaggagtggtgacctctctggtcactagttctagggcagtgactagtacaactattccaattctgactttttctcttggtgaaccagagaccacaccttcaatggccaccagtcatgggacagaagctggctcagctgttccaactgttttacctgaggtaccaggaatggtgacctctctggttgctagttctagggcagtaaccagtacaactcttccaactctgactctttctcctggtgaaccagagaccacaccttcaatggccaccagtcatggggcagaagccagctcaactgttccaactgtttcacctgaggtaccaggagtggtgacctctctggtcactagttctagtggagtaaacagtacaagtattccaactctgattctttctcctggtgaactagaaaccacaccttcaatggccaccagtcatggggcagaagccagctcagctgttccaactccaactgtttcacctggggtatcaggagtggtgacccctctggtcactagttccagggcagtgaccagtacaactattccaattctaactctttcttctagtgagccagagaccacaccttcaatggccaccagtcatggggtagaagccagctcagctgttctaactgtttcacctgaggtaccaggaatggtgacctctctggtcactagttctagagcagtaaccagtacaactattccaactctgactatttcttctgatgaaccagagaccacaacttcattggtcacccattctgaggcaaagatgatttcagccattccaactttagctgtctcccctactgtacaagggctggtgacttcactggtcactagttctgggtcagagaccagtgcgttttcaaatctaactgttgcctcaagtcaaccagagaccatagactcatgggtcgctcatcctgggacagaagcaagttctgttgttccaactttgactgtctccactggtgagccgtttacaaatatctcattggtcacccatcctgcagagagtagctcaactcttcccaggacaacctcaaggttttcccacagtgaattagacactatgccttctacagtcaccagtcctgaggcagaatccagctcagccatttcaacaactatttcacctggtataccaggtgtgctgacatcactggtcactagctctgggagagacatcagtgcaacttttccaacagtgcctgagtccccacatgaatcagaggcaacagcctcatgggttactcatcctgcagtcaccagcacaacagttcccaggacaacccctaattattctcatagtgaaccagacaccacaccatcaatagccaccagtcctggggcagaagccacttcagattttccaacaataactgtctcacctgatgtaccagatatggtaacctcacaggtcactagttctgggacagacaccagtataactattccaactctgactctttcttctggtgagccagagaccacaacctcatttatcacctattctgagacacacacaagttcagccattccaactctccctgtctcccctggtgcatcaaagatgctgacctcactggtcatcagttctgggacagacagcactacaactttcccaacactgacggagaccccatatgaaccagagacaacagccatacagctcattcatcctgcagagaccaacacaatggttcccaggacaactcccaagttttcccatagtaagtcagacaccacactcccagtagccatcaccagtcctgggccagaagccagttcagctgtttcaacgacaactatctcacctgatatgtcagatctggtgacctcactggtccctagttctgggacagacaccagtacaaccttcccaacattgagtgagaccccatatgaaccagagactacagccacgtggctcactcatcctgcagaaaccagcacaacggtttctgggacaattcccaacttttcccataggggatcagacactgcaccctcaatggtcaccagtcctggagtagacacgaggtcaggtgttccaactacaaccatcccacccagtataccaggggtagtgacctcacaggtcactagttctgcaacagacactagtacagctattccaactttgactccttctcctggtgaaccagagaccacagcctcatcagctacccatcctgggacacagactggcttcactgttccaattcggactgttccctctagtgagccagatacaatggcttcctgggtcactcatcctccacagaccagcacacctgtttccagaacaacctccagtttttcccatagtagtccagatgccacacctgtaatggccaccagtcctaggacagaagccagttcagctgtactgacaacaatctcacctggtgcaccagagatggtgacttcacagatcactagttctggggcagcaaccagtacaactgttccaactttgactcattctcctggtatgccagagaccacagccttattgagcacccatcccagaacagagacaagtaaaacatttcctgcttcaactgtgtttcctcaagtatcagagaccacagcctcactcaccattagacctggtgcagagactagcacagctctcccaactcagacaacatcctctctcttcaccctacttgtaactggaaccagcagagttgatctaagtccaactgcttcacctggtgtttctgcaaaaacagccccactttccacccatccagggacagaaaccagcacaatgattccaacttcaactctttcccttggtttactagagactacaggcttactggccaccagctcttcagcagagaccagcacgagtactctaactctgactgtttcccctgctgtctctgggctttccagtgcctctataacaactgataagccccaaactgtgacctcctggaacacagaaacctcaccatctgtaacttcagttggacccccagaattttccaggactgtcacaggcaccactatgaccttgataccatcagagatgccaacaccacctaaaaccagtcatggagaaggagtgagtccaaccactatcttgagaactacaatggttgaagccactaatttagctaccacaggttccagtcccactgtggccaagacaacaaccaccttcaatacactggctggaagcctctttactcctctgaccacacctgggatgtccaccttggcctctgagagtgtgacctcaagaacaagttataaccatcggtcctggatctccaccaccagcagttataaccgtcggtactggacccctgccaccagcactccagtgacttctacattctccccagggatttccacatcctccatccccagctccacagcagccacagtcccattcatggtgccattcaccctcaacttcaccatcaccaacctgcagtacgaggaggacatgcggcaccctggttccaggaagttcaacgccacagagagagaactgcagggtctgctcaaacccttgttcaggaatagcagtctggaatacctctattcaggctgcagactagcctcactcaggccagagaaggatagctcagccacggcagtggatgccatctgcacacatcgccctgaccctgaagacctcggactggacagagagcgactgtactgggagctgagcaatctgacaaatggcatccaggagctgggcccctacaccctggaccggaacagtctctatgtcaatggtttcacccatcgaagctctatgcccaccaccagcactcctgggacctccacagtggatgtgggaacctcagggactccatcctccagccccagccccacgactgctggccctctcctgatgccgttcaccctcaacttcaccatcaccaacctgcagtacgaggaggacatgcgtcgcactggctccaggaagttcaacaccatggagagtgtcctgcagggtctgctcaagcccttgttcaagaacaccagtgttggccctctgtactctggctgcagattgaccttgctcaggcccgagaaagatggggcagccactggagtggatgccatctgcacccaccgccttgaccccaaaagccctggactcaacagggagcagctgtactgggagctaagcaaactgaccaatgacattgaagagctgggcccctacaccctggacaggaacagtctctatgtcaatggtttcacccatcagagctctgtgtccaccaccagcactcctgggacctccacagtggatctcagaacctcagggactccatcctccctctccagccccacaattatggctgctggccctctcctggtaccattcaccctcaacttcaccatcaccaacctgcagtatggggaggacatgggtcaccctggctccaggaagttcaacaccacagagagggtcctgcagggtctgcttggtcccatattcaagaacaccagtgttggccctctgtactctggctgcagactgacctctctcaggtctgagaaggatggagcagccactggagtggatgccatctgcatccatcatcttgaccccaaaagccctggactcaacagagagcggctgtactgggagctgagccaactgaccaatggcatcaaagagctgggcccctacaccctggacaggaacagtctctatgtcaatggtttcacccatcggacctctgtgcccaccagcagcactcctgggacctccacagtggaccttggaacctcagggactccattctccctcccaagccccgcaactgctggccctctcctggtgctgttcaccctcaacttcaccatcaccaacctgaagtatgaggaggacatgcatcgccctggctccaggaagttcaacaccactgagagggtcctgcagactctgcttggtcctatgttcaagaacaccagtgttggccttctgtactctggctgcagactgaccttgctcaggtccgagaaggatggagcagccactggagtggatgccatctgcacccaccgtcttgaccccaaaagccctggagtggacagggagcagctatactgggagctgagccagctgaccaatggcatcaaagagctgggcccctacaccctggacaggaacagtctctatgtcaatggtttcacccattggatccctgtgcccaccagcagcactcctgggacctccacagtggaccttgggtcagggactccatcctccctccccagccccacaactgctggccctctcctggtgccgttcaccctcaacttcaccatcaccaacctgaagtacgaggaggacatgcattgccctggctccaggaagttcaacaccacagagagagtcctgcagagtctgcttggtcccatgttcaagaacaccagtgttggccctctgtactctggctgcagactgaccttgctcaggtccgagaaggatggagcagccactggagtggatgccatctgcacccaccgtcttgaccccaaaagccctggagtggacagggagcagctatactgggagctgagccagctgaccaatggcatcaaagagctgggtccctacaccctggacagaaacagtctctatgtcaatggtttcacccatcagacctctgcgcccaacaccagcactcctgggacctccacagtggaccttgggacctcagggactccatcctccctccccagccctacatctgctggccctctcctggtgccattcaccctcaacttcaccatcaccaacctgcagtacgaggaggacatgcatcacccaggctccaggaagttcaacaccacggagcgggtcctgcagggtctgcttggtcccatgttcaagaacaccagtgtcggccttctgtactctggctgcagactgaccttgctcaggcctgagaagaatggggcagccactggaatggatgccatctgcagccaccgtcttgaccccaaaagccctggactcaacagagagcagctgtactgggagctgagccagctgacccatggcatcaaagagctgggcccctacaccctggacaggaacagtctctatgtcaatggtttcacccatcggagctctgtggcccccaccagcactcctgggacctccacagtggaccttgggacctcagggactccatcctccctccccagccccacaacagctgttcctctcctggtgccgttcaccctcaactttaccatcaccaatctgcagtatggggaggacatgcgtcaccctggctccaggaagttcaacaccacagagagggtcctgcagggtctgcttggtcccttgttcaagaactccagtgtcggccctctgtactctggctgcagactgatctctctcaggtctgagaaggatggggcagccactggagtggatgccatctgcacccaccaccttaaccctcaaagccctggactggacagggagcagctgtactggcagctgagccagatgaccaatggcatcaaagagctgggcccctacaccctggaccggaacagtctctacgtcaatggtttcacccatcggagctctgggctcaccaccagcactccttggacttccacagttgaccttggaacctcagggactccatcccccgtccccagccccacaaccaccggccctctcctggtgccattcacactcaacttcaccatcactaacctacagtatgaggagaacatgggtcaccctggctccaggaagttcaacatcacggagagtgttctgcagggtctgctcaagcccttgttcaagagcaccagtgttggccctctgtattctggctgcagactgaccttgctcaggcctgagaaggatggagtagccaccagagtggacgccatctgcacccaccgccctgaccccaaaatccctgggctagacagacagcagctatactgggagctgagccagctgacccacagcatcactgagctgggaccctacaccctggatagggacagtctctatgtcaatggtttcacccagcggagctctgtgcccaccaccagcactcctgggactttcacagtacagccggaaacctctgagactccatcatccctccctggccccacagccactggccctgtcctgctgccattcaccctcaattttaccatcactaacctgcagtatgaggaggacatgcgtcgccctggctccaggaagttcaacaccacggagagggtccttcagggtctgcttatgcccttgttcaagaacaccagtgtcagctctctgtactctggttgcagactgaccttgctcaggcctgagaaggatggggcagccaccagagtggatgctgtctgcacccatcgtcctgaccccaaaagccctggactggacagagagcggctgtactggaagctgagccagctgacccacggcatcactgagctgggcccctacaccctggacaggcacagtctctatgtcaatggtttcacccatcagagctctatgacgaccaccagaactcctgatacctccacaatgcacctggcaacctcgagaactccagcctccctgtctggacccatgaccgccagccctctcctggtgctattcacaattaacttcaccatcactaacctgcggtatgaggagaacatgcatcaccctggctctagaaagtttaacaccacggagagagtccttcagggtctgctcaggcctgtgttcaagaacaccagtgttggccctctgtactctggctgcagactgaccttgctcaggcccaagaaggatggggcagccaccaaagtggatgccatctgcacctaccgccctgatcccaaaagccctggactggacagagagcagctatactgggagctgagccagctgacccacagcatcactgagctgggcccctacaccctggacagggacagtctctatgtcaatggtttcacacagcggagctctgtgcccaccactagcattcctgggacccccacagtggacctgggaacatctgggactccagtttctaaacctggtccctcggctgccagccctctcctggtgctattcactctcaacttcaccatcaccaacctgcggtatgaggagaacatgcagcaccctggctccaggaagttcaacaccacggagagggtccttcagggcctgctcaggtccctgttcaagagcaccagtgttggccctctgtactctggctgcagactgactttgctcaggcctgaaaaggatgggacagccactggagtggatgccatctgcacccaccaccctgaccccaaaagccctaggctggacagagagcagctgtattgggagctgagccagctgacccacaatatcactgagctgggcccctatgccctggacaacgacagcctctttgtcaatggtttcactcatcggagctctgtgtccaccaccagcactcctgggacccccacagtgttcaccctcaacttcaccatcactaacctgcggtatgaggagaacatgtggcctggctccaggaagttcaacactacagagagggtccttcagggcctgctaaggcccttgttcaagaacaccagtgttggccctctgtactctggctgcaggctgaccttgctcaggccagagaaagatggggaagccaccggagtggatgccatctgcacccaccgccctgaccccacaggccctgggctggacagagagcagctgtatttggagctgagccagctgacccacagcatcactgagctgggcccctacacactggacagggacagtctctatgtcaatggccggggtggtcagcgaggagccattcacactgaacttcaccatcaacaacctgcgctacatggcggacatgggccaacccggctccctcaagttcaacatcacagacaacgtcatgcagcacctgctcagtcctttgttccagaggagcagcctgggtgcacggtacacaggctgcagggtcatcgcactaaggtctgtgaagaacggtgctgagacacgggtggacctcctctgcacctacctgcagcccctcagcggcccaggtctgcctatcaagcaggtgttccatgagctgagccagcagacccatggcatcacccggctgggcccctactctctggacaaagacagcctctaccttaacggttacaatgaacctggtccagatgagcctcctacaactcccaagccagccaccacattcctgcctcctctgtcagaagccacaacagccatggggtaccacctgaagaccctcacactcaacttcaccatctccaatctccagtattcaccagatatgggcaagggctcagctacattcaactccaccgagggggtccttcagcacctgctcagacccttgttccagaagagcagcatgggccccttctacttgggttgccaactgatctccctcaggcctgagaaggatggggcagccactggtgtggacaccacctgcacctaccaccctgaccctgtgggccccgggctggacatacagcagctttactgggagctgagtcagctgacccatggtgtcacccaactgggcttctatgtcctggacagggatagcctcttcatcaatggctatgcaccccagaatttatcaatccggggcgagtaccagataaatttccacattgtcaactggaacctcagtaatccagaccccacatcctcagagtacatcaccctgctgagggacatccaggacaaggtcaccacactctacaaaggcagtcaactacatgacacattccgcttctgcctggtcaccaacttgacgatggactccgtgttggtcactgtcaaggcattgttctcctccaatttggaccccagcctggtggagcaagtctttctagataagaccctgaatgcctcattccattggctgggctccacctaccagttggtggacatccatgtgacagaaatggagtcatcagtttatcaaccaacaagcagctccagcacccagcacttctacctgaatttcaccatcaccaacctaccatattcccaggacaaagcccagccaggcaccaccaattaccagaggaacaaaaggaatattgaggatgcgctcaaccaactcttccgaaacagcagcatcaagagttatttttctgactgtcaagtttcaacattcaggtctgtccccaacaggcaccacaccggggtggactccctgtgtaacttctcgccactggctcggagagtagacagagttgccatctatgaggaatttctgcggatgacccggaatggtacccagctgcagaacttcaccctggacaggagcagtgtccttgtggatgggtattctcccaacagaaatgagcccttaactgggaattctgaccttcccttctgggctgtcatcctcatcggcttggcaggactcctgggagtcatcacatgcctgatctgcggtgtcctggtgaccacccgccggcggaagaaggaaggagaatacaacgtccagcaacagtgcccaggctactaccagtcacacctagacctggaggatctgcaatgactggaacttgccggtgcctggggtgcctttcccccagccagggtccaaagaagcttggctggggcagaaataaaccatattggtcggacac

SEQ ID NO: 9097 - protein, 5222 aa, Homo sapiens
MPTGATTKVSRTEALSLGRTSTPGPAQSTISPEISTETITRISTPLTTTGSAEMTITPKTGHSGASSQGTFTLDTSSRASWPGTHSAATHRSPHSGMTTPMSRGPEDVSWPSRPSVEKTSPPSSLVSLSAVTSPSPLYSTPSESSHSSPLRVTSLFTPVMMKTTDMLDTSLEPVTTSPPSMNITSDESLATSKATMETEAIQLSENTAVTQMGTISARQEFYSSYPGLPEPSKVTSPVVTSSTIKDIVSTTIPASSEITRIEMESTSTLTPTPRETSTSQEIHSATKPSTVPYKALTSATIEDSMTQVMSSSRGPSPDQSTMSQDISTEVITRLSTSPIKTESTEMTITTQTGSPGATSRGTLTLDTSTTFMSGTHSTASQGFSHSQMTALMSRTPGDVPWLSHPSVEEASSASFSLSSPVMTSSSPVSSTLPDSIHSSSLPVTSLLTSGLVKTTELLGTSSEPETSSPPNLSSTSAEILAITEVTTDTEKLEMTNVVTSGYTHESPSSVLADSVTTKATSSMGITYPTGDTNVLTSTPAFSDTSRIQTKSKLSLTPGLMETSISEETSSATEKSTVLSSVPTGATTEVSRTEAISSSRTSIPGPAQSTMSSDTSMETITRISTPLTRKESTDMAITPKTGPSGATSQGTFTLDSSSTASWPGTHSATTQRFPQSVVTTPMSRGPEDVSWPSPLSVEKNSPPSSLVSSSSVTSPSPLYSTPSGSSHSSPVPVTSLFTSIMMKATDMLDASLEPETTSAPNMNITSDESLAASKATTETEAIHVFENTAASHVETTSATEELYSSSPGFSEPTKVISPVVTSSSIRDNMVSTTMPGSSGITRIEIESMSSLTPGLRETRTSQDITSSTETSTVLYKMPSGATPEVSRTEVMPSSRTSIPGPAQSTMSLDISDEVVTRLSTSPIMTESAEITITTQTGYSLATSQVTLPLGTSMTFLSGTHSTMSQGLSHSEMTNLMSRGPESLSWTSPRFVETTRSSSSLTSLPLTTSLSPVSSTLLDSSPSSPLPVTSLILPGLVKTTEVLDTSSEPKTSSSPNLSSTSVEIPATSEIMTDTEKIHPSSNTAVAKVRTSSSVHESHSSVLADSETTITIPSMGITSAVDDTTVFTSNPAFSETRRIPTEPTFSLTPGFRETSTSEETTSITETSAVLYGVPTSATTEVSMTEIMSSNRIHIPDSDQSTMSPDIITEVITRLSSSSMMSESTQMTITTQKSSPGATAQSTLTLATTTAPLARTHSTVPPRFLHSEMTTLMSRSPENPSWKSSLFVEKTSSSSSLLSLPVTTSPSVSSTLPQSIPSSSFSVTSLLTPGMVKTTDTSTEPGTSLSPNLSGTSVEILAASEVTTDTEKIHPSSSMAVTNVGTTSSGHELYSSVSIHSEPSKATYPVGTPSSMAETSISTSMPANFETTGFEAEPFSHLTSGFRKTNMSLDTSSVTPTNTPSSPGSTHLLQSSKTDFTSSAKTSSPDWPPASQYTEIPVDIITPFNASPSITESTGITSFPESRFTMSVTESTHHLSTDLLPSAETISTGTVMPSLSEAMTSFATTGVPRAISGSGSPFSRTESGPGDATLSTIAESLPSSTPVPFSSSTFTTTDSSTIPALHEITSSSATPYRVDTSLGTESSTTEGRLVMVSTLDTSSQPGRTSSSPILDTRMTESVELGTVTSAYQVPSLSTRLTRTDGIMEHITKIPNEAAHRGTIRPVKGPQTSTSPASPKGLHTGGTKRMETTTTALKTTTTALKTTSRATLTTSVYTPTLGTLTPLNASMQMASTIPTEMMITTPYVFPDVPETTSSLATSLGAETSTALPRTTPSVFNRESETTASLVSRSGAERSPVIQTLDVSSSEPDTTASWVIHPAETIPTVSKTTPNFFHSELDTVSSTATSHGADVSSAIPTNISPSELDALTPLVTISGTDTSTTFPTLTKSPHETETRTTWLTHPAETSSTIPRTIPNFSHHESDATPSIATSPGAETSSAIPIMTVSPGAEDLVTSQVTSSGTDRNMTIPTLTLSPGEPKTIASLVTHPEAQTSSAIPTSTISPAVSRLVTSMVTSLAAKTSTTNRALTNSPGEPATTVSLVTHPAQTSPTVPWTTSIFFHSKSDTTPSMTTSHGAESSSAVPTPTVSTEVPGVVTPLVTSSRAVISTTIPILTLSPGEPETTPSMATSHGEEASSAIPTPTVSPGVPGVVTSLVTSSRAVTSTTIPILTFSLGEPETTPSMATSHGTEAGSAVPTVLPEVPGMVTSLVASSRAVTSTTLPTLTLSPGEPETTPSMATSHGAEASSTVPTVSPEVPGVVTSLVTSSSGVNSTSIPTLILSPGELETTPSMATSHGAEASSAVPTPTVSPGVSGVVTPLVTSSRAVTSTTIPILTLSSSEPETTPSMATSHGVEASSAVLTVSPEVPGMVTSLVTSSRAVTSTTIPTLTISSDEPETTTSLVTHSEAKMISAIPTLAVSPTVQGLVTSLVTSSGSETSAFSNLTVASSQPETIDSWVAHPGTEASSVVPTLTVSTGEPFTNISLVTHPAESSSTLPRTTSRFSHSELDTMPSTVTSPEAESSSAISTTISPGIPGVLTSLVTSSGRDISATFPTVPESPHESEATASWVTHPAVTSTTVPRTTPNYSHSEPDTTPSIATSPGAEATSDFPTITVSPDVPDMVTSQVTSSGTDTSITIPTLTLSSGEPETTTSFITYSETHTSSAIPTLPVSPGASKMLTSLVISSGTDSTTTFPTLTETPYEPETTAIQLIHPAETNTMVPRTTPKFSHSKSDTTLPVAITSPGPEASSAVSTTTISPDMSDLVTSLVPSSGTDTSTTFPTLSETPYEPETTATWLTHPAETSTTVSGTIPNFSHRGSDTAPSMVTSPGVDTRSGVPTTTIPPSIPGVVTSQVTSSATDTSTAIPTLTPSPGEPETTASSATHPGTQTGFTVPIRTVPSSEPDTMASWVTHPPQTSTPVSRTTSSFSHSSPDATPVMATSPRTEASSAVLTTISPGAPEMVTSQITSSGAATSTTVPTLTHSPGMPETTALLSTHPRTETSKTFPASTVFPQVSETTASLTIRPGAETSTALPTQTTSSLFTLLVTGTSRVDLSPTASPGVSAKTAPLSTHPGTETSTMIPTSTLSLGLLETTGLLATSSSAETSTSTLTLTVSPAVSGLSSASITTDKPQTVTSWNTETSPSVTSVGPPEFSRTVTGTTMTLIPSEMPTPPKTSHGEGVSPTTILRTTMVEATNLATTGSSPTVAKTTTTFNTLAGSLFTPLTTPGMSTLASESVTSRTSYNHRSWISTTSSYNRRYWTPATSTPVTSTFSPGISTSSIPSSTAATVPFMVPFTLNFTITNLQYEEDMRHPGSRKFNATERELQGLLKPLFRNSSLEYLYSGCRLASLRPEKDSSATAVDAICTHRPDPEDLGLDRERLYWELSNLTNGIQELGPYTLDRNSLYVNGFTHRSSMPTTSTPGTSTVDVGTSGTPSSSPSPTTAGPLLMPFTLNFTITNLQYEEDMRRTGSRKFNTMESVLQGLLKPLFKNTSVGPLYSGCRLTLLRPEKDGAATGVDAICTHRLDPKSPGLNREQLYWELSKLTNDIEELGPYTLDRNSLYVNGFTHQSSVSTTSTPGTSTVDLRTSGTPSSLSSPTIMAAGPLLVPFTLNFTITNLQYGEDMGHPGSRKFNTTERVLQGLLGPIFKNTSVGPLYSGCRLTSLRSEKDGAATGVDAICIHHLDPKSPGLNRERLYWELSQLTNGIKELGPYTLDRNSLYVNGFTHRTSVPTSSTPGTSTVDLGTSGTPFSLPSPATAGPLLVLFTLNFTITNLKYEEDMHRPGSRKFNTTERVLQTLLGPMFKNTSVGLLYSGCRLTLLRSEKDGAATGVDAICTHRLDPKSPGVDREQLYWELSQLTNGIKELGPYTLDRNSLYVNGFTHWIPVPTSSTPGTSTVDLGSGTPSSLPSPTTAGPLLVPFTLNFTITNLKYEEDMHCPGSRKFNTTERVLQSLLGPMFKNTSVGPLYSGCRLTLLRSEKDGAATGVDAICTHRLDPKSPGVDREQLYWELSQLTNGIKELGPYTLDRNSLYVNGFTHQTSAPNTSTPGTSTVDLGTSGTPSSLPSPTSAGPLLVPFTLNFTITNLQYEEDMHHPGSRKFNTTERVLQGLLGPMFKNTSVGLLYSGCRLTLLRPEKNGAATGMDAICSHRLDPKSPGLNREQLYWELSQLTHGIKELGPYTLDRNSLYVNGFTHRSSVAPTSTPGTSTVDLGTSGTPSSLPSPTTAVPLLVPFTLNFTITNLQYGEDMRHPGSRKFNTTERVLQGLLGPLFKNSSVGPLYSGCRLISLRSEKDGAATGVDAICTHHLNPQSPGLDREQLYWQLSQMTNGIKELGPYTLDRNSLYVNGFTHRSSGLTTSTPWTSTVDLGTSGTPSPVPSPTTTGPLLVPFTLNFTITNLQYEENMGHPGSRKFNITESVLQGLLKPLFKSTSVGPLYSGCRLTLLRPEKDGVATRVDAICTHRPDPKIPGLDRQQLYWELSQLTHSITELGPYTLDRDSLYVNGFTQRSSVPTTSTPGTFTVQPETSETPSSLPGPTATGPVLLPFTLNFTITNLQYEEDMRRPGSRKFNTTERVLQGLLMPLFKNTSVSSLYSGCRLTLLRPEKDGAATRVDAVCTHRPDPKSPGLDRERLYWKLSQLTHGITELGPYTLDRHSLYVNGFTHQSSMTTTRTPDTSTMHLATSRTPASLSGPMTASPLLVLFTINFTITNLRYEENMHHPGSRKFNTTERVLQGLLRPVFKNTSVGPLYSGCRLTLLRPKKDGAATKVDAICTYRPDPKSPGLDREQLYWELSQLTHSITELGPYTLDRDSLYVNGFTQRSSVPTTSIPGTPTVDLGTSGTPVSKPGPSAASPLLVLFTLNFTITNLRYEENMQHPGSRKFNTTERVLQGLLRSLFKSTSVGPLYSGCRLTLLRPEKDGTATGVDAICTHHPDPKSPRLDREQLYWELSQLTHNITELGPYALDNDSLFVNGFTHRSSVSTTSTPGTPTVFTLNFTITNLRYEENMWPGSRKFNTTERVLQGLLRPLFKNTSVGPLYSGCRLTLLRPEKDGEATGVDAICTHRPDPTGPGLDREQLYLELSQLTHSITELGPYTLDRDSLYVNGRGGQRGAIHTELHHQQPALHGGHGPTRLPQVQHHRQRHAAPAQSFVPEEQPGCTVHRLQGHRTKVCEERC

SEQ ID NO: 9098 - DNA, 40713 bp, Homo sapiens
cagagactagtcccagattcaagacagggttaccttcagcaacaaccactgtttcaacctctgccacttctctctctgctactgtaatggtctctaaattcacttctccagcaactagttccatggaagcaacttctatcagggaaccatcaacaaccatcctcacaacagagaccacgaatggcccaggctctatggctgtggcttctaccaacatcccaattggaaagggctacattactgaaggaagattggacacaagccatctgcccattggaaccacagcttcctctgagacatctatggattttaccatggccaaagaaagtgtctcaatgtcagtatctccatctcagtccatggatgctgctggctcaagcactccaggaaggacaagccaattcgttgacacattttctgatgatgtctatcatttaacatccagagaaattacaatacctagagatggaacaagctcagctctgactccacaaatgactgcaactcaccctccatctcctgatcctggctctgctagaagcacctggcttggcatcttgtcctcatctccttcttctcctactcccaaagtcacaatgagctccacattttcaactcagagagtcaccacaagcatgataatggacacagttgaaactagtcggtggaacatgcccaacttaccttccacgacttccttgacaccaagtaatattccaacaagtggtgccataggaaaaagcaccctggttcccttggacactccatctccagccacatcattggaggcatcagaagggggacttccaaccctcagcacctaccctgaatcaacaaacacacccagcatccacctcggagcacacgctagttcagaaagtccaagcaccatcaaacttaccatggcttcagtagtaaaacctggctcttacacacctctcaccttcccctcaatagagacccacattcatgtatcaacagccagaatggcttactcttctgggtcttcacctgagatgacagctcctggagagactaacactggtagtacctgggaccccaccacctacatcaccactacggatcctaaggatacaagttcagctcaggtctctacaccccactcagtgaggacactcagaaccacagaaaaccatccaaagacagagtccgccaccccagctgcttactctggaagtcctaaaatctcaagttcacccaatctcaccagtccggccacaaaagcatggaccatcacagacacaactgaacactccactcaattacattacacaaaattggcagaaaaatcatctggatttgagacacagtcagctccaggacctgtctctgtagtaatccctacctcccctaccattggaagcagcacattggaactaacttctgatgtcccaggggaacccctggtccttgctcccagtgagcagaccacaatcactctccccatggcaacatggctgagtaccagtttgacagaggaaatggcttcaacagaccttgatatttcaagtccaagttcacccatgagtacatttgctatttttccacctatgtccacaccttctcatgaactttcaaagtcagaggcagataccagtgccattagaaatacagattcaacaacgttggatcagcacctaggaatcaggagtttgggcagaactggggacttaacaactgttcctatcaccccactgacaaccacgtggaccagtgtgattgaacactcaacacaagcacaggacaccctttctgcaacgatgagtcctactcacgtgacacagtcactcaaagatcaaacatctataccagcctcagcatccccttcccatcttactgaagtctaccctgagctcgggacacaagggagaagctcctctgaggcaaccactttttggaaaccatctacagacacactgtccagagagattgagactggcccaacaaacattcaatccactccacccatggacaacacaacaacagggagcagtagtagtggagtcaccctgggcatagcccaccttcccataggaacatcctccccagctgagacatccacaaacatggcactggaaagaagaagttctacagccactgtctctatggctgggacaatgggactccttgttactagtgctccaggaagaagcatcagccagtcattaggaagagtttcctctgtcctttctgagtcaactactgaaggagtcacagattctagtaagggaagcagcccaaggctgaacacacagggaaatacagctctctcctcctctcttgaacccagctatgctgaaggaagccagatgagcacaagcatccctctaacctcatctcctacaactcctgatgtggaattcatagggggcagcacattttggaccaaggaggtcaccacagttatgacctcagacatctccaagtcttcagcaaggacagagtccagctcagctacccttatgtccacagctttgggaagcactgaaaatacaggaaaagaaaaactcagaactgcctctatggatcttccatctccaactccatcaatggaggtgacaccatggatttctctcactctcagtaatgcccccaataccacagattcacttgacctcagccatggggtgcacaccagctctgcagggactttggccactgacaggtcattgaatactggtgtcactagagcctccagattggaaaacggctctgatacctcttctaagtccctgtctatgggaaacagcactcacacttccatgacttacacagagaagagtgaagtgtcttcttcaatccatccccgacctgagacctcagctcctggagcagagaccactttgacttccactcctggaaacagggccataagcttaacattgcctttttcatccattccagtggaagaagtcatttctacaggcataacctcaggaccagacatcaactcagcacccatgacacattctcccatcaccccaccaacaattgtatggaccagtacaggcacaattgaacagtccactcaaccactacatgcagtttcttcagaaaaagtttctgtgcagacacagtcaactccatatgtcaactctgtggcagtgtctgcttcccctacccatgagaattcagtctcttctggaagcagcacatcctctccatattcctcagcctcacttgaatccttggattccacaatcagtaggaggaatgcaatcacttcctggctatgggacctcactacatctctccccactacaacttggccaagtactagtttatctgaggcactgtcctcaggccattctggggtttcaaacccaagttcaactacgactgaatttccactcttttcagctgcatccacatctgctgctaagcaaagaaatccagaaacagagacccatggtccccagaatacagccgcgagtactttgaacactgatgcatcctcggtcacaggtctttctgagactcctgtgggggcaagtatcagctctgaagtccctcttccaatggccataacttctagatcagatgtttctggccttacatctgagagtactgctaacccgagtttaggcacagcctcttcagcagggaccaaattaactaggacaatatccctgcccacttcagagtctttggtttcctttagaatgaacaaggatccatggacagtgtcaatccctttggggtcccatccaactactaatacagaaacaagcatcccagtaaacagcgcaggtccacctggcttgtccacagtagcatcagatgtaattgacacaccttcagatggggctgagagtattcccactgtctccttttccccctcccctgatactgaagtgacaactatctcacatttcccagaaaagacaactcattcatttagaaccatttcatctctcactcatgagttgacttcaagagtgacacctattcctggggattggatgagttcagctatgtctacaaagcccacaggagccagtccctccattacactgggagagagaaggacaatcacctctgctgctccaaccacttcccccatagttctcactgctagtttcacagagaccagcacagtttcactggataatgaaactacagtaaaaacctcagatatccttgacgcacggaaaacaaatgagctcccctcagatagcagttcttcttctgatctgatcaacacctccatagcttcttcaactatggatgtcactaaaacagcctccatcagtcccactagcatctcaggaatgacagcaagttcctccccatctctcttctcttcagatagaccccaggttcccacatctacaacagagacaaatacagccacctctccatctgtttccagtaacacctattctcttgatgggggctccaatgtgggtggcactccatccactttaccaccctttacaatcacccaccctgtcgagacaagctcggccctattagcctggtctagaccagtaagaactttcagcaccatggtcagcactgacactgcctccggagaaaatcctacctctagcaattctgtggtgacttctgttccagcaccaggtacatggaccagtgtaggcagtactactgacttacctgccatgggctttctcaagacaagtcctgcaggagaggcacactcacttctagcatcaactattgaaccagccactgccttcactccccatctctcagcagcagtggtcactggatccagtgctacatcagaagccagtcttctcactacgagtgaaagcaaagccattcattcttcaccacagaccccaactacacccacctctggagcaaactgggaaacttcagctactcctgagagccttttggtagtcactgagacttcagacacaacacttacctcaaagattttggtcacagataccatcttgttttcaactgtgtccacgccaccttctaaatttccaagtacggggactctgtctggagcttccttccctactttactcccggacactccagccatccctctcactgccactgagccaacaagttcattagctacatcctttgattccaccccactggtgactatagcttcggatagtcttggcacagtcccagagactaccctgaccatgtcagagacctcaaatggtgatgcactggttcttaagacagtaagtaacccagataggagcatccctggaatcactatccaaggagtaacagaaagtccactccatccttcttccacttccccctctaagattgttgctccacggaatacaacctatgaaggttcgatcacagtggcactttctactttgcctgcgggaactactggttcccttgtattcagtcagagttctgaaaactcagagacaacggctttggtagactcatcagctgggcttgagagggcatctgtgatgccactaaccacaggaagccagggtatggctagctctggaggaatcagaagtgggtccactcactcaactggaaccaaaacattttcttctctccctctgaccatgaacccaggtgaggttacagccatgtctgaaatcaccacgaacagactgacagctactcaatcaacagcacccaaagggatacctgtgaagcccaccagtgctgagtcaggcctcctaacacctgtctctgcctcctcaagcccatcaaaggcctttgcctcactgactacagctcccccaacttgggggatcccacagtctaccttgacatttgagttttctgaggtcccaagtttggatactaagtccgcttctttaccaactcctggacagtccctgaacaccattccagactcagatgcaagcacagcatcttcctcactgtccaagtctccagaaaaaaacccaagggcaaggatgatgacttccacaaaggccataagtgcaagctcatttcaatcaacaggttttactgaaacccctgagggatctgcctccccttctatggcagggcatgaacccagagtccccacttcaggaacaggggaccctagatatgcctcagagagcatgtcttatccagacccaagcaaggcatcatcagctatgacatcgacctctcttgcatcaaaactcacaactctcttcagcacaggtcaagcagcaaggtctggttctagttcctctcccataagcctatccactgagaaagaaacaagcttcctttcccccactgcatccacctccagaaagacttcactatttcttgggccttccatggcaaggcagcccaacatattggtgcatcttcagacttcagctctgacactttctccaacatccactctaaatatgtcccaggaggagcctcctgagttaacctcaagccagaccattgcagaagaagagggaacaacagctgaaacacagacgttaaccttcacaccatctgagaccccaacatccttgttacctgtctcttctcccacagaacccacagccagaagaaagagttctccagaaacatgggcaagctctatttcagttcctgccaagacctccttggttgaaacaactgatggaacgctagtgaccaccataaagatgtcaagccaggcagcacaaggaaattccacgtggcctgccccagcagaggagacggggagcagtccagcaggcacatccccaggaagcccagaaatgtctaccactctcaaaatcatgagctccaaggaacccagcatcagcccagagatcaggtccactgtgagaaattctccttggaagactccagaaacaactgttcccatggagaccacagtggaaccagtcacccttcagtccacagccctaggaagtggcagcaccagcatctctcacctgcccacaggaaccacatcaccaaccaagtcaccaacagaaaatatgttggctacagaaagggtctccctctccccatccccacctgaggcttggaccaacctttattctggaactccaggagggaccaggcagtcactggccacaatgtcctctgtctccctagagtcaccaactgctagaagcatcacagggactggtcagcaaagcagtccagaactggtttcaaagacaactggaatggaattctctatgtggcatggctctactggagggaccacaggggacacacatgtctctctgagcacatcttccaatatccttgaagaccctgtaaccagcccaaactctgtgagctcattgacagataaatccaaacataaaaccgagacatgggtaagcaccacagccattccctccactgtcctgaataataagataatggcagctgaacaacagacaagtcgatctgtggatgaggcttattcatcaactagttcttggtcagatcagacatctgggagtgacatcacccttggtgcatctcctgatgtcacaaacacattatacatcacctccacagcacaaaccacctcactagtgtctctgccctctggagaccaaggcattacaagcctcaccaatccctcaggaggaaaaacaagctctgcgtcatctgtcacatctccttcaatagggcttgagactctgagggccaatgtaagtgcagtgaaaagtgacattgcccctactgctgggcatctatctcagacttcatctcctgcggaagtgagcatcctggacgtaaccacagctcctactccaggtatctccaccaccatcaccaccatgggaaccaactcaatctcaactaccacacccaacccagaagtgggtatgagtaccatggacagcaccccggccacagagaggcgcacaacttctacagaacacccttccacctggtcttccacagctgcatcagattcctggactgtcacagacatgacttcaaacttgaaagttgcaagatctcctggaacaatttccacaatgcatacaacttcattcttagcctcaagcactgaattagactccatgtctactccccatggccgtataactgtcattggaaccagcctggtcactccatcctctgatgcttcagctgtaaagacagagaccagtacaagtgaaagaacattgagtccttcagacacaactgcatctactcccatctcaactttttctcgtgtccagaggatgagcatctcagttcctgacattttaagtacaagttggactcccagtagtacagaagcagaagatgtgcctgtttcaatggtttctacagatcatgctagtacaaagactgacccaaatacgcccctgtccacttttctgtttgattctctgtccactcttgactgggacactgggagatctctgtcatcagccacagccactacctcagctcctcagggggccacaactccccaggaactcactttggaaaccatgatcagcccagctacctcacagttgcccttctctatagggcacattacaagtgcagtcacaccagctgcaatggcaaggagctctggagttactttttcaagaccagatcccacaagcaaaaaggcagagcagacttccactcagcttcccaccaccacttctgcacatccagggcaggtgcccagatcagcagcaacaactctggatgtgatcccacacacagcaaaaactccagatgcaacttttcagagacaagggcagacagctcttacaacagaggcaagagctacatctgactcctggaatgagaaagaaaaatcaaccccaagtgcaccttggatcactgagatgatgaattctgtctcagaagataccatcaaggaggttaccagctcctccagtgtattaaggaccctgaatacgctggacataaacttggaatctgggacgacttcatccccaagttggaaaagcagcccatatgagagaattgccccttctgagtccaccacagacaaagaggcaattcacccttctacaaacacagtagagaccacaggctgggtcacaagttccgaacatgcttctcattccactatcccagcccactcagcgtcatccaaactcacatctccagtggttacaacctccaccagggaacaagcaatagtttctatgtcaacaaccacatggccagagtctacaagggctagaacagagcctaattccttcttgactattgaactgagggacgtcagcccttacatggacaccagctcaaccacacaaacaagtattatctcttccccaggttccactgcgatcaccaaggggcctagaacagaaattacctcctctaagagaatatccagctcattccttgcccagtctatgaggtcgtcagacagcccctcagaagccatcaccaggctgtctaactttcctgccatgacagaatctggaggaatgatccttgctatgcaaacaagtccacctggcgctacatcactaagtgcacctactttggatacatcagccacagcctcctggacagggactccactggctacgactcagagatttacatactcagagaagaccactctctttagcaaaggtcctgaggatacatcacagccaagccctccctctgtggaagaaaccagctcttcctcttccctggtacctatccatgctacaacctcgccttccaatattttgttgacatcacaagggcacagtccctcctctactccacctgtgacctcagttttcttgtctgagacctctggcctggggaagaccacagacatgtcgaggataagcttggaacctggcacaagtttacctcccaatttgagcagtacagcaggtgaggcgttatccacttatgaagcctccagagatacaaaggcaattcatcattctgcagacacagcagtgacgaatatggaggcaaccagttctgaatattctcctatcccaggccatacaaagccatccaaagccacatctccattggttacctcccacatcatgggggacatcacttcttccacatcagtatttggctcctccgagaccacagagattgagacagtgtcctctgtgaaccagggacttcaggagagaagcacatcccaggtggccagctctgctacagagacaagcactgtcattacccatgtgtctagtggtgatgctactactcatgtcaccaagacacaagccactttctctagcggaacatccatctcaagccctcatcagtttataacttctaccaacacatttacagatgtgagcaccaacccctccacctctctgataatgacagaatcttcaggagtgaccatcaccacccaaacaggtcctactggagctgcaacacagggtccatatctcttggacacatcaaccatgccttacttgacagagactccattagctgtgactccagattttatgcaatcagagaagaccactctcataagcaaaggtcccaaggatgtgtcctggacaagccctccctctgtggcagaaaccagctatccctcttccctgacacctttcttggtcacaaccatacctcctgccacttccacgttacaagggcaacatacatcctctcctgtttctgcgacttcagttcttacctctggactggtgaagaccacagatatgttgaacacaagcatggaacctgtgaccaattcacctcaaaatttgaacaatccatcaaatgagatactggccactttggcagccaccacagatatagagactattcatccttccataaacaaagcagtgaccaatatggggactgccagttcagcacatgtactgcattccactctcccagtcagctcagaaccatctacagccacatctccaatggttcctgcctccagcatgggggacgctcttgcttctatatcaatacctggttctgagaccacagacattgagggagagccaacatcctccctgactgctggacgaaaagagaacagcaccctccaggagatgaactcaactacagagtcaaacatcatcctctccaatgtgtctgtgggggctattactgaagccacaaaaatggaagtcccctcttttgatgcaacattcataccaactcctgctcagtcaacaaagttcccagatattttctcagtagccagcagtagactttcaaactctcctcccatgacaatatctacccacatgaccaccacccagacagggtcttctggagctacatcaaagattccacttgccttagacacatcaaccttggaaacctcagcagggactccatcagtggtgactgaggggtttgcccactcaaaaataaccactgcaatgaacaatgatgtcaaggacgtgtcacagacaaaccctccctttcaggatgaagccagctctccctcttctcaagcacctgtccttgtcacaaccttaccttcttctgttgctttcacaccgcaatggcacagtacctcctctcctgtttctatgtcctcagttcttacttcttcactggtaaagaccgcaggcaaggtggatacaagcttagaaacagtgaccagttcacctcaaagtatgagcaacactttggatgacatatcggtcacttcagcagccaccacagatatagagacaacgcatccttccataaacacagtagttaccaatgtggggaccaccggttcagcatttgaatcacattctactgtctcagcttacccagagccatctaaagtcacatctccaaatgttaccacctccaccatggaagacaccacaatttccagatcaatacctaaatcctctaagactacaagaactgagactgagacaacttcctccctgactcctaaactgagggagaccagcatctcccaggagatcacctcgtccacagagacaagcactgttccttacaaagagctcactggtgccactaccgaggtatccaggacagatgtcacttcctctagcagtacatccttccctggccctgatcagtccacagtgtcactagacatctccacagaaaccaacaccaggctgtctacctccccaataatgacagaatctgcagaaataaccatcaccacccaaacaggtcctcatggggctacatcacaggatacttttaccatggacccatcaaatacaaccccccaggcagggatccactcagctatgactcatggattttcacaattggatgtgaccactcttatgagcagaattccacaggatgtatcatggacaagtcctccctctgtggataaaaccagctccccctcttcctttctgtcctcacctgcaatgaccacaccttccctgatttcttctaccttaccagaggataagctctcctctcctatgacttcacttctcacctctggcctagtgaagattacagacatattacgtacacgcttggaacctgtgaccagctcacttccaaatttcagcagcacctcagataagatactggccacttctaaagacagtaaagacacaaaggaaatttttccttctataaacacagaagagaccaatgtgaaagccaacaactctggacatgaatcccattcccctgcactggctgactcagagacacccaaagccacaactcaaatggttatcaccaccactgtgggagatccagctccttccacatcaatgccagtgcatggttcctctgagactacaaacattaagagagagccaacatatttcttgactcctagactgagagagaccagtacctctcaggagtccagctttcccacggacacaagttttctactttccaaagtccccactggtactattactgaggtctccagtacaggggtcaactcttctagcaaaatttccaccccagaccatgataagtccacagtgccacctgacaccttcacaggagagatccccagggtcttcacctcctctattaagacaaaatctgcagaaatgacgatcaccacccaagcaagtcctcctgagtctgcatcgcacagtacccttcccttggacacatcaaccacactttcccagggagggactcattcaactgtgactcagggattcccatactcagaggtgaccactctcatgggcatgggtcctgggaatgtgtcatggatgacaactccccctgtggaagaaaccagctctgtgtcttccctgatgtcttcacctgccatgacatccccttctcctgtttcctccacatcaccacagagcatcccctcctctcctcttcctgtgactgcacttcctacttctgttctggtgacaaccacagatgtgttgggcacaacaagcccagagtctgtaaccagttcacctccaaatttgagcagcatcactcatgagagaccggccacttacaaagacactgcacacacagaagccgccatgcatcattccacaaacaccgcagtgaccaatgtagggacttccgggtctggacataaatcacaatcctctgtcctagctgactcagagacatcgaaagccacacctctgatgagtaccacctccaccctgggggacacaagtgtttccacatcaactcctaatatctctcagactaaccaaattcaaacagagccaacagcatccctgagccctagactgagggagagcagcacgtctgagaagaccagctcaacaacagagacaaatactgccttttcttatgtgcccacaggtgctattactcaggcctccagaacagaaatctcctctagcagaacatccatctcagaccttgatcggcccacaatagcacccgacatctccacaggaatgatcaccaggctcttcacctcccccatcatgacaaaatctgcagaaatgaccgtcaccactcaaacaactactcctggggctacatcacagggtatccttccctgggacacatcaaccacacttttccagggagggactcattcaaccgtgtctcagggattcccacactcagagataaccactcttcggagcagaacccctggagatgtgtcatggatgacaactccccctgtggaagaaaccagctctgggttttccctgatgtcaccttccatgacatccccttctcctgtttcctccacatcaccagagagcatcccctcctctcctctccctgtgactgcacttcttacttctgttctggtgacaaccacaaatgtattgggcacaacaagcccagagcccgtaacgagttcacctccaaatttaagcagccccacacaggagagactgaccacttacaaagacactgcgcacacagaagccatgcatgcttccatgcatacaaacactgcagtggccaacgtggggacctccatttctggacatgaatcacaatcttctgtcccagctgattcacacacatccaaagccacatctccaatgggtatcaccttcgccatgggggatacaagtgtttctacatcaactcctgccttctttgagactagaattcagactgaatcaacatcctctttgattcctggattaagggacaccaggacgtctgaggagatcaacactgtgacagagaccagcactgtcctttcagaagtgcccactactactactactgaggtctccaggacagaagttatcacttccagcagaacaaccatctcagggcctgatcattccaaaatgtcaccctacatctccacagaaaccatcaccaggctctccacttttccttttgtaacaggatccacagaaatggccatcaccaaccaaacaggtcctatagggactatctcacaggctacccttaccctggacacatcaagcacagcttcctgggaagggactcactcacctgtgactcagagatttccacactcagaggagaccactactatgagcagaagtactaagggcgtgtcatggcaaagccctccctctgtggaagaaaccagttctccttcttccccagtgcctttacctgcaataacctcacattcatctctttattccgcagtatcaggaagtagccccacttctgctctccctgtgacttcccttctcacctctggcaggaggaagaccatagacatgttggacacacactcagaacttgtgaccagctccttaccaagtgcaagtagcttctcaggtgagatactcacttctgaagcctccacaaatacagagacaattcacttttcagagaacacagcagaaaccaatatggggaccaccaattctatgcataaactacattcctctgtctcaatccactcccagccatccggacacacacctccaaaggttactggatctatgatggaggacgctattgtttccacatcaacacctggttctcctgagactaaaaatgttgacagagactcaacatcccctctgactcctgaactgaaagaggacagcaccgccctggtgatgaactcaactacagagtcaaacactgttttctccagtgtgtccctggatgctgctactgaggtctccagggcagaagtcacctactatgatcctacattcatgccagcttctgctcagtcaacaaagtccccagacatttcacctgaagccagcagcagtcattctaactctcctcccttgacaatatctacacacaagaccatcgccacacaaacaggtccttctggggtgacatctcttggccaactgaccctggacacatcaaccatagccacctcagcaggaactccatcagccagaactcaggattttgtagattcagaaacaaccagtgtcatgaacaatgatctcaatgatgtgttgaagacaagccctttctctgcagaagaagccaactctctctcttctcaggcacctctccttgtgacaacctcaccttctcctgtaacttccacattgcaagagcacagtacctcctctcttgtttctgtgacctcagtacccacccctacactggcgaagatcacagacatggacacaaacttagaacctgtgactcgttcacctcaaaatttaaggaacaccttggccacttcagaagccaccacagatacacacacaatgcatccttctataaacacagcagtggccaatgtggggaccaccagttcaccaaatgaattctattttactgtctcacctgactcagacccatataaagccacatccgcagtagttatcacttccacctcgggggactcaatagtttccacatcaatgcctagatcctctgcgatgaaaaagattgagtctgagacaactttctccctgatatttagactgagggagactagcacctcccagaaaattggctcatcctcagacacaagcacggtctttgacaaagcattcactgctgctactactgaggtctccagaacagaactcacctcctctagcagaacatccatccaaggcactgaaaagcccacaatgtcaccggacacctccacaagatctgtcaccatgctttctacttttgctggcctgacaaaatccgaagaaaggaccattgccacccaaacaggtcctcatagggcgacatcacagggtacccttacctgggacacatcaatcacaacctcacaggcagggacccactcagctatgactcatggattttcacaattagatttgtccactcttacgagtagagttcctgagtacatatcagggacaagcccaccctctgtggaaaaaaccagctcttcctcttcccttctgtctttaccagcaataacctcaccgtcccctgtacctactacattaccagaaagtaggccgtcttctcctgttcatctgacttcactccccacctctggcctagtgaagaccacagatatgctggcatctgtggccagtttacctccaaacttgggcagcacctcacataagataccgactacttcagaagacattaaagatacagagaaaatgtatccttccacaaacatagcagtaaccaatgtggggaccaccacttctgaaaaggaatcttattcgtctgtcccagcctactcagaaccacccaaagtcacctctccaatggttacctctttcaacataagggacaccattgtttccacatccatgcctggctcctctgagattacaaggattgagatggagtcaacattctccctggctcatgggctgaagggaaccagcacctcccaggaccccatcgtatccacagagaaaagtgctgtccttcacaagttgaccactggtgctactgagacctctaggacagaagttgcctcttctagaagaacatccattccaggccctgatcattccacagagtcaccagacatctccactgaagtgatccccagcctgcctatctcccttggcattacagaatcttcaaatatgaccatcatcactcgaacaggtcctcctcttggctctacatcacagggcacatttaccttggacacaccaactacatcctccagggcaggaacacactcgatggcgactcaggaatttccacactcagaaatgaccactgtcatgaacaaggaccctgagattctatcatggacaatccctccttctatagagaaaaccagcttctcctcttccctgatgccttcaccagccatgacttcacctcctgtttcctcaacattaccaaagaccattcacaccactccttctcctatgacctcactgctcacccctagcctagtgatgaccacagacacattgggcacaagcccagaacctacaaccagttcacctccaaatttgagcagtacctcacatgagatactgacaacagatgaagacaccacagctatagaagccatgcatccttccacaagcacagcagcgactaatgtggaaaccaccagttctggacatgggtcacaatcctctgtcctagctgactcagaaaaaaccaaggccacagctccaatggataccacctccaccatggggcatacaactgtttccacatcaatgtctgtttcctctgagactacaaaaattaagagagagtcaacatattccttgactcctggactgagagagaccagcatttcccaaaatgccagcttttccactgacacaagtattgttctttcagaagtccccactggtactactgctgaggtctccaggacagaagtcacctcctctggtagaacatccatccctggcccttctcagtccacagttttgccagaaatatccacaagaacaatgacaaggctctttgcctcgcccaccatgacagaatcagcagaaatgaccatccccactcaaacaggtccttctgggtctacctcacaggatacccttaccttggacacatccaccacaaagtcccaggcaaagactcattcaactttgactcagagatttccacactcagagatgaccactctcatgagcagaggtcctggagatatgtcatggcaaagctctccctctctggaaaatcccagctctctcccttccctgctgtctttacctgccacaacctcacctcctcccatttcctccacattaccagtgactatctcctcctctcctcttcctgtgacttcacttctcacctctagcccggtaacgaccacagacatgttacacacaagcccagaacttgtaaccagttcacctccaaagctgagccacacttcagatgagagactgaccactggcaaggacaccacaaatacagaagctgtgcatccttccacaaacacagcagcgtccaatgtggagattcccagctctggacatgaatccccttcctctgccttagctgactcagagacatccaaagccacatcaccaatgtttattacctccacccaggaggatacaactgttgccatatcaacccctcacttcttggagactagcagaattcagaaagagtcaatttcctccctgagccctaaattgagggagacaggcagttctgtggagacaagctcagccatagagacaagtgctgtcctttctgaagtgtccattggtgctactactgagatctccaggacagaagtcacctcctctagcagaacatccatctctggttctgctgagtccacaatgttgccagaaatatccaccacaagaaaaatcattaagttccctacttcccccatcctggcagaatcatcagaaatgaccatcaagacccaaacaagtcctcctgggtctacatcagagagtacctttacattagacacatcaaccactccctccttggtaataacccattcgactatgactcagagattgccacactcagagataaccactcttgtgagtagaggtgctggggatgtgccacggcccagctctctccctgtggaagaaacaagccctccatcttcccagctgtctttatctgccatgatctcaccttctcctgtttcttccacattaccagcaagtagccactcctcttctgcttctgtgacttcacttctcacaccaggccaagtgaagactactgaggtgttggacgcaagtgcagaacctgaaaccagttcacctccaagtttgagcagcacctcagttgaaatactggccacctctgaagtcaccacagatacggagaaaattcatcctttctcaaacacggcagtaaccaaagttggaacttccagttctggacatgaatccccttcctctgtcctacctgactcagagacaaccaaagccacatcggcaatgggtaccatctccattatgggggatacaagtgtttctacattaactcctgccttatctaacactaggaaaattcagtcagagccagcttcctcactgaccaccagattgagggagaccagcacctctgaagagaccagcttagccacagaagcaaacactgttctttctaaagtgtccactggtgctactactgaggtctccaggacagaagccatctcctttagcagaacatccatgtcaggccctgagcagtccacaatgtcacaagacatctccataggaaccatccccaggatttctgcctcctctgtcctgacagaatctgcaaaaatgaccatcacaacccaaacaggtccttcggagtctacactagaaagtacccttaatttgaacacagcaaccacaccctcttgggtggaaacccactctatagtaattcagggatttccacacccagagatgaccacttccatgggcagaggtcctggaggtgtgtcatggcctagccctccctttgtgaaagaaaccagccctccatcctccccgctgtctttacctgccgtgacctcacctcatcctgtttccaccacattcctagcacatatccccccctctccccttcctgtgacttcacttctcacctctggcccggcgacaaccacagatatcttgggtacaagcacagaacctggaaccagttcatcttcaagtttgagcaccacctcccatgagagactgaccacttacaaagacactgcacatacagaagccgtgcatccttccacaaacacaggagggaccaatgtggcaaccaccagctctggatataaatcacagtcctctgtcctagctgactcatctccaatgtgtaccacctccaccatgggggatacaagtgttctcacatcaactcctgccttccttgagactaggaggattcagacagagctagcttcctccctgacccctggattgagggagtccagcggctctgaagggaccagctcaggcaccaagatgagcactgtcctctctaaagtgcccactggtgctactactgagatctccaaggaagacgtcacctccatcccaggtcccgctcaatccacaatatcaccagacatctccacaagaaccgtcagctggttctctacatcccctgtcatgacagaatcagcagaaataaccatgaacacccatacaagtcctttaggggccacaacacaaggcaccagtactttggacacgtcaagcacaacctctttgacaatgacacactcaactatatctcaaggattttcacactcacagatgagcactcttatgaggaggggtcctgaggatgtatcatggatgagccctccccttctggaaaaaactagaccttccttttctctgatgtcttcaccagccacaacttcaccttctcctgtttcctccacattaccagagagcatctcttcctctcctcttcctgtgacttcactcctcacgtctggcttggcaaaaactacagatatgttgcacaaaagctcagaacctgtaaccaactcacctgcaaatttgagcagcacctcagttgaaatactggccacctctgaagtcaccacagatacagagaaaactcatccttcttcaaacagaacagtgaccgatgtggggacctccagttctggacatgaatccacttcctttgtcctagctgactcacagacatccaaagtcacatctccaatggttattacctccaccatggaggatacgagtgtctccacatcaactcctggcttttttgagactagcagaattcagacagaaccaacatcctccctgacccttggactgagaaagaccagcagctctgaggggaccagcttagccacagagatgagcactgtcctttctggagtgcccactggtgccactgctgaagtctccaggacagaagtcacctcctctagcagaacatccatctcaggctttgctcagctcacagtgtcaccagagacttccacagaaaccatcaccagactccctacctccagcataatgacagaatcagcagaaatgatgatcaagacacaaacagatcctcctgggtctacaccagagagtactcatactgtggacatatcaacaacacccaactgggtagaaacccactcgactgtgactcagagattttcacactcagagatgaccactcttgtgagcagaagccctggtgatatgttatggcctagtcaatcctctgtggaagaaaccagctctgcctcttccctgctgtctctgcctgccacgacctcaccttctcctgtttcctctacattagtagaggatttcccttccgcttctcttcctgtgacttctcttctcaaccctggcctggtgataaccacagacaggatgggcataagcagagaacctggaaccagttccacttcaaatttgagcagcacctcccatgagagactgaccactttggaagacactgtagatacagaagacatgcagccttccacacacacagcagtgaccaacgtgaggacctccatttctggacatgaatcacaatcttctgtcctatctgactcagagacacccaaagccacatctccaatgggtaccacctacaccatgggggaaacgagtgtttccatatccacttctgacttctttgagaccagcagaattcagatagaaccaacatcctccctgacttctggattgagggagaccagcagctctgagaggatcagctcagccacagagggaagcactgtcctttctgaagtgcccagtggtgctaccactgaggtctccaggacagaagtgatatcctctaggggaacatccatgtcagggcctgatcagttcaccatatcaccagacatctctactgaagcgatcaccaggctttctacttcccccattatgacagaatcagcagaaagtgccatcactattgagacaggttctcctggggctacatcagagggtaccctcaccttggacacctcaacaacaaccttttggtcagggacccactcaactgcatctccaggattttcacactcagagatgaccactcttatgagtagaactcctggagatgtgccatggccgagccttccctctgtggaagaagccagctctgtctcttcctcactgtcttcacctgccatgacctcaacttcttttttctccacattaccagagagcatctcctcctctcctcatcctgtgactgcacttctcacccttggcccagtgaagaccacagacatgttgcgcacaagctcagaacctgaaaccagttcacctccaaatttgagcagcacctcagctgaaatattagccacgtctgaagtcaccaaagatagagagaaaattcatccctcctcaaacacacctgtagtcaatgtagggactgtgatttataaacatctatccccttcctctgttttggctgacttagtgacaacaaaacccacatctccaatggctaccacctccactctggggaatacaagtgtttccacatcaactcctgccttcccagaaactatgatgacacagccaacttcctccctgacttctggattaagggagatcagtacctctcaagagaccagctcagcaacagagagaagtgcttctctttctggaatgcccactggtgctactactaaggtctccagaacagaagccctctccttaggcagaacatccaccccaggtcctgctcaatccacaatatcaccagaaatctccacggaaaccatcactagaatttctactcccctcaccacgacaggatcagcagaaatgaccatcacccccaaaacaggtcattctggggcatcctcacaaggtacctttaccttggacacatcaagcagagcctcctggccaggaactcactcagctgcaactcacagatctccacactcagggatgaccactcctatgagcagaggtcctgaggatgtgtcatggccaagccgcccatcagtggaaaaaactagccctccatcttccctggtgtctttatctgcagtaacctcaccttcgccactttattccacaccatctgagagtagccactcatctcctctccgggtgacttctcttttcacccctgtcatgatgaagaccacagacatgttggacacaagcttggaacctgtgaccacttcacctcccagtatgaatatcacctcagatgagagtctggccacttctaaagccaccatggagacagaggcaattcagctttcagaaaacacagctgtgactcagatgggcaccatcagcgctagacaagaattctattcctcttatccaggcctcccagagccatccaaagtgacatctccagtggtcacctcttccaccataaaagacattgtttctacaaccatacctgcttcctctgagataacaagaattgagatggagtcaacatccaccctgacccccacaccaagggagaccagcacctcccaggagatccactcagccacaaagccaagcactgttccttacaaggcactcactagtgccacgattgaggactccatgacacaagtcatgtcctctagcagaggacctagccctgatcagtccacaatgtcacaagacatatccactgaagtgatcaccaggctctctacctcccccatcaagacagaatctacagaaatgaccattaccacccaaacaggttctcctggggctacatcaaggggtacccttaccttggacacttcaacaacttttatgtcagggacccactcaactgcatctcaaggattttcacactcacagatgaccgctcttatgagtagaactcctggagatgtgccatggctaagccatccctctgtggaagaagccagctctgcctctttctcactgtcttcacctgtcatgacctcatcttctcccgtttcttccacattaccagacagcatccactcttcttcgcttcctgtgacatcacttctcacctcagggctggtgaagaccacagagctgttgggcacaagctcagaacctgaaaccagttcacccccaaatttgagcagcacctcagctgaaatactggccatcactgaagtcactacagatacagagaaactggagatgaccaatgtggtaacctcaggttatacacatgaatctccttcctctgtcctagctgactcagtgacaacaaaggccacatcttcaatgggtatcacctaccccacaggagatacaaatgttctcacatcaacccctgccttctctgacaccagtaggattcaaacaaagtcaaagctctcactgactcctgggttgatggagaccagcatctctgaagagaccagctctgccacagaaaaaagcactgtcctttctagtgtgcccactggtgctactactgaggtctccaggacagaagccatctcttctagcagaacatccatcccaggccctgctcaatccacaatgtcatcagacacctccatggaaaccatcactagaatttctacccccctcacaaggaaagaatcaacagacatggccatcacccccaaaacaggtccttctggggctacctcgcagggtacctttaccttggactcatcaagcacagcctcctggccaggaactcactcagctacaactcagagatttccacagtcagtggtgacaactcctatgagcagaggtcctgaggatgtgtcatggccaagcccgctgtctgtggaaaaaaacagccctccatcttccctggtatcttcatcttcagtaacctcaccttcgccactttattccacaccatctgggagtagccactcctctcctgtccctgtcacttctcttttcacctctatcatgatgaaggccacagacatgttggatgcaagtttggaacctgagaccacttcagctcccaatatgaatatcacctcagatgagagtctggccgcttctaaagccaccacggagacagaggcaattcacgtttttgaaaatacagcagcgtcccatgtggaaaccaccagtgctacagaggaactctattcctcttccccaggcttctcagagccaacaaaagtgatatctccagtggtcacctcttcctctataagagacaacatggtttccacaacaatgcctggctcctctggcattacaaggattgagatagagtcaatgtcatctctgacccctggactgagggagaccagaacctcccaggacatcacctcatccacagagacaagcactgtcctttacaagatgccctctggtgccactcctgaggtctccaggacagaagttatgccctctagcagaacatccattcctggccctgctcagtccacaatgtcactagacatctccgatgaagttgtcaccaggctgtctacctctcccatcatgacagaatctgcagaaataaccatcaccacccaaacaggttattctctggctacatcccaggttacccttcccttgggcacctcaatgacctttttgtcagggacccactcaactatgtctcaaggactttcacactcagagatgaccaatcttatgagcaggggtcctgaaagtctgtcatggacgagccctcgctttgtggaaacaactagatcttcctcttctctgacatcattacctctcacgacctcactttctcctgtgtcctccacattactagacagtagcccctcctctcctcttcctgtgacttcacttatcctcccaggcctggtgaagactacagaagtgttggatacaagctcagagcctaaaaccagttcatctccaaatttgagcagcacctcagttgaaataccggccacctctgaaatcatgacagatacagagaaaattcatccttcctcaaacacagcggtggccaaagtgaggacctccagttctgttcatgaatctcattcctctgtcctagctgactcagaaacaaccataaccataccttcaatgggtatcacctccgctgtggacgataccactgttttcacatcaaatcctgccttctctgagactaggaggattccgacagagccaacattctcattgactcctggattcagggagactagcacctctgaagagaccacctcaatcacagaaacaagtgcagtcctttatggagtgcccactagtgctactactgaagtctccatgacagaaatcatgtcctctaatagaatacacatccctgactctgatcagtccacgatgtctccagacatcatcactgaagtgatcaccaggctctcttcctcatccatgatgtcagaatcaacacaaatgaccatcaccacccaaaaaagttctcctggggctacagcacagagtactcttaccttggccacaacaacagcccccttggcaaggacccactcaactgttcctcctagatttttacactcagagatgacaactcttatgagtaggagtcctgaaaatccatcatggaagagctctctctttgtggaaaaaactagctcttcatcttctctgttgtccttacctgtcacgacctcaccttctgtttcttccacattaccgcagagtatcccttcctcctctttttctgtgacttcactcctcaccccaggcatggtgaagactacagacacaagcacagaacctggaaccagtttatctccaaatctgagtggcacctcagttgaaatactggctgcctctgaagtcaccacagatacagagaaaattcatccttcttcaagcatggcagtgaccaatgtgggaaccaccagttctggacatgaactatattcctctgtttcaatccactcggagccatccaaggctacatacccagtgggtactccctcttccatggctgaaacctctatttccacatcaatgcctgctaattttgagaccacaggatttgaggctgagccattttctcatttgacttctggatttaggaagacaaacatgtccctggacaccagctcagtcacaccaacaaatacaccttcttctcctgggtccactcaccttttacagagttccaagactgatttcacctcttctgcaaaaacatcatccccagactggcctccagcctcacagtatactgaaattccagtggacataatcaccccctttaatgcttctccatctattacggagtccactgggataacctccttcccagaatccaggtttactatgtctgtaacagaaagtactcatcatctgagtacagatttgctgccttcagctgagactatttccactggcacagtgatgccttctctatcagaggccatgacttcatttgccaccactggagttccacgagccatctcaggttcaggtagtccattctctaggacagagtcaggccctggggatgctactctgtccaccattgcagagagcctgccttcatccactcctgtgccattctcctcttcaaccttcactaccactgattcttcaaccatcccagccctccatgagataacttcctcttcagctaccccatatagagtggacaccagtcttgggacagagagcagcactactgaaggacgcttggttatggtcagtactttggacacttcaagccaaccaggcaggacatcttcatcacccattttggataccagaatgacagagagcgttgagctgggaacagtgacaagtgcttatcaagttccttcactctcaacacggttgacaagaactgatggcattatggaacacatcacaaaaatacccaatgaagcagcacacagaggtaccataagaccagtcaaaggccctcagacatccacttcgcctgccagtcctaaaggactacacacaggagggacaaaaagaatggagaccaccaccacagctctgaagaccaccaccacagctctgaagaccacttccagagccaccttgaccaccagtgtctatactcccactttgggaacactgactcccctcaatgcatcaatgcaaatggccagcacaatccccacagaaatgatgatcacaaccccatatgttttccctgatgttccagaaacgacatcctcattggctaccagcctgggagcagaaaccagcacagctcttcccaggacaaccccatctgttttcaatagagaatcagagaccacagcctcactggtctctcgttctggggcagagagaagtccggttattcaaactctagatgtttcttctagtgagccagatacaacagcttcatgggttatccatcctgcagagaccatcccaactgtttccaagacaacccccaattttttccacagtgaattagacactgtatcttccacagccaccagtcatggggcagacgtcagctcagccattccaacaaatatctcacctagtgaactagatgcactgaccccactggtcactatttcggggacagatactagtacaacattcccaacactgactaagtccccacatgaaacagagacaagaaccacatggctcactcatcctgcagagaccagctcaactattcccagaacaatccccaatttttctcatcatgaatcagatgccacaccttcaatagccaccagtcctggggcagaaaccagttcagctattccaattatgactgtctcacctggtgcagaagatctggtgacctcacaggtcactagttctgggacagacagaaatatgactattccaactttgactctttctcctggtgaaccaaagacgatagcctcattagtcacccatcctgaagcacagacaagttcggccattccaacttcaactatctcgcctgctgtatcacggttggtgacctcaatggtcaccagtttggcggcaaagacaagtacaactaatcgagctctgacaaactcccctggtgaaccagctacaacagtttcattggtcacgcatcctgcacagaccagcccaacagttccctggacaacttccatttttttccatagtaaatcagacaccacaccttcaatgaccaccagtcatggggcagaatccagttcagctgttccaactccaactgtttcaactgaggtaccaggagtagtgacccctttggtcaccagttctagggcagtgatcagtacaactattccaattctgactctttctcctggtgaaccagagaccacaccttcaatggccaccagtcatggggaagaagccagttctgctattccaactccaactgtttcacctggggtaccaggagtggtgacctctctggtcactagttctagggcagtgactagtacaactattccaattctgactttttctcttggtgaaccagagaccacaccttcaatggccaccagtcatgggacagaagctggctcagctgttccaactgttttacctgaggtaccaggaatggtgacctctctggttgctagttctagggcagtaaccagtacaactcttccaactctgactctttctcctggtgaaccagagaccacaccttcaatggccaccagtcatggggcagaagccagctcaactgttccaactgtttcacctgaggtaccaggagtggtgacctctctggtcactagttctagtggagtaaacagtacaagtattccaactctgattctttctcctggtgaactagaaaccacaccttcaatggccaccagtcatggggcagaagccagctcagctgttccaactccaactgtttcacctggggtatcaggagtggtgacccctctggtcactagttccagggcagtgaccagtacaactattccaattctaactctttcttctagtgagccagagaccacaccttcaatggccaccagtcatggggtagaagccagctcagctgttctaactgtttcacctgaggtaccaggaatggtgacctctctggtcactagttctagagcagtaaccagtacaactattccaactctgactatttcttctgatgaaccagagaccacaacttcattggtcacccattctgaggcaaagatgatttcagccattccaactttagctgtctcccctactgtacaagggctggtgacttcactggtcactagttctgggtcagagaccagtgcgttttcaaatctaactgttgcctcaagtcaaccagagaccatagactcatgggtcgctcatcctgggacagaagcaagttctgttgttccaactttgactgtctccactggtgagccgtttacaaatatctcattggtcacccatcctgcagagagtagctcaactcttcccaggacaacctcaaggttttcccacagtgaattagacactatgccttctacagtcaccagtcctgaggcagaatccagctcagccatttcaacaactatttcacctggtataccaggtgtgctgacatcactggtcactagctctgggagagacatcagtgcaacttttccaacagtgcctgagtccccacatgaatcagaggcaacagcctcatgggttactcatcctgcagtcaccagcacaacagttcccaggacaacccctaattattctcatagtgaaccagacaccacaccatcaatagccaccagtcctggggcagaagccacttcagattttccaacaataactgtctcacctgatgtaccagatatggtaacctcacaggtcactagttctgggacagacaccagtataactattccaactctgactctttcttctggtgagccagagaccacaacctcatttatcacctattctgagacacacacaagttcagccattccaactctccctgtctcccctggtgcatcaaagatgctgacctcactggtcatcagttctgggacagacagcactacaactttcccaacactgacggagaccccatatgaaccagagacaacagccatacagctcattcatcctgcagagaccaacacaatggttcccaggacaactcccaagttttcccatagtaagtcagacaccacactcccagtagccatcaccagtcctgggccagaagccagttcagctgtttcaacgacaactatctcacctgatatgtcagatctggtgacctcactggtccctagttctgggacagacaccagtacaaccttcccaacattgagtgagaccccatatgaaccagagactacagccacgtggctcactcatcctgcagaaaccagcacaacggtttctgggacaattcccaacttttcccataggggatcagacactgcaccctcaatggtcaccagtcctggagtagacacgaggtcaggtgttccaactacaaccatcccacccagtataccaggggtagtgacctcacaggtcactagttctgcaacagacactagtacagctattccaactttgactccttctcctggtgaaccagagaccacagcctcatcagctacccatcctgggacacagactggcttcactgttccaattcggactgttccctctagtgagccagatacaatggcttcctgggtcactcatcctccacagaccagcacacctgtttccagaacaacctccagtttttcccatagtagtccagatgccacacctgtaatggccaccagtcctaggacagaagccagttcagctgtactgacaacaatctcacctggtgcaccagagatggtgacttcacagatcactagttctggggcagcaaccagtacaactgttccaactttgactcattctcctggtatgccagagaccacagccttattgagcacccatcccagaacagagacaagtaaaacatttcctgcttcaactgtgtttcctcaagtatcagagaccacagcctcactcaccattagacctggtgcagagactagcacagctctcccaactcagacaacatcctctctcttcaccctacttgtaactggaaccagcagagttgatctaagtccaactgcttcacctggtgtttctgcaaaaacagccccactttccacccatccagggacagaaaccagcacaatgattccaacttcaactctttcccttggtttactagagactacaggcttactggccaccagctcttcagcagagaccagcacgagtactctaactctgactgtttcccctgctgtctctgggctttccagtgcctctataacaactgataagccccaaactgtgacctcctggaacacagaaacctcaccatctgtaacttcagttggacccccagaattttccaggactgtcacaggcaccactatgaccttgataccatcagagatgccaacaccacctaaaaccagtcatggagaaggagtgagtccaaccactatcttgagaactacaatggttgaagccactaatttagctaccacaggttccagtcccactgtggccaagacaacaaccaccttcaatacactggctggaagcctctttactcctctgaccacacctgggatgtccaccttggcctctgagagtgtgacctcaagaacaagttataaccatcggtcctggatctccaccaccagcagttataaccgtcggtactggacccctgccaccagcactccagtgacttctacattctccccagggatttccacatcctccatccccagctccacagcagccacagtcccattcatggtgccattcaccctcaacttcaccatcaccaacctgcagtacgaggaggacatgcggcaccctggttccaggaagttcaacgccacagagagagaactgcagggtctgctcaaacccttgttcaggaatagcagtctggaatacctctattcaggctgcagactagcctcactcaggccagagaaggatagctcagccacggcagtggatgccatctgcacacatcgccctgaccctgaagacctcggactggacagagagcgactgtactgggagctgagcaatctgacaaatggcatccaggagctgggcccctacaccctggaccggaacagtctctatgtcaatggtttcacccatcgaagctctatgcccaccaccagcactcctgggacctccacagtggatgtgggaacctcagggactccatcctccagccccagccccacgactgctggccctctcctgatgccgttcaccctcaacttcaccatcaccaacctgcagtacgaggaggacatgcgtcgcactggctccaggaagttcaacaccatggagagtgtcctgcagggtctgctcaagcccttgttcaagaacaccagtgttggccctctgtactctggctgcagattgaccttgctcaggcccgagaaagatggggcagccactggagtggatgccatctgcacccaccgccttgaccccaaaagccctggactcaacagggagcagctgtactgggagctaagcaaactgaccaatgacattgaagagctgggcccctacaccctggacaggaacagtctctatgtcaatggtttcacccatcagagctctgtgtccaccaccagcactcctgggacctccacagtggatctcagaacctcagggactccatcctccctctccagccccacaattatggctgctggccctctcctggtaccattcaccctcaacttcaccatcaccaacctgcagtatggggaggacatgggtcaccctggctccaggaagttcaacaccacagagagggtcctgcagggtctgcttggtcccatattcaagaacaccagtgttggccctctgtactctggctgcagactgacctctctcaggtctgagaaggatggagcagccactggagtggatgccatctgcatccatcatcttgaccccaaaagccctggactcaacagagagcggctgtactgggagctgagccaactgaccaatggcatcaaagagctgggcccctacaccctggacaggaacagtctctatgtcaatggtttcacccatcggacctctgtgcccaccagcagcactcctgggacctccacagtggaccttggaacctcagggactccattctccctcccaagccccgcaactgctggccctctcctggtgctgttcaccctcaacttcaccatcaccaacctgaagtatgaggaggacatgcatcgccctggctccaggaagttcaacaccactgagagggtcctgcagactctgcttggtcctatgttcaagaacaccagtgttggccttctgtactctggctgcagactgaccttgctcaggtccgagaaggatggagcagccactggagtggatgccatctgcacccaccgtcttgaccccaaaagccctggagtggacagggagcagctatactgggagctgagccagctgaccaatggcatcaaagagctgggcccctacaccctggacaggaacagtctctatgtcaatggtttcacccattggatccctgtgcccaccagcagcactcctgggacctccacagtggaccttgggtcagggactccatcctccctccccagccccacaactgctggccctctcctggtgccgttcaccctcaacttcaccatcaccaacctgaagtacgaggaggacatgcattgccctggctccaggaagttcaacaccacagagagagtcctgcagagtctgcttggtcccatgttcaagaacaccagtgttggccctctgtactctggctgcagactgaccttgctcaggtccgagaaggatggagcagccactggagtggatgccatctgcacccaccgtcttgaccccaaaagccctggagtggacagggagcagctatactgggagctgagccagctgaccaatggcatcaaagagctgggtccctacaccctggacagaaacagtctctatgtcaatggtttcacccatcagacctctgcgcccaacaccagcactcctgggacctccacagtggaccttgggacctcagggactccatcctccctccccagccctacatctgctggccctctcctggtgccattcaccctcaacttcaccatcaccaacctgcagtacgaggaggacatgcatcacccaggctccaggaagttcaacaccacggagcgggtcctgcagggtctgcttggtcccatgttcaagaacaccagtgtcggccttctgtactctggctgcagactgaccttgctcaggcctgagaagaatggggcagccactggaatggatgccatctgcagccaccgtcttgaccccaaaagccctggactcaacagagagcagctgtactgggagctgagccagctgacccatggcatcaaagagctgggcccctacaccctggacaggaacagtctctatgtcaatggtttcacccatcggagctctgtggcccccaccagcactcctgggacctccacagtggaccttgggacctcagggactccatcctccctccccagccccacaacagctgttcctctcctggtgccgttcaccctcaactttaccatcaccaatctgcagtatggggaggacatgcgtcaccctggctccaggaagttcaacaccacagagagggtcctgcagggtctgcttggtcccttgttcaagaactccagtgtcggccctctgtactctggctgcagactgatctctctcaggtctgagaaggatggggcagccactggagtggatgccatctgcacccaccaccttaaccctcaaagccctggactggacagggagcagctgtactggcagctgagccagatgaccaatggcatcaaagagctgggcccctacaccctggaccggaacagtctctacgtcaatggtttcacccatcggagctctgggctcaccaccagcactccttggacttccacagttgaccttggaacctcagggactccatcccccgtccccagccccacaaccaccggccctctcctggtgccattcacactcaacttcaccatcactaacctacagtatgaggagaacatgggtcaccctggctccaggaagttcaacatcacggagagtgttctgcagggtctgctcaagcccttgttcaagagcaccagtgttggccctctgtattctggctgcagactgaccttgctcaggcctgagaaggatggagtagccaccagagtggacgccatctgcacccaccgccctgaccccaaaatccctgggctagacagacagcagctatactgggagctgagccagctgacccacagcatcactgagctgggaccctacaccctggatagggacagtctctatgtcaatggtttcacccagcggagctctgtgcccaccaccagcactcctgggactttcacagtacagccggaaacctctgagactccatcatccctccctggccccacagccactggccctgtcctgctgccattcaccctcaattttaccatcactaacctgcagtatgaggaggacatgcgtcgccctggctccaggaagttcaacaccacggagagggtccttcagggtctgcttatgcccttgttcaagaacaccagtgtcagctctctgtactctggttgcagactgaccttgctcaggcctgagaaggatggggcagccaccagagtggatgctgtctgcacccatcgtcctgaccccaaaagccctggactggacagagagcggctgtactggaagctgagccagctgacccacggcatcactgagctgggcccctacaccctggacaggcacagtctctatgtcaatggtttcacccatcagagctctatgacgaccaccagaactcctgatacctccacaatgcacctggcaacctcgagaactccagcctccctgtctggacccatgaccgccagccctctcctggtgctattcacaattaacttcaccatcactaacctgcggtatgaggagaacatgcatcaccctggctctagaaagtttaacaccacggagagagtccttcagggtctgctcaggcctgtgttcaagaacaccagtgttggccctctgtactctggctgcagactgaccttgctcaggcccaagaaggatggggcagccaccaaagtggatgccatctgcacctaccgccctgatcccaaaagccctggactggacagagagcagctatactgggagctgagccagctgacccacagcatcactgagctgggcccctacaccctggacagggacagtctctatgtcaatggtttcacacagcggagctctgtgcccaccactagcattcctgggacccccacagtggacctgggaacatctgggactccagtttctaaacctggtccctcggctgccagccctctcctggtgctattcactctcaacttcaccatcaccaacctgcggtatgaggagaacatgcagcaccctggctccaggaagttcaacaccacggagagggtccttcagggcctgctcaggtccctgttcaagagcaccagtgttggccctctgtactctggctgcagactgactttgctcaggcctgaaaaggatgggacagccactggagtggatgccatctgcacccaccaccctgaccccaaaagccctaggctggacagagagcagctgtattgggagctgagccagctgacccacaatatcactgagctgggcccctatgccctggacaacgacagcctctttgtcaatggtttcactcatcggagctctgtgtccaccaccagcactcctgggacccccacagtgtatctgggagcatctaagactccagcctcgatatttggcccttcagctgccagccatctcctgatactattcaccctcaacttcaccatcactaacctgcggtatgaggagaacatgtggcctggctccaggaagttcaacactacagagagggtccttcagggcctgctaaggcccttgttcaagaacaccagtgttggccctctgtactctggctgcaggctgaccttgctcaggccagagaaagatggggaagccaccggagtggatgccatctgcacccaccgccctgaccccacaggccctgggctggacagagagcagctgtatttggagctgagccagctgacccacagcatcactgagctgggcccctacacactggacagggacagtctctatgtcaatggtttcacccatcggagctctgtacccaccaccagcaccggggtggtcagcgaggagccattcacactgaacttcaccatcaacaacctgcgctacatggcggacatgggccaacccggctccctcaagttcaacatcacagacaacgtcatgcagcacctgctcagtcctttgttccagaggagcagcctgggtgcacggtacacaggctgcagggtcatcgcactaaggtctgtgaagaacggtgctgagacacgggtggacctcctctgcacctacctgcagcccctcagcggcccaggtctgcctatcaagcaggtgttccatgagctgagccagcagacccatggcatcacccggctgggcccctactctctggacaaagacagcctctaccttaacggttacaatgaacctggtccagatgagcctcctacaactcccaagccagccaccacattcctgcctcctctgtcagaagccacaacagccatggggtaccacctgaagaccctcacactcaacttcaccatctccaatctccagtattcaccagatatgggcaagggctcagctacattcaactccaccgagggggtccttcagcacctgctcagacccttgttccagaagagcagcatgggccccttctacttgggttgccaactgatctccctcaggcctgagaaggatggggcagccactggtgtggacaccacctgcacctaccaccctgaccctgtgggccccgggctggacatacagcagctttactgggagctgagtcagctgacccatggtgtcacccaactgggcttctatgtcctggacagggatagcctcttcatcaatggctatgcaccccagaatttatcaatccggggcgagtaccagataaatttccacattgtcaactggaacctcagtaatccagaccccacatcctcagagtacatcaccctgctgagggacatccaggacaaggtcaccacactctacaaaggcagtcaactacatgacacattccgcttctgcctggtcaccaacttgacgatggactccgtgttggtcactgtcaaggcattgttctcctccaatttggaccccagcctggtggagcaagtctttctagataagaccctgaatgcctcattccattggctgggctccacctaccagttggtggacatccatgtgacagaaatggagtcatcagtttatcaaccaacaagcagctccagcacccagcacttctacctgaatttcaccatcaccaacctaccatattcccaggacaaagcccagccaggcaccaccaattaccagaggaacaaaaggaatattgaggatgcgctcaaccaactcttccgaaacagcagcatcaagagttatttttctgactgtcaagtttcaacattcaggtctgtccccaacaggcaccacaccggggtggactccctgtgtaacttctcgccactggctcggagagtagacagagttgccatctatgaggaatttctgcggatgacccggaatggtacccagctgcagaacttcaccctggacaggagcagtgtccttgtggatgggtattctcccaacagaaatgagcccttaactgggaattctgaccttcccttctgggctgtcatcctcatcggcttggcaggactcctgggagtcatcacatgcctgatctgcggtgtcctggtgaccacccgccggcggaagaaggaaggagaatacaacgtccagcaacagtgcccaggctactaccagtcacacctagacctggaggatctgcaatgactggaacttgccggtgcctggggtgcctttcccccagccagggtccaaagaagcttggctggggcagaaataaaccatattggtcggacac

SEQ ID NO: 9099 - protein, 13511 aa, Homo sapiens
MVSKFTSPATSSMEATSIREPSTTILTTETTNGPGSMAVASTNIPIGKGYITEGRLDTSHLPIGTTASSETSMDFTMAKESVSMSVSPSQSMDAAGSSTPGRTSQFVDTFSDDVYHLTSREITIPRDGTSSALTPQMTATHPPSPDPGSARSTWLGILSSSPSSPTPKVTMSSTFSTQRVTTSMIMDTVETSRWNMPNLPSTTSLTPSNIPTSGAIGKSTLVPLDTPSPATSLEASEGGLPTLSTYPESTNTPSIHLGAHASSESPSTIKLTMASVVKPGSYTPLTFPSIETHIHVSTARMAYSSGSSPEMTAPGETNTGSTWDPTTYITTTDPKDTSSAQVSTPHSVRTLRTTENHPKTESATPAAYSGSPKISSSPNLTSPATKAWTITDTTEHSTQLHYTKLAEKSSGFETQSAPGPVSVVIPTSPTIGSSTLELTSDVPGEPLVLAPSEQTTITLPMATWLSTSLTEEMASTDLDISSPSSPMSTFAIFPPMSTPSHELSKSEADTSAIRNTDSTTLDQHLGIRSLGRTGDLTTVPITPLTTTWTSVIEHSTQAQDTLSATMSPTHVTQSLKDQTSIPASASPSHLTEVYPELGTQGRSSSEATTFWKPSTDTLSREIETGPTNIQSTPPMDNTTTGSSSSGVTLGIAHLPIGTSSPAETSTNMALERRSSTATVSMAGTMGLLVTSAPGRSISQSLGRVSSVLSESTTEGVTDSSKGSSPRLNTQGNTALSSSLEPSYAEGSQMSTSIPLTSSPTTPDVEFIGGSTFWTKEVTTVMTSDISKSSARTESSSATLMSTALGSTENTGKEKLRTASMDLPSPTPSMEVTPWISLTLSNAPNTTDSLDLSHGVHTSSAGTLATDRSLNTGVTRASRLENGSDTSSKSLSMGNSTHTSMTYTEKSEVSSSIHPRPETSAPGAETTLTSTPGNRAISLTLPFSSIPVEEVISTGITSGPDINSAPMTHSPITPPTIVWTSTGTIEQSTQPLHAVSSEKVSVQTQSTPYVNSVAVSASPTHENSVSSGSSTSSPYSSASLESLDSTISRRNAITSWLWDLTTSLPTTTWPSTSLSEALSSGHSGVSNPSSTTTEFPLFSAASTSAAKQRNPETETHGPQNTAASTLNTDASSVTGLSETPVGASISSEVPLPMAITSRSDVSGLTSESTANPSLGTASSAGTKLTRTISLPTSESLVSFRMNKDPWTVSIPLGSHPTTNTETSIPVNSAGPPGLSTVASDVIDTPSDGAESIPTVSFSPSPDTEVTTISHFPEKTTHSFRTISSLTHELTSRVTPIPGDWMSSAMSTKPTGASPSITLGERRTITSAAPTTSPIVLTASFTETSTVSLDNETTVKTSDILDARKTNELPSDSSSSSDLINTSIASSTMDVTKTASISPTSISGMTASSSPSLFSSDRPQVPTSTTETNTATSPSVSSNTYSLDGGSNVGGTPSTLPPFTITHPVETSSALLAWSRPVRTFSTMVSTDTASGENPTSSNSVVTSVPAPGTWTSVGSTTDLPAMGFLKTSPAGEAHSLLASTIEPATAFTPHLSAAVVTGSSATSEASLLTTSESKAIHSSPQTPTTPTSGANWETSATPESLLVVTETSDTTLTSKILVTDTILFSTVSTPPSKFPSTGTLSGASFPTLLPDTPAIPLTATEPTSSLATSFDSTPLVTIASDSLGTVPETTLTMSETSNGDALVLKTVSNPDRSIPGITIQGVTESPLHPSSTSPSKIVAPRNTTYEGSITVALSTLPAGTTGSLVFSQSSENSETTALVDSSAGLERASVMPLTTGSQGMASSGGIRSGSTHSTGTKTFSSLPLTMNPGEVTAMSEITTNRLTATQSTAPKGIPVKPTSAESGLLTPVSASSSPSKAFASLTTAPPTWGIPQSTLTFEFSEVPSLDTKSASLPTPGQSLNTIPDSDASTASSSLSKSPEKNPRARMMTSTKAISASSFQSTGFTETPEGSASPSMAGHEPRVPTSGTGDPRYASESMSYPDPSKASSAMTSTSLASKLTTLFSTGQAARSGSSSSPISLSTEKETSFLSPTASTSRKTSLFLGPSMARQPNILVHLQTSALTLSPTSTLNMSQEEPPELTSSQTIAEEEGTTAETQTLTFTPSETPTSLLPVSSPTEPTARRKSSPETWASSISVPAKTSLVETTDGTLVTTIKMSSQAAQGNSTWPAPAEETGSSPAGTSPGSPEMSTTLKIMSSKEPSISPEIRSTVRNSPWKTPETTVPMETTVEPVTLQSTALGSGSTSISHLPTGTTSPTKSPTENMLATERVSLSPSPPEAWTNLYSGTPGGTRQSLATMSSVSLESPTARSITGTGQQSSPELVSKTTGMEFSMWHGSTGGTTGDTHVSLSTSSNILEDPVTSPNSVSSLTDKSKHKTETWVSTTAIPSTVLNNKIMAAEQQTSRSVDEAYSSTSSWSDQTSGSDITLGASPDVTNTLYITSTAQTTSLVSLPSGDQGITSLTNPSGGKTSSASSVTSPSIGLETLRANVSAVKSDIAPTAGHLSQTSSPAEVSILDVTTAPTPGISTTITTMGTNSISTTTPNPEVGMSTMDSTPATERRTTSTEHPSTWSSTAASDSWTVTDMTSNLKVARSPGTISTMHTTSFLASSTELDSMSTPHGRITVIGTSLVTPSSDASAVKTETSTSERTLSPSDTTASTPISTFSRVQRMSISVPDILSTSWTPSSTEAEDVPVSMVSTDHASTKTDPNTPLSTFLFDSLSTLDWDTGRSLSSATATTSAPQGATTPQELTLETMISPATSQLPFSIGHITSAVTPAAMARSSGVTFSRPDPTSKKAEQTSTQLPTTTSAHPGQVPRSAATTLDVIPHTAKTPDATFQRQGQTALTTEARATSDSWNEKEKSTPSAPWITEMMNSVSEDTIKEVTSSSSVLRTLNTLDINLESGTTSSPSWKSSPYERIAPSESTTDKEAIHPSTNTVETTGWVTSSEHASHSTIPAHSASSKLTSPVVTTSTREQAIVSMSTTTWPESTRARTEPNSFLTIELRDVSPYMDTSSTTQTSIISSPGSTAITKGPRTEITSSKRISSSFLAQSMRSSDSPSEAITRLSNFPAMTESGGMILAMQTSPPGATSLSAPTLDTSATASWTGTPLATTQRFTYSEKTTLFSKGPEDTSQPSPPSVEETSSSSSLVPIHATTSPSNILLTSQGHSPSSTPPVTSVFLSETSGLGKTTDMSRISLEPGTSLPPNLSSTAGEALSTYEASRDTKAIHHSADTAVTNMEATSSEYSPIPGHTKPSKATSPLVTSHIMGDITSSTSVFGSSETTEIETVSSVNQGLQERSTSQVASSATETSTVITHVSSGDATTHVTKTQATFSSGTSISSPHQFITSTNTFTDVSTNPSTSLIMTESSGVTITTQTGPTGAATQGPYLLDTSTMPYLTETPLAVTPDFMQSEKTTLISKGPKDVSWTSPPSVAETSYPSSLTPFLVTTIPPATSTLQGQHTSSPVSATSVLTSGLVKTTDMLNTSMEPVTNSPQNLNNPSNEILATLAATTDIETIHPSINKAVTNMGTASSAHVLHSTLPVSSEPSTATSPMVPASSMGDALASISIPGSETTDIEGEPTSSLTAGRKENSTLQEMNSTTESNIILSNVSVGAITEATKMEVPSFDATFIPTPAQSTKFPDIFSVASSRLSNSPPMTISTHMTTTQTGSSGATSKIPLALDTSTLETSAGTPSVVTEGFAHSKITTAMNNDVKDVSQTNPPFQDEASSPSSQAPVLVTTLPSSVAFTPQWHSTSSPVSMSSVLTSSLVKTAGKVDTSLETVTSSPQSMSNTLDDISVTSAATTDIETTHPSINTVVTNVGTTGSAFESHSTVSAYPEPSKVTSPNVTTSTMEDTTISRSIPKSSKTTRTETETTSSLTPKLRETSISQEITSSTETSTVPYKELTGATTEVSRTDVTSSSSTSFPGPDQSTVSLDISTETNTRLSTSPIMTESAEITITTQTGPHGATSQDTFTMDPSNTTPQAGIHSAMTHGFSQLDVTTLMSRIPQDVSWTSPPSVDKTSSPSSFLSSPAMTTPSLISSTLPEDKLSSPMTSLLTSGLVKITDILRTRLEPVTSSLPNFSSTSDKILATSKDSKDTKEIFPSINTEETNVKANNSGHESHSPALADSETPKATTQMVITTTVGDPAPSTSMPVHGSSETTNIKREPTYFLTPRLRETSTSQESSFPTDTSFLLSKVPTGTITEVSSTGVNSSSKISTPDHDKSTVPPDTFTGEIPRVFTSSIKTKSAEMTITTQASPPESASHSTLPLDTSTTLSQGGTHSTVTQGFPYSEVTTLMGMGPGNVSWMTTPPVEETSSVSSLMSSPAMTSPSPVSSTSPQSIPSSPLPVTALPTSVLVTTTDVLGTTSPESVTSSPPNLSSITHERPATYKDTAHTEAAMHHSTNTAVTNVGTSGSGHKSQSSVLADSETSKATPLMSTTSTLGDTSVSTSTPNISQTNQIQTEPTASLSPRLRESSTSEKTSSTTETNTAFSYVPTGAITQASRTEISSSRTSISDLDRPTIAPDISTGMITRLFTSPIMTKSAEMTVTTQTTTPGATSQGILPWDTSTTLFQGGTHSTVSQGFPHSEITTLRSRTPGDVSWMTTPPVEETSSGFSLMSPSMTSPSPVSSTSPESIPSSPLPVTALLTSVLVTTTNVLGTTSPEPVTSSPPNLSSPTQERLTTYKDTAHTEAMHASMHTNTAVANVGTSISGHESQSSVPADSHTSKATSPMGITFAMGDTSVSTSTPAFFETRIQTESTSSLIPGLRDTRTSEEINTVTETSTVLSEVPTTTTTEVSRTEVITSSRTTISGPDHSKMSPYISTETITRLSTFPFVTGSTEMAITNQTGPIGTISQATLTLDTSSTASWEGTHSPVTQRFPHSEETTTMSRSTKGVSWQSPPSVEETSSPSSPVPLPAITSHSSLYSAVSGSSPTSALPVTSLLTSGRRKTIDMLDTHSELVTSSLPSASSFSGEILTSEASTNTETIHFSENTAETNMGTTNSMHKLHSSVSIHSQPSGHTPPKVTGSMMEDAIVSTSTPGSPETKNVDRDSTSPLTPELKEDSTALVMNSTTESNTVFSSVSLDAATEVSRAEVTYYDPTFMPASAQSTKSPDISPEASSSHSNSPPLTISTHKTIATQTGPSGVTSLGQLTLDTSTIATSAGTPSARTQDFVDSETTSVMNNDLNDVLKTSPFSAEEANSLSSQAPLLVTTSPSPVTSTLQEHSTSSLVSVTSVPTPTLAKITDMDTNLEPVTRSPQNLRNTLATSEATTDTHTMHPSINTAVANVGTTSSPNEFYFTVSPDSDPYKATSAVVITSTSGDSIVSTSMPRSSAMKKIESETTFSLIFRLRETSTSQKIGSSSDTSTVFDKAFTAATTEVSRTELTSSSRTSIQGTEKPTMSPDTSTRSVTMLSTFAGLTKSEERTIATQTGPHRATSQGTLTWDTSITTSQAGTHSAMTHGFSQLDLSTLTSRVPEYISGTSPPSVEKTSSSSSLLSLPAITSPSPVPTTLPESRPSSPVHLTSLPTSGLVKTTDMLASVASLPPNLGSTSHKIPTTSEDIKDTEKMYPSTNIAVTNVGTTTSEKESYSSVPAYSEPPKVTSPMVTSFNIRDTIVSTSMPGSSEITRIEMESTFSLAHGLKGTSTSQDPIVSTEKSAVLHKLTTGATETSRTEVASSRRTSIPGPDHSTESPDISTEVIPSLPISLGITESSNMTIITRTGPPLGSTSQGTFTLDTPTTSSRAGTHSMATQEFPHSEMTTVMNKDPEILSWTIPPSIEKTSFSSSLMPSPAMTSPPVSSTLPKTIHTTPSPMTSLLTPSLVMTTDTLGTSPEPTTSSPPNLSSTSHEILTTDEDTTAIEAMHPSTSTAATNVETTSSGHGSQSSVLADSEKTKATAPMDTTSTMGHTTVSTSMSVSSETTKIKRESTYSLTPGLRETSISQNASFSTDTSIVLSEVPTGTTAEVSRTEVTSSGRTSIPGPSQSTVLPEISTRTMTRLFASPTMTESAEMTIPTQTGPSGSTSQDTLTLDTSTTKSQAKTHSTLTQRFPHSEMTTLMSRGPGDMSWQSSPSLENPSSLPSLLSLPATTSPPPISSTLPVTISSSPLPVTSLLTSSPVTTTDMLHTSPELVTSSPPKLSHTSDERLTTGKDTTNTEAVHPSTNTAASNVEIPSSGHESPSSALADSETSKATSPMFITSTQEDTTVAISTPHFLETSRIQKESISSLSPKLRETGSSVETSSAIETSAVLSEVSIGATTEISRTEVTSSSRTSISGSAESTMLPEISTTRKIIKFPTSPILAESSEMTIKTQTSPPGSTSESTFTLDTSTTPSLVITHSTMTQRLPHSEITTLVSRGAGDVPRPSSLPVEETSPPSSQLSLSAMISPSPVSSTLPASSHSSSASVTSLLTPGQVKTTEVLDASAEPETSSPPSLSSTSVEILATSEVTTDTEKIHPFSNTAVTKVGTSSSGHESPSSVLPDSETTKATSAMGTISIMGDTSVSTLTPALSNTRKIQSEPASSLTTRLRETSTSEETSLATEANTVLSKVSTGATTEVSRTEAISFSRTSMSGPEQSTMSQDISIGTIPRISASSVLTESAKMTITTQTGPSESTLESTLNLNTATTPSWVETHSIVIQGFPHPEMTTSMGRGPGGVSWPSPPFVKETSPPSSPLSLPAVTSPHPVSTTFLAHIPPSPLPVTSLLTSGPATTTDILGTSTEPGTSSSSSLSTTSHERLTTYKDTAHTEAVHPSTNTGGTNVATTSSGYKSQSSVLADSSPMCTTSTMGDTSVLTSTPAFLETRRIQTELASSLTPGLRESSGSEGTSSGTKMSTVLSKVPTGATTEISKEDVTSIPGPAQSTISPDISTRTVSWFSTSPVMTESAEITMNTHTSPLGATTQGTSTLDTSSTTSLTMTHSTISQGFSHSQMSTLMRRGPEDVSWMSPPLLEKTRPSFSLMSSPATTSPSPVSSTLPESISSSPLPVTSLLTSGLAKTTDMLHKSSEPVTNSPANLSSTSVEILATSEVTTDTEKTHPSSNRTVTDVGTSSSGHESTSFVLADSQTSKVTSPMVITSTMEDTSVSTSTPGFFETSRIQTEPTSSLTLGLRKTSSSEGTSLATEMSTVLSGVPTGATAEVSRTEVTSSSRTSISGFAQLTVSPETSTETITRLPTSSIMTESAEMMIKTQTDPPGSTPESTHTVDISTTPNWVETHSTVTQRFSHSEMTTLVSRSPGDMLWPSQSSVEETSSASSLLSLPATTSPSPVSSTLVEDFPSASLPVTSLLNPGLVITTDRMGISREPGTSSTSNLSSTSHERLTTLEDTVDTEDMQPSTHTAVTNVRTSISGHESQSSVLSDSETPKATSPMGTTYTMGETSVSISTSDFFETSRIQIEPTSSLTSGLRETSSSERISSATEGSTVLSEVPSGATTEVSRTEVISSRGTSMSGPDQFTISPDISTEAITRLSTSPIMTESAESAITIETGSPGATSEGTLTLDTSTTTFWSGTHSTASPGFSHSEMTTLMSRTPGDVPWPSLPSVEEASSVSSSLSSPAMTSTSFFSTLPESISSSPHPVTALLTLGPVKTTDMLRTSSEPETSSPPNLSSTSAEILATSEVTKDREKIHPSSNTPVVNVGTVIYKHLSPSSVLADLVTTKPTSPMATTSTLGNTSVSTSTPAFPETMMTQPTSSLTSGLREISTSQETSSATERSASLSGMPTGATTKVSRTEALSLGRTSTPGPAQSTISPEISTETITRISTPLTTTGSAEMTITPKTGHSGASSQGTFTLDTSSRASWPGTHSAATHRSPHSGMTTPMSRGPEDVSWPSRPSVEKTSPPSSLVSLSAVTSPSPLYSTPSESSHSSPLRVTSLFTPVMMKTTDMLDTSLEPVTTSPPSMNITSDESLATSKATMETEAIQLSENTAVTQMGTISARQEFYSSYPGLPEPSKVTSPVVTSSTIKDIVSTTIPASSEITRIEMESTSTLTPTPRETSTSQEIHSATKPSTVPYKALTSATIEDSMTQVMSSSRGPSPDQSTMSQDISTEVITRLSTSPIKTESTEMTITTQTGSPGATSRGTLTLDTSTTFMSGTHSTASQGFSHSQMTALMSRTPGDVPWLSHPSVEEASSASFSLSSPVMTSSSPVSSTLPDSIHSSSLPVTSLLTSGLVKTTELLGTSSEPETSSPPNLSSTSAEILAITEVTTDTEKLEMTNVVTSGYTHESPSSVLADSVTTKATSSMGITYPTGDTNVLTSTPAFSDTSRIQTKSKLSLTPGLMETSISEETSSATEKSTVLSSVPTGATTEVSRTEAISSSRTSIPGPAQSTMSSDTSMETITRISTPLTRKESTDMAITPKTGPSGATSQGTFTLDSSSTASWPGTHSATTQRFPQSVVTTPMSRGPEDVSWPSPLSVEKNSPPSSLVSSSSVTSPSPLYSTPSGSSHSSPVPVTSLFTSIMMKATDMLDASLEPETTSAPNMNITSDESLAASKATTETEAIHVFENTAASHVETTSATEELYSSSPGFSEPTKVISPVVTSSSIRDNMVSTTMPGSSGITRIEIESMSSLTPGLRETRTSQDITSSTETSTVLYKMPSGATPEVSRTEVMPSSRTSIPGPAQSTMSLDISDEVVTRLSTSPIMTESAEITITTQTGYSLATSQVTLPLGTSMTFLSGTHSTMSQGLSHSEMTNLMSRGPESLSWTSPRFVETTRSSSSLTSLPLTTSLSPVSSTLLDSSPSSPLPVTSLILPGLVKTTEVLDTSSEPKTSSSPNLSSTSVEIPATSEIMTDTEKIHPSSNTAVAKVRTSSSVHESHSSVLADSETTITIPSMGITSAVDDTTVFTSNPAFSETRRIPTEPTFSLTPGFRETSTSEETTSITETSAVLYGVPTSATTEVSMTEIMSSNRIHIPDSDQSTMSPDIITEVITRLSSSSMMSESTQMTITTQKSSPGATAQSTLTLATTTAPLARTHSTVPPRFLHSEMTTLMSRSPENPSWKSSLFVEKTSSSSSLLSLPVTTSPSVSSTLPQSIPSSSFSVTSLLTPGMVKTTDTSTEPGTSLSPNLSGTSVEILAASEVTTDTEKIHPSSSMAVTNVGTTSSGHELYSSVSIHSEPSKATYPVGTPSSMAETSISTSMPANFETTGFEAEPFSHLTSGFRKTNMSLDTSSVTPTNTPSSPGSTHLLQSSKTDFTSSAKTSSPDWPPASQYTEIPVDIITPFNASPSITESTGITSFPESRFTMSVTESTHHLSTDLLPSAETISTGTVMPSLSEAMTSFATTGVPRAISGSGSPFSRTESGPGDATLSTIAESLPSSTPVPFSSSTFTTTDSSTIPALHEITSSSATPYRVDTSLGTESSTTEGRLVMVSTLDTSSQPGRTSSSPILDTRMTESVELGTVTSAYQVPSLSTRLTRTDGIMEHITKIPNEAAHRGTIRPVKGPQTSTSPASPKGLHTGGTKRMETTTTALKTTTTALKTTSRATLTTSVYTPTLGTLTPLNASMQMASTIPTEMMITTPYVFPDVPETTSSLATSLGAETSTALPRTTPSVFNRESETTASLVSRSGAERSPVIQTLDVSSSEPDTTASWVIHPAETIPTVSKTTPNFFHSELDTVSSTATSHGADVSSAIPTNISPSELDALTPLVTISGTDTSTTFPTLTKSPHETETRTTWLTHPAETSSTIPRTIPNFSHHESDATPSIATSPGAETSSAIPIMTVSPGAEDLVTSQVTSSGTDRNMTIPTLTLSPGEPKTIASLVTHPEAQTSSAIPTSTISPAVSRLVTSMVTSLAAKTSTTNRALTNSPGEPATTVSLVTHPAQTSPTVPWTTSIFFHSKSDTTPSMTTSHGAESSSAVPTPTVSTEVPGVVTPLVTSSRAVISTTIPILTLSPGEPETTPSMATSHGEEASSAIPTPTVSPGVPGVVTSLVTSSRAVTSTTIPILTFSLGEPETTPSMATSHGTEAGSAVPTVLPEVPGMVTSLVASSRAVTSTTLPTLTLSPGEPETTPSMATSHGAEASSTVPTVSPEVPGVVTSLVTSSSGVNSTSIPTLILSPGELETTPSMATSHGAEASSAVPTPTVSPGVSGVVTPLVTSSRAVTSTTIPILTLSSSEPETTPSMATSHGVEASSAVLTVSPEVPGMVTSLVTSSRAVTSTTIPTLTISSDEPETTTSLVTHSEAKMISAIPTLAVSPTVQGLVTSLVTSSGSETSAFSNLTVASSQPETIDSWVAHPGTEASSVVPTLTVSTGEPFTNISLVTHPAESSSTLPRTTSRFSHSELDTMPSTVTSPEAESSSAISTTISPGIPGVLTSLVTSSGRDISATFPTVPESPHESEATASWVTHPAVTSTTVPRTTPNYSHSEPDTTPSIATSPGAEATSDFPTITVSPDVPDMVTSQVTSSGTDTSITIPTLTLSSGEPETTTSFITYSETHTSSAIPTLPVSPGASKMLTSLVISSGTDSTTTFPTLTETPYEPETTAIQLIHPAETNTMVPRTTPKFSHSKSDTTLPVAITSPGPEASSAVSTTTISPDMSDLVTSLVPSSGTDTSTTFPTLSETPYEPETTATWLTHPAETSTTVSGTIPNFSHRGSDTAPSMVTSPGVDTRSGVPTTTIPPSIPGVVTSQVTSSATDTSTAIPTLTPSPGEPETTASSATHPGTQTGFTVPIRTVPSSEPDTMASWVTHPPQTSTPVSRTTSSFSHSSPDATPVMATSPRTEASSAVLTTISPGAPEMVTSQITSSGAATSTTVPTLTHSPGMPETTALLSTHPRTETSKTFPASTVFPQVSETTASLTIRPGAETSTALPTQTTSSLFTLLVTGTSRVDLSPTASPGVSAKTAPLSTHPGTETSTMIPTSTLSLGLLETTGLLATSSSAETSTSTLTLTVSPAVSGLSSASITTDKPQTVTSWNTETSPSVTSVGPPEFSRTVTGTTMTLIPSEMPTPPKTSHGEGVSPTTILRTTMVEATNLATTGSSPTVAKTTTTFNTLAGSLFTPLTTPGMSTLASESVTSRTSYNHRSWISTTSSYNRRYWTPATSTPVTSTFSPGISTSSIPSSTAATVPFMVPFTLNFTITNLQYEEDMRHPGSRKFNATERELQGLLKPLFRNSSLEYLYSGCRLASLRPEKDSSATAVDAICTHRPDPEDLGLDRERLYWELSNLTNGIQELGPYTLDRNSLYVNGFTHRSSMPTTSTPGTSTVDVGTSGTPSSSPSPTTAGPLLMPFTLNFTITNLQYEEDMRRTGSRKFNTMESVLQGLLKPLFKNTSVGPLYSGCRLTLLRPEKDGAATGVDAICTHRLDPKSPGLNREQLYWELSKLTNDIEELGPYTLDRNSLYVNGFTHQSSVSTTSTPGTSTVDLRTSGTPSSLSSPTIMAAGPLLVPFTLNFTITNLQYGEDMGHPGSRKFNTTERVLQGLLGPIFKNTSVGPLYSGCRLTSLRSEKDGAATGVDAICIHHLDPKSPGLNRERLYWELSQLTNGIKELGPYTLDRNSLYVNGFTHRTSVPTSSTPGTSTVDLGTSGTPFSLPSPATAGPLLVLFTLNFTITNLKYEEDMHRPGSRKFNTTERVLQTLLGPMFKNTSVGLLYSGCRLTLLRSEKDGAATGVDAICTHRLDPKSPGVDREQLYWELSQLTNGIKELGPYTLDRNSLYVNGFTHWIPVPTSSTPGTSTVDLGSGTPSSLPSPTTAGPLLVPFTLNFTITNLKYEEDMHCPGSRKFNTTERVLQSLLGPMFKNTSVGPLYSGCRLTLLRSEKDGAATGVDAICTHRLDPKSPGVDREQLYWELSQLTNGIKELGPYTLDRNSLYVNGFTHQTSAPNTSTPGTSTVDLGTSGTPSSLPSPTSAGPLLVPFTLNFTITNLQYEEDMHHPGSRKFNTTERVLQGLLGPMFKNTSVGLLYSGCRLTLLRPEKNGAATGMDAICSHRLDPKSPGLNREQLYWELSQLTHGIKELGPYTLDRNSLYVNGFTHRSSVAPTSTPGTSTVDLGTSGTPSSLPSPTTAVPLLVPFTLNFTITNLQYGEDMRHPGSRKFNTTERVLQGLLGPLFKNSSVGPLYSGCRLISLRSEKDGAATGVDAICTHHLNPQSPGLDREQLYWQLSQMTNGIKELGPYTLDRNSLYVNGFTHRSSGLTTSTPWTSTVDLGTSGTPSPVPSPTTTGPLLVPFTLNFTITNLQYEENMGHPGSRKFNITESVLQGLLKPLFKSTSVGPLYSGCRLTLLRPEKDGVATRVDAICTHRPDPKIPGLDRQQLYWELSQLTHSITELGPYTLDRDSLYVNGFTQRSSVPTTSTPGTFTVQPETSETPSSLPGPTATGPVLLPFTLNFTITNLQYEEDMRRPGSRKFNTTERVLQGLLMPLFKNTSVSSLYSGCRLTLLRPEKDGAATRVDAVCTHRPDPKSPGLDRERLYWKLSQLTHGITELGPYTLDRHSLYVNGFTHQSSMTTTRTPDTSTMHLATSRTPASLSGPMTASPLLVLFTINFTITNLRYEENMHHPGSRKFNTTERVLQGLLRPVFKNTSVGPLYSGCRLTLLRPKKDGAATKVDAICTYRPDPKSPGLDREQLYWELSQLTHSITELGPYTLDRDSLYVNGFTQRSSVPTTSIPGTPTVDLGTSGTPVSKPGPSAASPLLVLFTLNFTITNLRYEENMQHPGSRKFNTTERVLQGLLRSLFKSTSVGPLYSGCRLTLLRPEKDGTATGVDAICTHHPDPKSPRLDREQLYWELSQLTHNITELGPYALDNDSLFVNGFTHRSSVSTTSTPGTPTVYLGASKTPASIFGPSAASHLLILFTLNFTITNLRYEENMWPGSRKFNTTERVLQGLLRPLFKNTSVGPLYSGCRLTLLRPEKDGEATGVDAICTHRPDPTGPGLDREQLYLELSQLTHSITELGPYTLDRDSLYVNGFTHRSSVPTTSTGVVSEEPFTLNFTINNLRYMADMGQPGSLKFNITDNVMQHLLSPLFQRSSLGARYTGCRVIALRSVKNGAETRVDLLCTYLQPLSGPGLPIKQVFHELSQQTHGITRLGPYSLDKDSLYLNGYNEPGPDEPPTTPKPATTFLPPLSEATTAMGYHLKTLTLNFTISNLQYSPDMGKGSATFNSTEGVLQHLLRPLFQKSSMGPFYLGCQLISLRPEKDGAATGVDTTCTYHPDPVGPGLDIQQLYWELSQLTHGVTQLGFYVLDRDSLFINGYAPQNLSIRGEYQINFHIVNWNLSNPDPTSSEYITLLRDIQDKVTTLYKGSQLHDTFRFCLVTNLTMDSVLVTVKALFSSNLDPSLVEQVFLDKTLNASFHWLGSTYQLVDIHVTEMESSVYQPTSSSSTQHFYLNFTITNLPYSQDKAQPGTTNYQRNKRNIEDALNQLFRNSSIKSYFSDCQVSTFRSVPNRHHTGVDSLCNFSPLARRVDRVAIYEEFLRMTRNGTQLQNFTLDRSSVLVDGYSPNRNEPLTGNSDLPFWAVILIGLAGLLGVITCLICGVLVTTRRRKKEGEYNVQQQCPGYYQSHLDLEDLQ

SEQ ID NO: 9100 - DNA, 349 bp, Homo sapiens
gctcccaagccagccaccacattcctgcctcctctgtcagaagccacaacagccatggggtaccacctgaagaccctcacactcaacttcaccatctccaatctccagtattcaccagatatgggcaagggctcagctacattcaactccaccgagggggtccttcagcacctgctcagacccttgttccagaagagcagcatgggccccttctacttgggttgccaactgatctccctcaggctatgcaccccagaatttatcaatccggggcgagtaccagataaatttccacattgtcaactggaacctcagtaatccagaccccacatcctcagagtacatcacc

SEQ ID NO: 9101 - protein, 87 aa, Homo sapiens
MGYHLKTLTLNFTISNLQYSPDMGKGSATFNSTEGVLQHLLRPLFQKSSMGPFYLGCQLISLRLCTPEFINPGRVPDKFPHCQLEPQ

SEQ ID NO: 9102 - DNA, 556 bp, Homo sapiens
aatgttcctggagcggtgtaggaccaatactgtatatatggaaggaaggcaaggtggatagatggaaggaagaagtgacagatggatgggtgaaaggaaggaaagaagtgagagaaggaagaggaaggatagacagatgttagaaggtacaatgaaaggaaggaagccagcaagaaagaaaggatgcattaatagaatgaaagatggaagggaagaagaaaggatggaaagagagaaggaagaatgaacagaaggaagttcaagagtggtgaaaagaagaaaggcagggagagaaggagaaccggggtggtcagcgaggagccattcacactgaacttcaccatcaacaacctgcgctacatggcggacatgggccaacccggctccctcaagttcaacatcacagacaacgtcatgcagcacctgctcagtcctttgttccagaggagcagcctgggtgcacggtacacaggctgcagggtcatcgcactaaggtctgtgaagaacggtgctgagacacgggtggacctcctctgcacctacctgcagcccctca

SEQ ID NO: 9103 - protein, 103 aa, Homo sapiens
MNRRKFKSGEKKKGRERRRTGVVSEEPFTLNFTINNLRYMADMGQPGSLKFNITDNVMQHLLSPLFQRSSLGARYTGCRVIALRSVKNGAETRVDLLCTYLQP

SEQ ID NO: 9104 - DNA, 384 bp, Homo sapiens
atgggtcaccctggctccaggaagttcaacatcacggagagtgttctgcagggtctgctcaagcccttgttcaagagcaccagtgttggccctctgtattctggctgcagactgaccttgctcaggcctgagaaggatggagtagccaccagagtggacgccatctgcacccaccgccctgaccccaaaatccctgggctagacagacagcagctatactgggagctgagccagctgacccacagcatcactgagctgggaccctacaccctggatagggacagtctctatgtcaatggtttcacccagcggagctctgtgcccaccaccagcagtgagtattctactgatgttcccatggccccaatcttacaacaaacttag

SEQ ID NO: 9105 - protein, 127 aa, Homo sapiens
MGHPGSRKFNITESVLQGLLKPLFKSTSVGPLYSGCRLTLLRPEKDGVATRVDAICTHRPDPKIPGLDRQQLYWELSQLTHSITELGPYTLDRDSLYVNGFTQRSSVPTTSSEYSTDVPMAPILQQT

SEQ ID NO: 9106 - DNA, 2079 bp, Homo sapiens
cgcgtccccgagccccccctcaccccgtcccggaccccctgccccgcagctcgcgctcgtgccccctcccccacgcccccccggggcgcctgggtgtcgagggaccgagcgccccgcggcgggccagagaagggacgcgcggcgggcggccgcggggcatgaggcggaggcgcgatgtcggtgccgctgctcaagatcggggccgtgctgagcaccatggccatggtcaccaactggatgtcgcagacgctgccctcgctcgtggggctcaacggcaccgtgtcccgtgcgggcgcctctgagaaaatcactctcttccagaacccagaagagggctggcagctgtacacctcagcccaggcccctgacgggaaatgcatctgcacggccgtgatcccagcgcagagtacctgctctcgagatggcaggagtcgggagctgcggcaactgatggagaaggtccagaacgtctcccagtccatggaggtccttgagttgcggacgtatcgcgacctccagtatgtacgcggcatggagaccctcatgcggagcctggatgcgcggctccgggcagctgatgggtccctctcggccaagagcttccaggagctgaaggacaggatgacggaactgttgcccctgagctcggtcctggagcagtacaaggcagacacgcggaccattgtacgcttgcgggaggaggtgaggaatctctccggcagtctggcggccattcaggaggagatgggtgcctacgggtatgaggacctgcagcaacgggtgatggccctggaggcccggctccacgcctgcgcccagaagctgggctgtgggaagctgaccggggtcagtaaccccatcaccgttcgggccatggggtcccgcttcggctcctggatgactgacacgatggcccccagtgcggatagccgggtctggtacatggatggctattacaaaggccgccgggtcctggagttccgtaccctgggagacttcatcaaaggccagaactttatccagcacctgctgccccagccgtgggcgggcacgggccacgtggtgtacaacggctccctgttctataacaagtaccagagcaacgtggtggtcaaataccacttccgctcgcgctctgtgctggtgcagaggagcctcccgggcgccggttacaacaacaccttcccctactcctggggcggcttctccgacatggacttcatggtggacgagagcgggctctgggctgtgtacaccaccaaccagaacgcgggcaacatcgtggtcagccggctggacccgcacaccctcgaggtcatgcggtcctgggacaccggctaccccaagcgcagcgctggcgaggccttcatgatctgcggtgtgctctacgtgaccaactcccacctggctggggccaaggtctacttcgcctattttaccaacacgtccagttacgagtacacggacgtgcccttccacaaccagtattcccacatctcgatgctggattacaacccccgggagcgcgccctctatacctggaacaacggccaccaggtgctctacaatgtcaccctgtttcacgtcatcagcacctctggggacccctgagccaatgctgtggctcgggctgctgcctggggggcctctgggggctgggggcccttttcattctgcctgtgtccctcaagggtgatctctctgtctctgtcacgccctttctccccgcctttttgctgggcttttgttctctgcctatgtatttctgtctattttttcaatttcccctcttctcctttattgatctctgcttttaatacaccacttctttctttctgcctttttatggatgtctttttctttttatggctctggttctccagttctttccgtctctgcctctctctgtctctctctctctgtccttccacccctccctccttgcttcccacccattcctcatccctcactcccacccccacccccacccccaggagttgagtgcatggatctgtttctttttttatttacactttttctttccggtttgccggaataaacaggacctttgacatttga

SEQ ID NO: 9107 - protein, 478 aa, Homo sapiens
MSVPLLKIGAVLSTMAMVTNWMSQTLPSLVGLNGTVSRAGASEKITLFQNPEEGWQLYTSAQAPDGKCICTAVIPAQSTCSRDGRSRELRQLMEKVQNVSQSMEVLELRTYRDLQYVRGMETLMRSLDARLRAADGSLSAKSFQELKDRMTELLPLSSVLEQYKADTRTIVRLREEVRNLSGSLAAIQEEMGAYGYEDLQQRVMALEARLHACAQKLGCGKLTGVSNPITVRAMGSRFGSWMTDTMAPSADSRVWYMDGYYKGRRVLEFRTLGDFIKGQNFIQHLLPQPWAGTGHVVYNGSLFYNKYQSNVVVKYHFRSRSVLVQRSLPGAGYNNTFPYSWGGFSDMDFMVDESGLWAVYTTNQNAGNIVVSRLDPHTLEVMRSWDTGYPKRSAGEAFMICGVLYVTNSHLAGAKVYFAYFTNTSSYEYTDVPFHNQYSHISMLDYNPRERALYTWNNGHQVLYNVTLFHVISTSGDP

SEQ ID NO: 9108 - DNA, 2019 bp, Homo sapiens
cgcaacaaagactcggagcgagcgagggggcgggggtggggcggaatcccggccgccggcgaggcgggggaggcggcggcgcagggtcgccccggccgggcgggcggggtcgcgcctggtggcggtccccgcgccgaggcgccgctagggcgggcgggggtcgggacgccgggctaggggcgcgtcatgtggccgctcacggtcccgccgccgctgctgctgctgctgtgctcaggcctggccggacagactctcttccagaacccagaagagggctggcagctgtacacctcagcccaggcccctgacgggaaatgcatctgcacggccgtgatcccagcgcagagtacctgctctcgagatggcaggagtcgggagctgcggcaactgatggagaaggtccagaacgtctcccagtccatggaggtccttgagttgcggacgtatcgcgacctccagtatgtacgcggcatggagaccctcatgcggagcctggatgcgcggctccgggcagctgatgggtccctctcggccaagagcttccaggagctgaaggacaggatgacggaactgttgcccctgagctcggtcctggagcagtacaaggcagacacgcggaccattgtacgcttgcgggaggaggtgaggaatctctccggcagtctggcggccattcaggaggagatgggtgcctacgggtatgaggacctgcagcaacgggtgatggccctggaggcccggctccacgcctgcgcccagaagctgggctgtgggaagctgaccggggtcagtaaccccatcaccgttcgggccatggggtcccgcttcggctcctggatgactgacacgatggcccccagtgcggatagccgggtctggtacatggatggctattacaaaggccgccgggtcctggagttccgtaccctgggagacttcatcaaaggccagaactttatccagcacctgctgccccagccgtgggcgggcacgggccacgtggtgtacaacggctccctgttctataacaagtaccagagcaacgtggtggtcaaataccacttccgctcgcgctctgtgctggtgcagaggagcctcccgggcgccggttacaacaacaccttcccctactcctggggcggcttctccgacatggacttcatggtggacgagagcgggctctgggctgtgtacaccaccaaccagaacgcgggcaacatcgtggtcagccggctggacccgcacaccctcgaggtcatgcggtcctgggacaccggctaccccaagcgcagcgctggcgaggccttcatgatctgcggtgtgctctacgtgaccaactcccacctggctggggccaaggtctacttcgcctattttaccaacacgtccagttacgagtacacggacgtgcccttccacaaccagtattcccacatctcgatgctggattacaacccccgggagcgcgccctctatacctggaacaacggccaccaggtgctctacaatgtcaccctgtttcacgtcatcagcacctctggggacccctgagccaatgctgtggctcgggctgctgcctggggggcctctgggggctgggggcccttttcattctgcctgtgtccctcaagggtgatctctctgtctctgtcacgccctttctccccgcctttttgctgggcttttgttctctgcctatgtatttctgtctattttttcaatttcccctcttctcctttattgatctctgcttttaatacaccacttctttctttctgcctttttatggatgtctttttctttttatggctctggttctccagttctttccgtctctgcctctctctgtctctctctctctgtccttccacccctccctccttgcttcccacccattcctcatccctcactcccacccccacccccacccccaggagttgagtgcatggatctgtttctttttttatttacactttttctttccggtttgccggaataaacaggacctttgacatttga

SEQ ID NO: 9109 - protein, 454 aa, Homo sapiens; identical to SEQ ID NO: 1152

SEQ ID NO: 9110 - DNA, 907 bp, Homo sapiens
cccgccaggcgcgccgagccgcagcccgcgtccccgagccccccctcaccccgtcccggaccccctgccccgcagctcgcgctcgtgccccctcccccacgcccccccggggcgcctgggtgtcgagggaccgagcgccccgcggcgggccagagaagggacgcgcggcgggcggccgcggggcatgaggcggaggcgcgatgtcggtgccgctgctcaagatcggggccgtgctgagcaccatggccatggtcaccaactggatgtcgcagacgctgccctcgctcgtggggctcaacggcaccgtgtcccgtgcgggcgcctctgagaaaatcactctcttccagaacccagaagagggctggcagctgtacacctcagcccaggcccctgacgggaaatgcatctgcacggccgtgatcccagcgcagagtacctgctctcgagatggcaggagtcgggagctgcggcaactgatggagaaggtccagaacgtctcccagtccatggaggtccttgagttgcggacgtatcgcgacctccagtatgtacgcggcatggagaccctcatgcggagcctggatgcgcggctccgggcagctgatgggtccctctcggccaagagcttccaggagctgaaggacaggatgacggaactgttgcccctgagctcggtcctggagcagtacaaggcagacacgcggaccattgtacgcttgcgggaggaggtgaggaatctctccggcagtctggcggccattcaggaggagatgggtgcctacgggtatgaggacctgcagcaacgggtgatggccctggaggcccggctccacgcctgcgcccagaagctgggtatgccttggcccttgaccctgacccctgatctctgactgccacacccaactcc

SEQ ID NO: 9111 - protein, 229 aa, Homo sapiens
MSVPLLKIGAVLSTMAMVTNWMSQTLPSLVGLNGTVSRAGASEKITLFQNPEEGWQLYTSAQAPDGKCICTAVIPAQSTCSRDGRSRELRQLMEKVQNVSQSMEVLELRTYRDLQYVRGMETLMRSLDARLRAADGSLSAKSFQELKDRMTELLPLSSVLEQYKADTRTIVRLREEVRNLSGSLAAIQEEMGAYGYEDLQQRVMALEARLHACAQKLGMPWPLTLTPDL

SEQ ID NO: 9112 - DNA, 711 bp, Homo sapiens
cgcgcctggtggcggtccccgcgccgaggcgccgctagggcgggcgggggtcgggacgccgggctaggggcgcgtcatgtggccgctcacggtcccgccgccgctgctgctgctgctgtgctcaggcctggccggacagactctcttccagaacccagaagagggctggcagctgtacacctcagcccaggcccctgacgggaaatgcatctgcacggccgtgatcccagcgcagagtacctgctctcgagatggcaggagtcgggagctgcggcaactgatggagaaggtccagaacgtctcccagtccatggaggtccttgagttgcggacgtatcgcgacctccagtatgtacgcggcatggagaccctcatgcggagcctggatgcgcggctccgggcagctgatgggtccctctcggccaagagcttccaggagctgaaggacaggatgacggaactgttgcccctgagctcggtcctggagcagtacaaggcagacacgcggaccattgtacgcttgcgggaggaggtgaggaatctctccggcagtctggcggccattcaggaggagatgggtgcctacgggtatgaggacctgcagcaacgggtgatggccctggaggcccggctccacgcctgcgcccagaagctgggtatgccttggcccttgaccctgacccctgatctctgactgccacacccaactcc

SEQ ID NO: 9113 - protein, 205 aa, Homo sapiens
MWPLTVPPPLLLLLCSGLAGQTLFQNPEEGWQLYTSAQAPDGKCICTAVIPAQSTCSRDGRSRELRQLMEKVQNVSQSMEVLELRTYRDLQYVRGMETLMRSLDARLRAADGSLSAKSFQELKDRMTELLPLSSVLEQYKADTRTIVRLREEVRNLSGSLAAIQEEMGAYGYEDLQQRVMALEARLHACAQKLGMPWPLTLTPDL

SEQ ID NO: 9114 - DNA, 777 bp, Homo sapiens
gcggccactgactttggccagacgaaccaaaagtttgggtttgaactgggccccgtctgcttcagcagctgagagtgtccggggtgggagggaccatgagggagccccagaatggggtgcatttggtgctgaggctttgaagccaccgtatttttcgttacctgtgactatggagccaatgggatgtgacttcgctcatcacggacagtcattccttctcctttccagggtgctgggggctggggttccctggcccaagggtccagcctcctctcaccccattccaggtggcatactgcagtctggctctttctcccctccctccccacccaagcctcactggatgtctcctgatcccaggctgggacccctacccccaccccctttgatcctttctacttccacggtgaaaggactgaggtcggactacagagggaagagggacttcccttgactgggttgtgtttcttttcctgcctcagcccagctctgcaaatcccctccccctgccccccacctccccaggctcaccttgccatgccaggtggtttggggaccaagatgttgggggggtgaatcaggatcctaatggtgctgccctatttatacctgggtctgtattaaaagggaaagtcccccctgttgtagatttcatctgcttcctccttagggaaggctgggatatgatgagagattccagcccaagcctggccccccaccgccaggccatagggcataatttgcatctcaaatctgagaataaactgatgaactgtg

SEQ ID NO: 9115 - protein, 94 aa, Homo sapiens
MEPMGCDFAHHGQSFLLLSRVLGAGVPWPKGPASSHPIPGGILQSGSFSPPSPPKPHWMSPDPRLGPLPPPPLILSTSTVKGLRSDYRGKRDFP

SEQ ID NO: 9116 - DNA, 6174 bp, Homo sapiens
gcgagtgactgcaccgagcccgagaagtcgccgcgccccgcagccgccccgactggttccccgccttgcccgtgggccccgccgggatggggaaccgccgggacctgggccagccgcgggccggtctctgcctgctcctggccgcgctgcagcttctgccggggacgcaggccgatcctgtggatgtcctgaaggccctgggtgtgcagggaggccaggctggggtccccgaggggcctggcttctgtccccagaggactccagagggtgaccgggcattcagaattggccaggccagcacgctcggcatccccacgtgggaactctttccagaaggccactttcctgagaacttctccttgctgatcaccttgcggggacagccagccaatcagtctgtcctgctgtccatttatgatgaaaggggtgcccggcagttgggcctggcactggggccagcgctgggtctcctaggtgaccccttccgccccctcccccagcaggtcaacctcacagatggcaggtggcaccgtgtggccgtcagcatagatggtgagatggtgaccctggtagctgactgtgaagctcagccccctgttttgggccatggcccccgcttcatcagcatagctggactcactgtgctggggacccaggaccttggggaaaagactttcgagggagacattcaggagctgctgataagcccagatcctcaggctgccttccaggcttgtgagcggtacctccccgactgtgacaacctggcaccggcagccacagtggctccccagggtgaaccagaaacccctcgtcctcggcggaaggggaagggaaaagggaggaagaaagggcgaggtcgcaaggggaagggcaggaaaaagaacaaggaaatttggacctcaagtccacctcctgactccgcagagaaccagacctccactgacatccccaagacagagactccagctccaaatctgcctccgacccccacgcctttggtcgtcacctccactgtgactactggactcaatgccacgatcctagagaggagcttggaccctgacagtggaaccgagctggggaccctggagaccaaggcagccagggaggatgaagaaggagatgattccaccatgggccctgacttccgggcagcagaatatccatctcggactcagttccagatctttcctggtgctggagagaaaggagcaaaaggagagcccgcagtgattgaaaaggggcagcagtttgagggacctccaggagccccaggaccccaaggggtggttggcccctcaggccctcccggccccccaggattccctggcgaccctggtccaccgggccctgctggcctcccaggaatccccggcattgatgggatccgaggcccaccgggcactgtgatcatgatgccgttccagtttgcaggcggctcctttaaaggccccccagtctcattccagcaggcccaggctcaggcagttctgcagcagactcagctctctatgaaaggcccccctggtccagtggggctcactgggcgcccaggccctgtgggtctccccgggcatccaggtctgaaaggagaggagggagcagaagggccacagggtccccgaggcctgcagggacctcatggaccccctggccgagtgggcaagatgggccgccctggagcagatggagctcggggcctcccaggggacactggacctaagggtgatcgtggcttcgatggcctccctgggctgcctggtgagaagggccaaaggggtgactttggccatgtggggcaacccggtcccccaggagaggatggtgagaggggagcagagggacctccagggcccactggccaggctggggagccgggtccacgaggactgcttggccccagaggctctcctggccccacgggtcgcccgggtgtgactggaattgatggtgctcctggtgccaaaggcaatgtgggtcctccaggagaaccaggccctccgggacagcagggaaaccatgggtcccagggactccccggtccccagggactcattggcactcctggggagaagggtccccctggaaacccaggaattccaggcctcccaggatccgatggccctctgggtcacccaggacatgagggccccacgggagagaaaggggctcagggtccaccagggtcggcaggccctccgggctatcctggacctcggggagtgaagggcacttcaggcaaccggggcctccagggggagaaaggcgagaagggagaggacggcttcccaggcttcaagggcgatgtggggctcaaaggtgatcaggggaaacccggagctccaggtccccggggagaggatggtcctgaggggccgaaggggcaggcggggcaggctggcgaggaggggcccccaggctcagctggggagaagggcaagcttggggtgccaggcctcccaggttatccaggacgccctggacctaagggatctattggatttcccggtcccctgggacccataggagagaaagggaagtcgggaaagacagggcagccaggcctggaaggagagcggggaccaccaggttcccgtggagagagggggcaaccgggtgccacagggcaaccaggccccaagggcgatgtgggccaggatggagcccctgggatccctggagaaaagggcctccctggtctgcaaggccctccaggattccctgggccaaagggcccccctggtcaccaaggtaaagatgggcgaccagggcaccctggacagagaggagaactgggcttccaaggtcagacaggcccgcctggaccagctggtgtcttaggccctcagggaaagacaggagaagtgggacctctaggtgaaagggggcctccaggcccccctggacctcctggtgaacaaggtcttcctggcctggaaggcagagagggggccaagggggaactgggaccaccaggaccccttgggaaagaagggccagctggactcaggggctttcccggccccaaagggggccctggggacccgggacctactggcttaaagggtgataagggccccccagggcccgtgggggccaatggctcccctggtgagcgcggtcctttgggcccagcaggaggcattggacttcctggccaaagtggcagcgaaggccccgttggccctgcaggcaagaaggggtcccggggagaacgtggcccccctggccccactggcaaagatgggatcccagggcccctggggcctctgggaccccctggagctgctgggccttctggcgaggaaggggacaagggggatgtgggtgcccccggacacaaggggagtaaaggcgataaaggagacgcgggcccacctggacaaccagggatacggggtcctgcaggacacccaggtcccccgggagcagacggggctcaggggcgccggggacccccaggcctctttgggcagaaaggagatgacggagtcagaggctttgtgggggtgattggccctcctggactgcaggggctgccaggccctccgggagagaaaggggaggtcggagacgtcgggtccatgggtccccatggagctccaggtcctcggggtccccaaggccccactggatcagagggcactccagggctgcctggaggagttggtcagccaggcgccgtgggtgagaagggtgagcgaggggacgctggagacccagggcctccaggagccccaggcatcccggggcccaagggagacattggtgaaaagggggactcaggcccatctggagctgctggacccccaggcaagaaaggtccccctggagaggatggagccaaagggagcgtgggccccacggggctgcccggagatctagggcccccaggagaccctggagtttcaggcatagatggttccccaggggagaagggagaccctggtgatgttgggggaccgggtccgcctggagcttctggggagcccggcgcccccgggccccccggcaagaggggtccttcaggccacatgggtcgagaaggcagagaaggggagaaaggtgccaagggggagccaggtcctgatgggcccccagggaggacgggtccaatgggggctagagggccccctggacgtgtggggcctgagggtcttcgagggatccctggccctgtgggtgaaccaggcctcctgggagcccctggacagatgggccctcctggccccctggggccctctggcctcccagggctgaagggagacactggccccaagggggaaaagggccacattggattgatcggtctcattggccccccgggagaagctggtgagaaaggagatcaggggttgccaggcgtgcagggaccccctggtcccaagggagaccctggtccccctggtcccattggctctctgggccaccctgggcccccaggtgtggcgggccctctaggacagaaaggctcaaaagggtctccggggtccatgggcccccgtggagacactggacctgcaggcccaccaggccccccgggtgcccctgccgagctgcatgggctgcgcaggcgccggcgcttcgtcccagtcccgcttccagtcgtggagggcggcctggaggaggtgctggcctcgctcacatcgctgagcttggagctggagcagctgcggcgtcctcccggcactgcggagcgcccgggcctcgtgtgccacgagctgcaccgcaaccacccgcacctgcctgatggggaatactggattgaccccaaccagggctgcgcgcgggactcgttcagggttttttgcaacttcacggcgggaggagagacctgcctctatcccgacaagaagtttgagatcgtgaaattggcctcctggtccaaggaaaagcctggaggctggtatagcacattccgtcgagggaagaagttctcctacgtggacgccgacgggtccccagtgaatgtcgtgcagctgaacttcctgaaactgctgagtgccacagctcgccagaacttcacctactcctgccagaatgcagctgcctggctggacgaagccacgggtgactacagccactccgcccgcttccttggcaccaatggagaggagctgtctttcaaccagacgacagcagccactgtcagcgtcccccaggatggctgccggctccggaaaggacagacgaagacccttttcgaattcagctcttctcgagcgggatttctgcccctgtgggatgtggcggccactgactttggccagacgaaccaaaagtttgggtttgaactgggccccgtctgcttcagcagctgagagtgtccggggtgggagggaccatgagggagccccagaatggggtgcatttggtgctgaggctttgaagccaccgtatttttcgttacctgtgactatggagccaatgggatgtgacttcgctcatcacggacagtcattccttctcctttccagggtgctgggggctggggttccctggcccaagggtccagcctcctctcaccccattccaggtggcatactgcagtctggctctttctcccctccctccccacccaagcctcacctccccaccccttgaacccccatgcaatgagcttctaactcagagctgatgaacaaaagcccccccacccccaatgcctgcctcctcactcctccgtcgctgcccttcacaccttttggtgctacccctccccagagttaagcactggatgtctcctgatcccaggctgggacccctacccccaccccctttgatcctttctacttccacggtgaaaggactgaggtcggactacagagggaagagggacttcccttgactgggttgtgtttcttttcctgcctcagcccagctctgcaaatcccctccccctgccccccacctccccaggctcaccttgccatgccaggtggtttggggaccaagatgttgggggggtgaatcaggatcctaatggtgctgccctatttatacctgggtctgtattaaaagggaaagtcccccctgttgtagatttcatctgcttcctccttagggaaggctgggatatgatgagagattccagcccaagcctggccccccaccgccaggccatagggcataatttgcatctcaaatctgagaataaactgatgaactgtg

SEQ ID NO: 9117 - protein, 1745 aa, Homo sapiens; identical to SEQ ID NO: 1154

SEQ ID NO: 9118 - DNA, 975 bp, Homo sapiens
ggtctacactgaccacactgacccttcatcttgatgcctgcactgactctccatcttaatggtctacactgatcacccacgctgaccttggccactgaccactcacgttgtccatcctccagtcaacccctcattagctctcatcatcccaccttggtggcctactctgaccatcccttgacctcatccctggtaattcccatttgaaatctgcataatttcccatttgaccatcccctaaccacccacacagacctcgagttcacatttgagaatccctaactgacccttgctcttctcccaggggccctctggcctcccagggctgaagggagacactggccccaagggggaaaagggccacattggattgatcggtctcattggccccccgggagaagctggtgagaaaggagatcaggggttgccaggcgtgcagggaccccctggtcccaagggagaccctggtccccctggtcccattggctctctgggccaccctgggcccccaggtgtggcggtgagtatgcagggaatcttttgtgggatgaggtcactgtggtggtccaggccaggacctcagctctccctgtctgtaccctacagggccctctaggacagaaaggctcaaaagggtctccggtgagtacaccctgcttccgtgggcttacacatcccagctccccacccccttcactgcaccagaaccctccacgtctctgccttcatttatttatttattcatgcaatcgtgcgttcgacaaatatttattcaacacctacggttgtatttcatcagatccaaaatgccatcaattataagatgtaccattattttacaaactgctaggaaagaaaacagttctgccaagtaaactatgacttgccaaagatgttaagaagctgatttcagagacattaaaacatgaaaagaaaatttgtgtctgatgcctaatgctgaaaactgcatgtctc

SEQ ID NO: 9119 - protein, 43 aa, Homo sapiens
MQSCVRQIFIQHLRLYFIRSKMPSIIRCTIILQTARKENSSAK

SEQ ID NO: 9120 - DNA, 1644 bp, Homo sapiens
ggagctagtggcctcttcaccctggtgacctctgttccgtattctgtcactgagagacgccctgggacatctgtggtggcttttgtcgcgctgggacctaccctgactacgggagttgggaggacccgggacaccgcacagccgggaaatgacagggtctccctgtcacccaggctggagttcagtagtgttctcttggctcactgaaactgctgcctcccaagcaaatgatcctcccacctcagcctcctgaatagctgggactacaggtgcacactaccatgcccagactgagataaggtatgaggaagccttggccatgccaccagccgcttatcccaaattcctgatccctggaagacatctgggctctccctcctgttccagcccagtagcttccagcaaaggtactggctcaattggacacggagtgtggaactgcctgctcacacttgtgaacccccgtccagaaggaagaaacagaaagggcccaccttccagaggccgaggtggctccaccacagcttctgtccggtggtgaccagcactgatctccggagccaagggaggacccgggacacctgggagccgggaaatgttttccatggctccgagacaatgacaccgcttcagtgtgaactctcatgaattgagtctagatccccagtgctgtccgtctcacctgtcctcctctacacatatctgggatatgtcacggcttggtggtctttgaagatgtgactctgaacttcatccagaaggagtaggctttgctggatttttccgtgaagaatctgtagagatgtgatgagggaagccatcagcacctggcttctatagctgcagcccaagaggccaactggaacgttaacatcagacactaatccagctgactggacacaattgggaaaactggttattttaccaaggctttaactggaatggtgtgccttcctttaaggaatcaaatttgacttatggagccaataaagcccttggaaagctggcctcagatttcatgtacagtccctgtacagggtttccgatctgtgagattttttaaactgacaggatcatggccatttcacagacaactacccaaaaatatctacagacggcactgctcctaccaacccgataccagagaactctctgtcccctcgtcagcaggaagtagccagaaagaacatgccgcccctcgtcctttttataactatgaggtctggattgacagagcagaagcatcaccattgtggataagcgcctcattttaaaattcaccttaatcaaaaactgcctaaatccaaagggcatcagcctaatggctaaggtcagcatgatcacaaaccacaaataacatctccaaccaaaaacattccagacacctcccacagagaaatgctagcctcgggataacccctctcctgccggaaagatgtcacccccaagataaccacccctccgcccagaacattccaaccctgccacaaacttctcccccacacagaaacattccaagcttgtaataagctccctcaccctaaaaccaacgtacattcttagtctgcaaggaaaagtgctcctgactgaccagccagaatcctctctcaggtcttttctataataaacctgtctttgactgtc

SEQ ID NO: 9121 - protein, 98 aa, Homo sapiens
MEPIKPLESWPQISCTVPVQGFRSVRFFKLTGSWPFHRQLPKNIYRRHCSYQPDTRELSVPSSAGSSQKEHAAPRPFYNYEVWIDRAEASPLWISASF

SEQ ID NO: 9122 - DNA, 2078 bp, Homo sapiens
gacgttccaggagctagtggcctcttcaccctggtgacctctgttccgtattctgtcactgagagacgccctgggacatctgtggtggcttttgtcgcgctgggacctaccctgactacgggagttgggaggacccgggacaccgcacagccgggaaatggccctgtgttatggaactttctggggctaccctaagatgctggaagctgccaatctcatggagggcctagtggatatcggcccttgggtcactcttcccagaggacagcctgaggtgttggagtggggcctcccaaaggatcaggactcagtggcctttgaggatgtggctgtgaacttcacccatgaggagtgggctttgctgggtccatcacagaagaatctctacagagatgtgatgcgagaaaccattaggaacctgaactgtataggaatgaaatgggaaaaccagaacattgatgatcagcaccaaaatctcaggagaaatccaaggttatcggagacatggttacagaatttcattttgatccattatggtcacctggtagctttgtctgatggaggtttgttacagttttcaacaggacagggtctccctgtcacccaggctggagttcagtagtgttctcttggctcactgaaactgctgcctcccaagcaaatgatcctcccacctcagcctcctgaatagctgggactacaggtgcacactaccatgcccagactgagataaggtatgaggaagccttggccatgccaccagccgcttatcccaaattcctgatccctggaagacatctgggctctccctcctgttccagcccagtagcttccagcaaaggtactggctcaattggacacggagtgtggaactgcctgctcacacttgtgaacccccgtccagaaggaagaaacagaaagggcccaccttccagaggccgaggtggctccaccacagcttctgtccggtggtgaccagcactgatctccggagccaagggaggacccgggacacctgggagccgggaaatgttttccatggctccgagacaatgacaccgcttcagtgtgaactctcatgaattgagtctagatccccagtgctgtccgtctcacctgtcctcctctacacatatctgggatatgtcacggcttggtggtctttgaagatgtgactctgaacttcatccagaaggagtaggctttgctggatttttccgtgaagaatctgtagagatgtgatgagggaagccatcagcacctggcttctatagctgcagcccaagaggccaactggaacgttaacatcagacactaatccagctgactggacacaattgggaaaactggttattttaccaaggctttaactggaatggtgtgccttcctttaaggaatcaaatttgacttatggagccaataaagcccttggaaagctggcctcagatttcatgtacagtccctgtacagggtttccgatctgtgagattttttaaactgacaggatcatggccatttcacagacaactacccaaaaatatctacagacggcactgctcctaccaacccgataccagagaactctctgtcccctcgtcagcaggaagtagccagaaagaacatgccgcccctcgtcctttttataactatgaggtctggattgacagagcagaagcatcaccattgtggataagcgcctcattttaaaattcaccttaatcaaaaactgcctaaatccaaagggcatcagcctaatggctaaggtcagcatgatcacaaaccacaaataacatctccaaccaaaaacattccagacacctcccacagagaaatgctagcctcgggataacccctctcctgccggaaagatgtcacccccaagataaccacccctccgcccagaacattccaaccctgccacaaacttctcccccacacagaaacattccaagcttgtaataagctccctcaccctaaaaccaacgtacattcttagtctgcaaggaaaagtgctcctgactgaccagccagaatcctctctcaggtcttttctataataaacctgtctttgactgtc

SEQ ID NO: 9123 - protein, 154 aa, Homo sapiens
MALCYGTFWGYPKMLEAANLMEGLVDIGPWVTLPRGQPEVLEWGLPKDQDSVAFEDVAVNFTHEEWALLGPSQKNLYRDVMRETIRNLNCIGMKWENQNIDDQHQNLRRNPRLSETWLQNFILIHYGHLVALSDGGLLQFSTGQGLPVTQAGVQ

SEQ ID NO: 9124 - DNA, 3743 bp, Homo sapiens
gacgttccaggagctagtggcctcttcaccctggtgacctctgttccgtattctgtcactgagagacgccctgggacatctgtggtggcttttgtcgcgctgggacctaccctgactacgggagttgggaggacccgggacaccgcacagccgggaaatggccctgtgttatggaactttctggggctaccctaagatgctggaagctgccaatctcatggagggcctagtggatatcggcccttgggtcactcttcccagaggacagcctgaggtgttggagtggggcctcccaaaggatcaggactcagtggcctttgaggatgtggctgtgaacttcacccatgaggagtgggctttgctgggtccatcacagaagaatctctacagagatgtgatgcgagaaaccattaggaacctgaactgtataggaatgaaatgggaaaaccagaacattgatgatcagcaccaaaatctcaggagaaatccaaggtgtgatgtggtagagagatttggtaaaagtaaagatggtagtcagtgtggagaaaccttaagccagattcgaaatagtattgtaaacaagaacactcccgccagagtagatgcatgtggaagcagtgtgaatggagaagtcataatgggtcattcatccctgaattgctacatcagagttgatactggacacaaacaccgggagtgtcatgaatatgcagagaagtcatatacacataagcagtgtgggaaaggcttaagttatcgccactcctttcaaacatgtgaaaggcctcacactggaaagaaaccctatgattgtaaggaatgtggaaaaaccttcagttctcctggaaaccttcgaagacatatggtagtaaaaggtggagatggaccttataaatgtgaattgtgtgggaaagcctttttttggcccagtttattacgtatgcatgaaagaactcacactggagagaaaccatatgaatgtaagcagtgttctaaagccttccctgtttacagttcctatctaagacatgaaaaaatacacactggggagaaaccgtatgaatgtaagcagtgttctaaagccttccctgattacagttcatatctaagacatgaaagaactcacactggagagaaaccctacaaatgtaaacaatgtgggaaagccttcagtgtttccggttcccttcgagtacatgaaagaattcacactggagagaaaccctatacatgtaaacagtgtgggaaagcgttttgtcatcttggaagctttcaaagacacatgataatgcacagtggagatggacctcataaatgtaagatatgtgggaaaggctttgattttcctggttcagcacgaattcatgaaggaactcacactctagagaaaccctatgaatgtaagcaatgtgggaaattgttatctcatcgctcaagctttcgaagacacatgatggcacacactggagatggccctcataaatgcacagtatgtgggaaagcctttgattctcctagtgtatttcaaagacatgaaaggactcacactggagagaaaccctatgaatgcaagcaatgtgggaaagccttccgtacttccagttcccttcgaaaacatgaaacaacacacactggagagcaaccctataaatgtaaatgtggaaaagcttttagtgatttattttcctttcaaagtcatgaaacaacacacagtgaagaggagccttatgaatgtaaggagtgtgggaaagcatttagttcttttaaatacttttgtcgccatgaaaggactcacagtgaagaaaaatcttatgagtgtcaaatttgtggcaaagccttcagtcgtttcagttacttaaaaactcatgaaaggactcacacggcagagaagccatatgaatgtaagcaatgcaggaaagcattcttttggccctctttccttctaagacatgaaaggactcacactggagaaagaccctatgaatgtaaacactgtggtaaagccttcagtcgttccagtttctgtcgagaacatgaaagaactcacactggagagaagccctatgaatgactcagtgacctttgaagatgtggctgtgaacttcacccaggaggaatggactttgctggatccttcacagaaaaaactctacagagacgtgatgtgggaaaccttcaggaacctggccactataggaacaaaacaaaaagaatggaacattgaagagcagtacaaaaaccaggggagaaatctcagaaatcatatggtagagagactctgtgaaagtaaagaaggtagtcatggcggagaaggtttcagccagattgcaaatctcagtctgaacaagaaaactccttctggaggaaagctttgggaaagcagtgtatgtggaaaagtcttgagccatcattcatcccttaacaggcacattagatcttacaccagacacaaactgtataagtgtcaggaatatggagagaagccatataaatgtaagaaatgtgggaaacccttcagttatctgcagtcttttaaaaaacataaaagaacacacagtgcagggatagtctacaaatgtaaggcctgtgggaaagccttcagttgtcaacgttctttccaaatacatggaaggactcacactggagataaaccctttaagtgtaaagaatgtggaaaagcattccgataccaccaatctgctcaaaaacatgaaaaggctcatactggagagaaaccctacaaatgtaaggaatgtgggaaacccttcatttaccgccattctgctcgagcacatgaaaggaatcacactgtacagaaacgctatgaatgtaaacaatgtggaaaaacctacatatcttctgtaggttttcaagcacatgaaagaactcacactggagaaaaaccctatgaatgtaaaaaatgtgggaaagtgttcgtatatcacaactctgctcaaagacatgaaaagactcatactggagagaaaccctacaaatgcaaggaatgtgggaaagccttcagttaccactgtactgctcaaaaacatgagaggaatcacactgcacagaaacactatgaatgtaaactgtgtgggaaaacttacttgtctcctttaggttttcaagcacatgaaagtactcacactggagataaaccctttgagtgtaaaaaatgtggaaaagcatttagatactactactcagctcaaagacatgaaaggactcatactggagagaaaccctacaaatgtaaggaatgtgggaaagccttttattgttgcagttctgcccgaagacatgaaaggatgcacactgcaaagaaacagtatgaatgtaaaaaatgtgggaaaacatacattactcttgcaggtttccagatacatgaaagaacccacactggagagaaaccttatgaatgtaaacagtgtggtaaagccttcagtagttccagttatattcatatacatgaacgaattcatactggagagaaaccctatgaatgtaaagaatgtggaaaacccttcagtttccttacaggctttcgagtgcacatgagaatgcacactggagagaaaccttataaatgtaaggattgtggcaacgccttcatttggcgtgcatccttacaataccatgtgaagaaagtgcacgctgaatagaaactataaatgtaaatatcgaaagtttttcaattttaacgattttcaaagttgatatgaaagttcatactggagggtagttgc

SEQ ID NO: 9125 - protein, 637 aa, Homo sapiens
MALCYGTFWGYPKMLEAANLMEGLVDIGPWVTLPRGQPEVLEWGLPKDQDSVAFEDVAVNFTHEEWALLGPSQKNLYRDVMRETIRNLNCIGMKWENQNIDDQHQNLRRNPRCDVVERFGKSKDGSQCGETLSQIRNSIVNKNTPARVDACGSSVNGEVIMGHSSLNCYIRVDTGHKHRECHEYAEKSYTHKQCGKGLSYRHSFQTCERPHTGKKPYDCKECGKTFSSPGNLRRHMVVKGGDGPYKCELCGKAFFWPSLLRMHERTHTGEKPYECKQCSKAFPVYSSYLRHEKIHTGEKPYECKQCSKAFPDYSSYLRHERTHTGEKPYKCKQCGKAFSVSGSLRVHERIHTGEKPYTCKQCGKAFCHLGSFQRHMIMHSGDGPHKCKICGKGFDFPGSARIHEGTHTLEKPYECKQCGKLLSHRSSFRRHMMAHTGDGPHKCTVCGKAFDSPSVFQRHERTHTGEKPYECKQCGKAFRTSSSLRKHETTHTGEQPYKCKCGKAFSDLFSFQSHETTHSEEEPYECKECGKAFSSFKYFCRHERTHSEEKSYECQICGKAFSRFSYLKTHERTHTAEKPYECKQCRKAFFWPSFLLRHERTHTGERPYECKHCGKAFSRSSFCREHERTHTGEKPYE

SEQ ID NO: 9126 - DNA, 2882 bp, Homo sapiens
agaattgtcaatcaggcgcgaggcagagaggagggtgtgacgttccaggagctagtggcctcttcaccctggtgacctctgttccgtattctgtcactgagagacgccctgggacatctgtggtggcttttgtcgcgctgggacctaccctgactacgggagttgggaggacccgggacaccgcacagccgggaaatggactcagtggcctttgaggatgtggctgtgaacttcacccatgaggagtgggctttgctgggtccatcacagaagaatctctacagagatgtgatgcgagaaaccattaggaacctgaactgtataggaatgaaatgggaaaaccagaacattgatgatcagcaccaaaatctcaggagaaatccaaggtgtgatgtggtagagagatttggtaaaagtaaagatggtagtcagtgtggagaaaccttaagccagattcgaaatagtattgtaaacaagaacactcccgccagagtagatgcatgtggaagcagtgtgaatggagaagtcataatgggtcattcatccctgaattgctacatcagagttgatactggacacaaacaccgggagtgtcatgaatatgcagagaagtcatatacacataagcagtgtgggaaaggcttaagttatcgccactcctttcaaacatgtgaaaggcctcacactggaaagaaaccctatgattgtaaggaatgtggaaaaaccttcagttctcctggaaaccttcgaagacatatggtagtaaaaggtggagatggaccttataaatgtgaattgtgtgggaaagcctttttttggcccagtttattacgtatgcatgaaagaactcacactggagagaaaccatatgaatgtaagcagtgttctaaagccttccctgtttacagttcctatctaagacatgaaaaaatacacactggggagaaaccgtatgaatgtaagcagtgttctaaagccttccctgattacagttcatatctaagacatgaaagaactcacactggagagaaaccctacaaatgtaaacaatgtgggaaagccttcagtgtttccggttcccttcgagtacatgaaagaattcacactggagagaaaccctatacatgtaaacagtgtgggaaagcgttttgtcatcttggaagctttcaaagacacatgataatgcacagtggagatggacctcataaatgtaagatatgtgggaaaggctttgattttcctggttcagcacgaattcatgaaggaactcacactctagagaaaccctatgaatgtaagcaatgtgggaaattgttatctcatcgctcaagctttcgaagacacatgatggcacacactggagatggccctcataaatgcacagtatgtgggaaagcctttgattctcctagtgtatttcaaagacatgaaaggactcacactggagagaaaccctatgaatgcaagcaatgtgggaaagccttccgtacttccagttcccttcgaaaacatgaaacaacacacactggagagcaaccctataaatgtaaatgtggaaaagcttttagtgatttattttcctttcaaagtcatgaaacaacacacagtgaagaggagccttatgaatgtaaggagtgtgggaaagcatttagttcttttaaatacttttgtcgccatgaaaggactcacagtgaagaaaaatcttatgagtgtcaaatttgtggcaaagccttcagtcgtttcagttacttaaaaactcatgaaaggactcacacggcagagaagccatatgaatgtaagcaatgcaggaaagcattcttttggccctctttccttctaagacatgaaaggactcacactggagaaagaccctatgaatgtaaacactgtggtaaagccttcagtcgttccagtttctgtcgagaacatgaaagaactcacactggagagaagccctatgaatgactcagtgacctttgaagatgtggctgtgaacttcacccaggaggaatggactttgctggatccttcacagaaaaaactctacagagacgtgatgtgggaaaccttcaggaacctggccactataggaacaaaacaaaaagaatggaacattgaagagcagtacaaaaaccaggggagaaatctcagaaatcatatggtagagagactctgtgaaagtaaagaaggtagtcatggcggagaaggtttcagccagattgcaaatctcagtctgaacaagaaaactccttctggaggaaagctttgggaaagcagtgtatgtggaaaagtcttgagccatcattcatcccttaacaggcacattagatcttacaccagacacaaactgtataagtgtcaggaatatggagagaagccatataaatgtaagaaatgtgggaaacccttcagttatctgcagtcttttaaaaaacataaaagaacacacagtgcagggatagtctacaaatgtaaggcctgtgggaaagccttcagttgtcaacgttctttccaaatacatggaaggactcacactggagataaaccctttaagtgtaaagaatgtggaaaagcattccgataccaccaatctgctcaaaaacatgaaaaggctcatactggagagaaaccctacaaatgtaaggaatgtgggaaacccttcatttaccgccattctgctcgagcacatgaaaggaatcacactgtacagaaacgctatgaatgtaaacaatgtggaaaaacctacatatcttctgtaggttttcaagcacatgaaagaactcacactggagaaaaaccctatgaatgtaaaaaatgtgggaaagtgttcgtatatcacaactctgctcaaagacatgaaaagactcatactggagagaaac

SEQ ID NO: 9127 - protein, 589 aa, Homo sapiens
MDSVAFEDVAVNFTHEEWALLGPSQKNLYRDVMRETIRNLNCIGMKWENQNIDDQHQNLRRNPRCDVVERFGKSKDGSQCGETLSQIRNSIVNKNTPARVDACGSSVNGEVIMGHSSLNCYIRVDTGHKHRECHEYAEKSYTHKQCGKGLSYRHSFQTCERPHTGKKPYDCKECGKTFSSPGNLRRHMVVKGGDGPYKCELCGKAFFWPSLLRMHERTHTGEKPYECKQCSKAFPVYSSYLRHEKIHTGEKPYECKQCSKAFPDYSSYLRHERTHTGEKPYKCKQCGKAFSVSGSLRVHERIHTGEKPYTCKQCGKAFCHLGSFQRHMIMHSGDGPHKCKICGKGFDFPGSARIHEGTHTLEKPYECKQCGKLLSHRSSFRRHMMAHTGDGPHKCTVCGKAFDSPSVFQRHERTHTGEKPYECKQCGKAFRTSSSLRKHETTHTGEQPYKCKCGKAFSDLFSFQSHETTHSEEEPYECKECGKAFSSFKYFCRHERTHSEEKSYECQICGKAFSRFSYLKTHERTHTAEKPYECKQCRKAFFWPSFLLRHERTHTGERPYECKHCGKAFSRSSFCREHERTHTGEKPYE

SEQ ID NO: 9128 - DNA, 310 bp, Homo sapiens
aatcaggcgcgaggcagagaggagggtgtgacgttccaggagctagtggcctcttcaccctggtgacctctgttccgtattctgtcactgagagacgccctgggacatctgtggtggcttttgtcgcgctgggacctaccctgactacgggagttgggaggacccgggacaccgcacagccgggaaatggactcagtgacctttgaagatgtggctgtgaacttcacccaggaggaatggactttgctggatccttcacagaaaaaactctacagagacgtgatgtgggaaaccttcaggaacctggcca

SEQ ID NO: 9129 - protein, 40 aa, Homo sapiens
MDSVTFEDVAVNFTQEEWTLLDPSQKKLYRDVMWETFRNL

SEQ ID NO: 9130 - DNA, 517 bp, Homo sapiens
gacgttccaggagctagtggcctcttcaccctggtgacctctgttccgtattctgtcactgagagacgccctgggacatctgtggtggcttttgtcgcgctgggacctaccctgactacgggagttgggaggacccgggacaccgcacagccgggaaatggccctgtgttatggaactttctggggctaccctaagatgctggaagctgccaatctcatggagggcctagtggatatcggcccttgggtcactcttcccagaggacagcctgaggtgttggagtggggcctcccaaaggatcaggctggagaacttgggacagtggataagtctggactcagtggcctttgaggatgtggctgtgaacttcacccatgaggagtgggctttgctgggtccatcacagaagaatctctacagagatgtgatgcgagaaaccattaggaacctgaactgtataggaatgaaatgggaaaaccagaacattgatgatcagcaccaaaatctcaggagaaa

SEQ ID NO: 9131 - protein, 64 aa, Homo sapiens
MALCYGTFWGYPKMLEAANLMEGLVDIGPWVTLPRGQPEVLEWGLPKDQAGELGTVDKSGLSGL

SEQ ID NO: 9132 - DNA, 1119 bp, Homo sapiens
gcgggttcctgagaattgtcaatcaggcgcgaggcagagaggagggtgtgacgttccaggagctagtggcctcttcaccctggtgacctctgttccgtattctgtcactgagagacgccctgggacatctgtggtggcttttgtcgcgctgggacctaccctgactacgggagttgggaggacccgggacaccgcacagccgggaaatggccctgtgttatggaactttctggggctaccctaagatgctggaagctgccaatctcatggagggcctagtggatatcggcccttgggtcactcttcccagaggacagcctgaggtgttggagtggggcctcccaaaggatcaggctggagaacttgggacagtggataagtctggtctgttcctgttatctggacttggcagattaatgcaacattctgtgggactttgcaatagctaaagaacttaaatatcctttgtttactaaaggcttcattattatggaagtagtaactgatgtttattatctgagatggatagatacttgtgcttttcttgttgagctataaaatagaagtgacttacaatttccttccctcctgtaaacactgaatttgagtgattttgatagattcatcacacatggagttttgtttgtttgttttatgttttaaatccacgtaaggcatgaaagggtaagcaaatggccttgactggggtggagaggcttgaggccagtgactccaagtggaggccaattttgagcctgcaaagggaggtcattgtgggcccagtttagttggttcttcctggggagcctcccctgcaggtgtcccagcctaatcactccagcaatgggaggagaatcccttgaacccaggaggcggaggctgcagtgggtgacagagcgagattccgtctcaaggaaaaaaaaagaagaatgtgtatatatgtggacagtgaagactcatggggatgagggaggttatttggtggataatgggggttgctccagggatggatgcactgaaaggcctgactttacaaggcaatatatcaatgtagtaaaattgcactggtactccatgaatatatatatataatttatacatatatgtgtatatatatat

SEQ ID NO: 9133 - protein, 82 aa, Homo sapiens [sequence omitted]

SEQ ID NO: 9134 - DNA, 374 bp, Homo sapiens
aaaaaaaaaaaaaaaaaaaaacctaacctctgggacattgacatttttttccccaagcctagtttccattccttggtgacgcatggcttatcagaaaattggatggtgttattcaggggacaagacaaatgatttctgccttctggactctctccgactgtgaagctagaaaactgtttctaaaaactgaaaaacccacccaatgaggttttgcatgagcctgaaaaagacataaggcagtgtctcctaggaatgtggttgctgagcacttcaatgagcaccgtggggctggcggatgtgccaggctggagaacttgggacagtggataagtctggtctgttcctgttatctggacttggcagattaatgcaac

SEQ ID NO: 9135 - protein, 47 aa, Homo sapiens
KRHKAVSPRNVVAEHFNEHRGAGGCARLENLGQWISLVCSCYLDLAD

SEQ ID NO: 9136 - DNA, 2756 bp, Homo sapiens
gccaggttcaaagagcccgcggcgtcttcacgcccctgcgctcagctctagactcagtcgctcgctgagagacgccctggaacgtctgtgtagcctcagtcgctgagagacgccctggaacgtctgtggcagcctctgtcacagtgggacccgcactggcagcgggaggcagagggaggaccctggaacatcccggaagccgggaaatggacgcagtggcctttgaggatgtggctgtgaacttcacccaggaggaatgggctttgctgggtccatcacagaagaatttatacagatatgtgatgcaagaaaccatcaggaacctggactgtataagaatgatatgggaagaacagaatactgaagatcagtacaaaaatcctaggagaaatctaagatgtcatatggtagagagattcagtgaaagtaaagacagtagtcagtgtggagaaacatttagcctcattcgagatagtattgtgaacaacagcatttgtcctggagaagatccatgtcaaagcgctgagtgtgaagaagtcataatgggtcatttatcccttaatagccacatcagagttgattctggacacaaaccacatgagtatcaggaatatggagagaagccacatacacataaacaacgtgggaaagccttcagttaccatcactcctttcagtcgcgtggaaggcctcacactggaaagaaacgctatgagtgtaaggaatgtggaaaaaccttcagttctcgtagaaaccttcgaagacacatggtagtgcaaggtggaaatagaccttataaatgtaagttgtgtgggaaagcttttttttggcccagtttattacgtatgcatgaaagaactcacactggagagaaaccgtatgaatgtaagcagtgttctaaagcctttcctttttacagttcctatcgaagacatgagagaatgcacactggggagaaaccgtatgaatgtaagcagtgttctaaagccttgcctgattccagttcctatataagacatgaaagaactcacactggagagaaaccatatacatgtaaacagtgtgggaaagccttcagtgtttccagttcccttcgaagacatgaaaccactcacagtgcagagaaaccctatgagtgtaagcaatgcgggaaaacatttcatcatcttggaagctttcagatacacatgaaaaggcacactggagatcgacctcataaatgtaagatatgtgggaaaggctttgatcgtcccagtttagttcgatatcatgaacgaattcacactggagagaaaccctatgaatgcaagcagtgtgggaaaacgttatctcatagctcaagctttcgaagacacatgataatgcacactggaggtggacctcataaatgcaagatatgtgggaaagcttttgtttatcctagtgtatgtcaaagacacgaaaagtctcacagtggagagaaaccctatgaatgcaagcagtgtgggaaagcgttatctcatagctcaagctttcgaagacatatggtaatgcatacgggagatgggccgaataaatgcaaggtatgtgggaaagcctttgtttatcccagtgtatgtcaaagacatgaaaagactcactggagagaaacaatatgaatgtaaactattataaagccttctatatttccagttccctttgatatcatgaataaacttacactggacagaaaccctataaatgtaaatgtgggaaagcctttcataatttttattcctttcaaaatcatgaaatatctcacactggagagatgctgtatgatataaggaatgtgggaaagtgatcgatttttttttaacaccattgtcaacataaaacaactcacagagcagaaaaactctgtgagtgtaaaatatgtagggaagccttcagtcattttggtaacttaaaagtacatgaggctgggcacagtggctcacgcctgtaatcccagcacttagggtgggcaaattgcttgacctcaggaatttgaggcctgcctgggcaaaatggtgaaaccatgtctctacaaaaaatagaaaaagtagcaggtgtggtggtatgcccctgtagtcccagctacttgggaggctgaggtgggaagatctcttgagcccaaggggtgggggttgcagtgagccaagatgcactgcaccccagcctgggcgacagagccagaccctgtctcaaaaaaaaaaaaaaagtacatgaaaggattcactctggagagaagtcatatgaatgtaagaaatgtagaaaagcattgagttctctcaggtccttgcatagacataaaaggactcactggagagatactctataaatgtgtgaaatgtagggaagtattctttaatgttatttcatttcagatagaaataattctcattggagataaaccctatgaatgtaaacacatagtaaagccttaattttaagcctcagtttctttcaaatacagttatcccctaatatttgcaggagcgtggttctaccaccccctgggcatacataaatcgacacatgccaagtccttttttaaaaatgacatatttggtacaaaattacccggatgtgatggcacatgcctgtaatcccagctactcaggaggctgaggcaggataatcacttgaatccgggaggcggaggttgcggtgagccaagatcgcgccactgcactccagcctgggcagcaagagcaaaacaacctctgtcacacacacaaaaaaaaaaaaaaagg

SEQ ID NO: 9137 - protein, 476 aa, Homo sapiens; identical to SEQ ID NO: 1159

SEQ ID NO: 9138 - DNA, 2085 bp, Homo sapiens
ctgtcaatcaggcgcacggctggcagtagggtgccaggttcaaagagcccgcggcgtcttcacgcccctgcgctcagctctagactcagtcgctcgctgagagacgccctggaacgtctgtgtagcctcagtcgctgagagacgccctggaacgtctgtggcagcctctgtcacagtgggacccgcactggcagcgggaggcagagggaggaccctggaacatcccggaagccgggaaatggacgcagtggcctttgaggatgtggctgtgaacttcacccaggaggaatgggctttgctgggtccatcacagaagaatttatacagatatgtgatgcaagaaaccatcaggaacctggactgtataagaatgatatgggaagaacagaatactgaagatcagtacaaaaatcctaggagaaatctaagatgtcatatggtagagagattcagtgaaagtaaagacagtagtcagtgtggagaaacatttagcctcattcgagatagtattgtgaacaacagcatttgtcctggagaagatccatgtcaaagcgctgagtgtgaagaagtcataatgggtcatttatcccttaatagccacatcagagttgattctggacacaaaccacatgagtatcaggaatatggagagaagccacatacacataaacaacgtgggaaagccttcagttaccatcactcctttcagtcgcgtggaaggcctcacactggaaagaaacgctatgagtgtaaggaatgtggaaaaaccttcagttctcgtagaaaccttcgaagacacatggtagtgcaaggtggaaatagaccttataaatttcctatcgaagacatgagagaatgcacactggggagaaaccgtatgaatgtaagcagtgttctaaagccttgcctgattccagttcctatataagacatgaaagaactcacactggagaagaaacaatatgaatgtaaactattataaagccttctatatttccagttccctttgatatcatgaataaacttacactggacagaaaccctataaatgtaaatgtgggaaagcctttcataatttttattcctttcaaaatcatgaaatatctcacactggagagatgctgtatgatataaggaatgtgggaaagtgatcgatttttttttaacaccattgtcaacataaaacaactcacagagcagaaaaactctgtgagtgtaaaatatgtagggaagccttcagtcattttggtaacttaaaagtacatgaggctgggcacagtggctcacgcctgtaatcccagcacttagggtgggcaaattgcttgacctcaggaatttgaggcctgcctgggcaaaatggtgaaaccatgtctctacaaaaaatagaaaaagtagcaggtgtggtggtatgcccctgtagtcccagctacttgggaggctgaggtgggaagatctcttgagcccaaggggtgggggttgcagtgagccaagatgcactgcaccccagcctgggcgacagagccagaccctgtctcaaaaaaaaaaaaaaagtacatgaaaggattcactctggagagaagtcatatgaatgtaagaaatgtagaaaagcattgagttctctcaggtccttgcatagacataaaaggactcactggagagatactctataaatgtgtgaaatgtagggaagtattctttaatgttatttcatttcagatagaaataattctcattggagataaaccctatgaatgtaaacacatagtaaagccttaattttaagcctcagtttctttcaaatacagttatcccctaatatttgcaggagcgtggttctaccaccccctgggcatacataaatcgacacatgccaagtccttttttaaaaatgacatatttggtacaaaattacccggatgtgatggcacatgcctgtaatcccagctactcaggaggctgaggcaggataatcacttgaatccgggaggcggaggttgcggtgagccaagatcgcgccactgcactccagcctgggcagcaagagcaaaacaacctctgtcacacacacaaaaaaaaaaaaaaagg

SEQ ID NO: 9139 - protein, 229 aa, Homo sapiens
MDAVAFEDVAVNFTQEEWALLGPSQKNLYRYVMQETIRNLDCIRMIWEEQNTEDQYKNPRRNLRCHMVERFSESKDSSQCGETFSLIRDSIVNNSICPGEDPCQSAECEEVIMGHLSLNSHIRVDSGHKPHEYQEYGEKPHTHKQRGKAFSYHHSFQSRGRPHTGKKRYECKECGKTFSSRRNLRRHMVVQGGNRPYKFPIEDMRECTLGRNRMNVSSVLKPCLIPVPI

SEQ ID NO: 9140 - DNA, 1415 bp, Homo sapiens
gaattagtgaccagagttcctcactgggatctcaggctgctgtcttcaagactggcgcagaggacgcagtggcctttgaggatgtggctgtgaacttcacccaggaggaatgggctttgctgggtccatcacagaagaatttatacagatatgtgatgcaagaaaccatcaggaacctggactgtataagaatgatatgggaagaacagaatactgaagatcagtacaaaaatcctaggagaaatctaagccacatcagagttgattctggacacaaaccacatgagtatcaggaatatggagagaagccacatacacataaacaacgtgggaaagccttcagttaccatcactcctttcagtcgcgtggaaggcctcacactggaaagaaacgctatgagtgtaaggaatgtggaaaaaccttcagttctcgtagaaaccttcgaagacacatggtagtgcaaggtggaaatagaccttataaatgtaagttgtgtgggaaagcttttttttggcccagtttattacgtatgcatgaaagaactcacactggagagaaaccgtatgaatgtaagcagtgttctaaagcctttcctttttacagttcctatcgaagacatgagagaatgcacactggggagaaaccgtatgaatgtaagcagtgttctaaagccttgcctgattccagttcctatataagacatgaaagaactcacactggagagaaaccatatacatgtaaacagtgtgggaaagccttcagtgtttccagttcccttcgaagacatgaaaccactcacagtgcagagaaaccctatgagtgtaagcaatgcgggaaaacatttcatcatcttggaagctttcagatacacatgaaaaggcacactggagatcgacctcataaatgtaagatatgtgggaaaggctttgatcgtcccagtttagttcgatatcatgaacgaattcacactggagagaaaccctatgaatgcaagcagtgtgggaaaacgttatctcatagctcaagctttcgaagacacatgataatgcacactggaggtggacctcataaatgcaagatatgtgggaaagcttttgtttatcctagtgtatgtcaaagacacgaaaagtctcacagtggagagaaaccctatgaatgcaagcagtgtgggaaagcgttatctcatagctcaagctttcgaagacatatggtaatgcatacgggagatgggccgaataaatgcaaggtatgtgggaaagcctttgtttatcccagtgtatgtcaaagacatgaaaagactcactggagagaaacaatatgaatgtaaactattataaagccttctatatttccagttccctttgatatcatgaataaacttacactggacagaaaccctataaatgtaaatgtg

SEQ ID NO: 9141 - protein, 388 aa, Homo sapiens
MQETIRNLDCIRMIWEEQNTEDQYKNPRRNLSHIRVDSGHKPHEYQEYGEKPHTHKQRGKAFSYHHSFQSRGRPHTGKKRYECKECGKTFSSRRNLRRHMVVQGGNRPYKCKLCGKAFFWPSLLRMHERTHTGEKPYECKQCSKAFPFYSSYRRHERMHTGEKPYECKQCSKALPDSSSYIRHERTHTGEKPYTCKQCGKAFSVSSSLRRHETTHSAEKPYECKQCGKTFHHLGSFQIHMKRHTGDRPHKCKICGKGFDRPSLVRYHERIHTGEKPYECKQCGKTLSHSSSFRRHMIMHTGGGPHKCKICGKAFVYPSVCQRHEKSHSGEKPYECKQCGKALSHSSSFRRHMVMHTGDGPNKCKVCGKAFVYPSVCQRHEKTHWRETI

SEQ ID NO: 9142 - DNA, 1605 bp, Homo sapiens
aacatcccggaagccgggaaatgaattagtgaccagagttcctcactgggatctcaggctgctgtcttcaagactggcgcagaggacgcagtggcctttgaggatgtggctgtgaacttcacccaggaggaatgggctttgctgggtccatcacagaagaatttatacagatatgtgatgcaagaaaccatcaggaacctggactgtataagaatgatatgggaagaacagaatactgaagatcagtacaaaaatcctaggagaaatctaagatgtcatatggtagagagattcagtgaaagtaaagacagtagtcagtgtggagaaacatttagcctcattcgagatagtattgtgaacaacagcatttgtcctggagaagatccatgtcaaagcgctgagtgtgaagaagtcataatgggtcatttatcccttaatagccacatcagagttgattctggacacaaaccacatgagtatcaggaatatggagagaagccacatacacataaacaacgtgggaaagccttcagttaccatcactcctttcagtcgcgtggaaggcctcacactggaaagaaacgctatgagtgtaaggaatgtggaaaaaccttcagttctcgtagaaaccttcgaagacacatggtagtgcaaggtggaaatagaccttataaatgtaagttgtgtgggaaagcttttttttggcccagtttattacgtatgcatgaaagaactcacactggagagaaaccgtatgaatgtaagcagtgttctaaagcctttcctttttacagttcctatcgaagacatgagagaatgcacactggggagaaaccgtatgaatgtaagcagtgttctaaagccttgcctgattccagttcctatataagacatgaaagaactcacactggagagaaaccatatacatgtaaacagtgtgggaaagccttcagtgtttccagttcccttcgaagacatgaaaccactcacagtgcagagaaaccctatgagtgtaagcaatgcgggaaaacatttcatcatcttggaagctttcagatacacatgaaaaggcacactggagatcgacctcataaatgtaagatatgtgggaaaggctttgatcgtcccagtttagttcgatatcatgaacgaattcacactggagagaaaccctatgaatgcaagcagtgtgggaaaacgttatctcatagctcaagctttcgaagacacatgataatgcacactggaggtggacctcataaatgcaagatatgtgggaaagcttttgtttatcctagtgtatgtcaaagacacgaaaagtctcacagtggagagaaaccctatgaatgcaagcagtgtgggaaagcgttatctcatagctcaagctttcgaagacatatggtaatgcatacgggagatgggccgaataaatgcaaggtatgtgggaaagcctttgtttatcccagtgtatgtcaaagacatgaaaagactcactggagagaaacaatatgaatgtaaactattataaagccttctatatttccagttccctttgatatcatgaataaacttacactggacagaaaccctataaatgtaaatgtg

SEQ ID NO: 9143 - protein, 444 aa, Homo sapiens
MQETIRNLDCIRMIWEEQNTEDQYKNPRRNLRCHMVERFSESKDSSQCGETFSLIRDSIVNNSICPGEDPCQSAECEEVIMGHLSLNSHIRVDSGHKPHEYQEYGEKPHTHKQRGKAFSYHHSFQSRGRPHTGKKRYECKECGKTFSSRRNLRRHMVVQGGNRPYKCKLCGKAFFWPSLLRMHERTHTGEKPYECKQCSKAFPFYSSYRRHERMHTGEKPYECKQCSKALPDSSSYIRHERTHTGEKPYTCKQCGKAFSVSSSLRRHETTHSAEKPYECKQCGKTFHHLGSFQIHMKRHTGDRPHKCKICGKGFDRPSLVRYHERIHTGEKPYECKQCGKTLSHSSSFRRHMIMHTGGGPHKCKICGKAFVYPSVCQRHEKSHSGEKPYECKQCGKALSHSSSFRRHMVMHTGDGPNKCKVCGKAFVYPSVCQRHEKTHWRETI

SEQ ID NO: 9144 - DNA, 2797 bp, Homo sapiens
gaagccctggcaggtcagtggcaggcactgtcacgctgagtcctatgctggcagcggggaaccttggggagaacacgggacaccgcggaagccgggaaatgattgtgcggctgtaaccggcacaggttcgcggtccgagtcactgcaccgagactccaaggcctgcagcagaaacagtttaatagggggagaggagagaagaccccagttccgcctccatgagaggtttggggatgggggtgtttaggggtctggacaggggcggctgaagtgtggggtcgctggttggtggggaagtgacaggcgaatcctgggacgggaggtgaagaaaccgcattctcctgctgagtgggttccctcgtggggttttcaccctgcttggcgccagcctttccgttggaattcaagatctgagaaagaacttgggcaactcgagcagctctccgagatcttatccccaggcacaatgcagaagccggcggtcagtgtcttctgtgacctgactctcaggaaggcggcccccgcgaggcagtggggctcaggtttccattccttggggacacacggctggtcagccagttgaatgattgtatttgggggagaagacagaagtgatctcttccttcctgactctcagactaatgaagagagaaaacaatatgattcagtagcctttgaggatgtggcggtgaacttcacccaggaagagtgggctttgctgggtccatcacagaagagtctgtacagagatgtgatgtgggaaaccattaggaacctggactgtataggaatgaaatgggaagacacaaacattgaagatcagcacagaaatcccaggaggagcctaagatgtcatatcatagagagatttagtgaaagtcgccagccagatagtactgtgaatgaaaaacctcctggagtagatccatgtaaaagcagtgtgtgtggagaaatcatgggttgttcattccttaattgctatatcacatttgatgctggacacaaaccagatgagtgtcaggaatatggagagaagccacatacacataaacaatgtgggacagccttcaattatcaccactcctttcaaacacaggaaagacctcacactggaaagaaacgctatgattgtaaggaatgtgggaaaaccttcagttcttcgggaaaccttcgaagacacataatagtacaacgtggaggtggaccttatatatgtaagttgtgtgggaaagcctttttttggcctagtttatttcgtatgcatgaaagaactcacactggagagaaaccgtatgaatgtaagcagtgttgtaaagccttccctatttacagttcctatctaagacatgaaagaacacacactggggagaaaccatatgaatgcaagcactgttccaaagccttccctgattacagttcctatgtaagacatgaaagaactcacactggagaaaaaccctataaatgtaaacgatgtggaagagccttcagtgtttccagttcccttcgaatacatgaaagaactcacactggagagaaaccctatgaatgcaagcaatgcgggaaagcatttcatcatctgggaagctttcaaagacacatgataaggcacactggagatggacctcataaatgtaagatatgtgggaaaggctttgattgtcctagttcactgcaaagtcatgaaagaactcacactggagagaaaccctatgaatgcaagcagtgtgggaaagcgttatctcatcactcaagctttcgaagtcatatgataatgcacactggagatggacctcacaaatgcaaggtatgtgggaaagccttcatttatcccagtgtatttcaaggacatgaaaggactcatactggtgagaaaccctatgaatgtaaagaatgtggtaaagccttccgtatttctagttcccttcgaagacatgaaacaactcacactggagagaaaccctataaatgtaaatgtgggaaagcctttattgatttctattcctttcaaaatcatgaaacaactcacactggagagaagccatatgagtgtaaggaatgtgggaaagcattcagttgtttcacatacctttctcaacatagaaggactcacatggctgaaaaaccttatgaatgtaaaacatgtaagaaagccttcagtcattttggtaacttaaaagtccatgaaaggattcacactggagagaagccatatgaatgtaaggaatgcaggaaagcattctcttggctcacttgccttctgcgacatgaaagaattcacactggaaagaaatcttatgaatgtcaacaatgtggtaaagccttcactcgttctcgtttccttcgaggacatgaaaaaactcacactggagagaagatgcatgaatgtaaggaatgtgggaaggcactgagttctctcagttccttgcatagacataaaaggactcactggagagatactctataaatgtggaaaagcattcattaattttatttcatttcagaaacgtgaaagaaatcacataggagataagcctcatgaatgcaaacacatggtaaagccttaagatgtttcttttgaatatggttatcccctaaccatatgcaggggattggttccagaccccctaagcatacctaaatccacagatgctgtgttccttttataaaaggacatttgcatgtaacctatccacatcctcctgcatcccataaatcatgcctagattacttaatttttcaccaacccaaagcttttgtaaaagtaaaaataaaaagtaggttactaaaatacctc

SEQ ID NO: 9145 - protein, 627 aa, Homo sapiens; identical to SEQ ID NO: 1163

SEQ ID NO: 9146 - DNA, 732 bp, Homo sapiens
cccctctgagctcccgctcctggctctgtagctgagagaagccctggcaggtcagtggcaggcactgtcacgctgagtcctatgctggcagcggggaaccttggggagaacacgggacaccgcggaagccgggaaatggaatgaaatgggaagacacaaacattgaagatcagcacagaaatcccaggaggagcctaagatgtcatatcatagagagatttagtgaaagtcgccagccagatagtactgtgaatgaaaaacctcctggagtagatccatgtaaaagcagtgtgtgtggagaaatcatgggttgttcattccttaattgctatatcacatttgatgctggacacaaaccagatgagtgtcaggaatatggagagaagccacatacacataaacaatgtgggacagccttcaattatcaccactcctttcaaacacaggaaagacctcacactggaaagaaacgctatgattgtaaggaatgtgggaaaaccttcagttcttcgggaaaccttcgaagacacataatagtacaacgtggaggtggaccttatatatgtaagttgtgtgggaaagcctttttttggcctagtttatttcgtatgcatgaaagaactcacactggagagaaaccgtatgaatgtaagcagtgttgtaaagccttccctatttacagttcctatctaagacatgaaagaacacacactggggagaaaccatatgaat

SEQ ID NO: 9147 - protein, 196 aa, Homo sapiens
MKWEDTNIEDQHRNPRRSLRCHIIERFSESRQPDSTVNEKPPGVDPCKSSVCGEIMGCSFLNCYITFDAGHKPDECQEYGEKPHTHKQCGTAFNYHHSFQTQERPHTGKKRYDCKECGKTFSSSGNLRRHIIVQRGGGPYICKLCGKAFFWPSLFRMHERTHTGEKPYECKQCCKAFPIYSSYLRHERTHTGEKPY

SEQ ID NO: 9148 - DNA, 567 bp, Homo sapiens
aatgcaaatgtcccctgggaggggtcaggtcacagcgaagggaggaagcccaccctatcaagggctgtgtctggaaccgcttcatctcgctccactcagccgtgaatgaaatgggaagacacaaacattgaagatcagcacagaaatcccaggaggagcctaagatgtcatatcatagagagatttagtgaaagtcgccagccagatagtactgtgaatgaaaaacctcctggagtagatccatgtaaaagcagtgtgtgtggagaaatcatgggttgttcattccttaattgctatatcacatttgatgctggacacaaaccagatgagtgtcaggaatatggagagaagccacatacacataaacaatgtgggacagccttcaattatcaccactcctttcaaacacaggaaagacctcacactggaaagaaacgctatgattgtaaggaatgtgggaaaaccttcagttcttcgggaaaccttcgaagacacataatagtacaacgtggaggtggaccttatatatgtaagttgtgtgggaaagcctttttttggcctagttta

SEQ ID NO: 9149 - protein, 153 aa, Homo sapiens
MKWEDTNIEDQHRNPRRSLRCHIIERFSESRQPDSTVNEKPPGVDPCKSSVCGEIMGCSFLNCYITFDAGHKPDECQEYGEKPHTHKQCGTAFNYHHSFQTQERPHTGKKRYDCKECGKTFSSSGNLRRHIIVQRGGGPYICKLCGKAFFWPS

SEQ ID NO: 9150 - DNA, 476 bp, Homo sapiens
gtcagtggcaggcactgtcacgctgagtcctatgctggcagcggggaaccttggggagaacacgggacaccgcggaagccgggaaatggattcagtagcctttgaggatgtggcggtgaacttcacccaggaagagtgggctttgctgggtccatcacagaagagtctgtacagagatgtgatgtgggaaaccattaggaacctggactgtataggaatgaaatgggaagacacaaacattgaagatcagcacagaaatcccaggaggagcctaagatgtcatatcatagagagatttagtgaaagtcgccagccagatagtactgtgaatgaaaaacctcctggagtagatccatgtaaaagcagtgtgtgtggagaaatcatgggttgttcattccttaattgctatatcacatttgatgctggacacaaaccagatgagtgtcaggaatatggagagaagccacatacacata

SEQ ID NO: 9151 - protein, 147 aa, Homo sapiens
MLAAGNLGENTGHRGSREMDSVAFEDVAVNFTQEEWALLGPSQKSLYRDVMWETIRNLDCIGMKWEDTNIEDQHRNPRRSLRCHIIERFSESRQPDSTVNEKPPGVDPCKSSVCGEIMGCSFLNCYITFDAGHKPDECQEYGEKPHT

SEQ ID NO: 9152 - DNA, 536 bp, Homo sapiens
gctcccgctcctggctctgtagctgagagaagccctggcaggtcagtggcaggcactgtcacgctgagtcctatgctggcagcggggaaccttggggagaacacgggacaccgcggaagccgggaaatggattcagtagcctttgaggatgtggcggtgaacttcacccaggaagagtgggctttgctgggtccatcacagaagagtctgtacagagatgtgatgtgggaaaccattaggaacctggactgtataggaatgaaatgggaagacacaaacattgaagatcagcacagaaatcccaggaggagcctaaggtaatttgcactcacaagagaaagacatatatctgtggagcaattcttaggatgacaggaaattatacaactaggcaaagaaaatgaacgagcccagtacaaacttatttattcctatacaattttctccagaaacatatacttaaatgtgatataactattcagtgtttgcaaaaatagttcccttagaaacaatattaagaattcggctgggcacgg

SEQ ID NO: 9153 - protein, 82 aa, Homo sapiens
MLAAGNLGENTGHRGSREMDSVAFEDVAVNFTQEEWALLGPSQKSLYRDVMWETIRNLDCIGMKWEDTNIEDQHRNPRRSLR

SEQ ID NO: 9154 - DNA, 2592 bp, Homo sapiens
actgtcaatcaggcgcgcttcccagaggagtgtgtggttgaaaaagcccgcggcgtcttctccacccacctgcgctgggcgctcggtgctcggctctgtagctaagagacgacctggaagttccgtggcagcctgtgtcccgcgggaacccgcattggcagcgggagccgtccggaggacctgggacaccgcggaagtcgggaaatggactcagttgcctttgaggatgtggctgtgaacttcacccaggaagagtgggctttgctgggtccttgccagaagaatctctacgaagatgtgatgcaggaaaccatcaggaacctggactgtgtaggaatgaaatgagaagaccagatcagggaagatcaatacgaaagtcacaggataaatgtaagatgcgatatggtagagcgcttcggtgaaagtaaagacagtagtcattgtggagaaacatctagccagattggagatactgttgtgaacaagcacatgcctcctggagtaggtccacgtgaaaacaatgagtggagaagtcgtcacgggtctttcatcccttcattgccacatcagagttgatgctgggcacaaaccacatgagtatcaggaatatggagagaagcgtaatacacgtaaacaattttggaaaaccttcagttattgccactcgtttcaaacccacaaaatttctcacacaggacacaaaccatatgattgtaaggaatgtaggaagtccttcaattctttgggaaaccttcaaagacacatggcagtgcagcatggagatggaccttataaatgtaagttgtgtgggaaagcatttttctggcccagtttatttcgtatgcatgaaagaactcactctggagagaaactatatgaatgtaagcagtgttctaaagcctttcatttttacagttcttatctaagacatgaaagaacacgtactggggagaaactgtatgaatgtaagcagtgttctaaagccttccctgattacagttcttgtctaagacatgaaaaaactcacactggagagaaactctgtacatgtaaacaatgtgggaaagccttcagtgcttccacttcccttcaaagacgtgaaaccactcacagtgcagagaaaccccatgaatgtaagcaatgtgggaaagcatttgatcatctgggaagcttccaaagacacatgataaggcacactagagatggacctcataaatgtaagatatgtgggaaaggctttgattgttccagtacactgcaaagtcatgaaagaactcacactggagagaagaaactctatgaatgcaagcagtgtgggaaagcgttatctcatagctcaagctttcgaagacacatgacaatgcacactggagatggacctcacaaaatgcaagatatgtgggaaagcctttgtttatttcattggatttcaaagacatgaaaggactcacactagggagaaaatctataaatgtaaatgtgggaaagcctttagtgatctttattcccttcaaaatcatgagacaactcatatgggagagaagccatatgaatgtaaataatgtgggaaagcatttggttgtttccagtacctttctcttcataaaaaaatcatacagcagaaaaaccttatgagtgtcaaacatgtagaaaagccttcagtcattttggtcacttaaagcaacatgaaaggattcacactggagagaagccgtatgaatgtaaggaatgcaggaaagcattctcttggctcacttgccttctacaacatgaaagaattcacactcgagagaaaccttatgaaggtaaacaatgtggtaaagccttcactcattcccgtttccttcaaggacatgaaagaactcataccgcaaagaagctatgtgaatgtaaggaatgtggaaaagcattgagttctctcagctccttgcacagacacaaaaggactcattggaaagatactctataaatgtgtggaatgtgggaaagcattcattaattttattttacctgagaaaattaaacaaatcacattggaaataaactctatggcttgggcacggtggctcatgcctgtaatccctaacactttgggaggccgaggtgggcggatcacgaggtcaggagatcaagaccatcctggccaacatggtgaaaccctgtctctactaaaatacaaaaacttagccaggcatggtggtgcgcacctgtagtcccagctactctggaggctgaggcaggggaatggctcgaacacaggagacggagattgcagtgagctgagatggcgccactgcactccagcctggcaacagagtgagactccatctcaaaaaaaataaaaaaaaagaaaaagaaataaactctatgaatgtaaaccatgtggtgaaggcttaagtgatttcagtttatttcaaatacagttttcccctgacatatgcaggggattaattccagcagtccctgatcatacctaaatccacacatgccaagtttcttttataaaattacatatttgcatgttatctacccacatctccctgtacactctaagtcatctctggattaaatacctcatgcattgtaaaaact

SEQ ID NO: 9155 - protein, 46 aa, Homo sapiens
MDSVAFEDVAVNFTQEEWALLGPCQKNLYEDVMQETIRNLDCVGMK

SEQ ID NO: 9156 - DNA, 1475 bp, Homo sapiens
ttacagttcttatctaagacatgaaagaacacgtactggggagaaactgtatgaatgtaagcagtgttctaaagccttccctgattacagttcttgtctaagacatgaaaaaactcacactggagagaaactctcataaatgtaagatatgtgggaaaggctttgattgttccagtacactgcaaagtcatgaaagaactcacactggagagaagaaactctatgaatgcaagcagtgtgggaaagcgttatctcatagctcaagctttcgaagacacatgacaatgcacactggagatggacctcacaaaatgcaagatatgtgggaaagcctttgtttatttcattggatttcaaagacatgaaaggactcacactagggagaaaatctataaatgtaaatgtgggaaagcctttagtgatctttattcccttcaaaatcatgagacaactcatatgggagagaagccatatgaatgtaaataatgtgggaaagcatttggttgtttccagtacctttctcttcataaaaaaatcatacagcagaaaaaccttatgagtgtcaaacatgtagaaaagccttcagtcattttggtcacttaaagcaacatgaaaggattcacactggagagaagccgtatgaatgtaaggaatgcaggaaagcattctcttggctcacttgccttctacaacatgaaagaattcacactcgagagaaaccttatgaaggtaaacaatgtggtaaagccttcactcattcccgtttccttcaaggacatgaaagaactcataccgcaaagaagctatgtgaatgtaaggaatgtggaaaagcattgagttctctcagctccttgcacagacacaaaaggactcattggaaagatactctataaatgtgtggaatgtgggaaagcattcattaattttattttacctgagaaaattaaacaaatcacattggaaataaactctatggcttgggcacggtggctcatgcctgtaatccctaacactttgggaggccgaggtgggcggatcacgaggtcaggagatcaagaccatcctggccaacatggtgaaaccctgtctctactaaaatacaaaaacttagccaggcatggtggtgcgcacctgtagtcccagctactctggaggctgaggcaggggaatggctcgaacacaggagacggagattgcagtgagctgagatggcgccactgcactccagcctggcaacagagtgagactccatctcaaaaaaaataaaaaaaaagaaaaagaaataaactctatgaatgtaaaccatgtggtgaaggcttaagtgatttcagtttatttcaaatacagttttcccctgacatatgcaggggattaattccagcagtccctgatcatacctaaatccacacatgccaagtttcttttataaaattacatatttgcatgttatctacccacatctccctgtacactct

SEQ ID NO: 9157 - protein, 86 aa, Homo sapiens
MKKLTLERNSHKCKICGKGFDCSSTLQSHERTHTGEKKLYECKQCGKALSHSSSFRRHMTMHTGDGPHKMQDMWESLCLFHWISKT

SEQ ID NO: 9158 - DNA, 4538 bp, Homo sapiens
agtccttatacagattggaaaatgcaaggcaataatttgcaaataagatctgatatgctgtctctagaattagtgtccagggttctataccgggaactcaggctgctgtgttcaagactggtattgatagggggagggattgggccaaggacaaataaaagctccacaagacttttctaccagttttcatttttctttatatatatatttatctctctgttaatagtacggggtgccaaataaaatcctttatttgtttttggaatgctgcactttcttggtgagaaggctttcagcattttttagatactgtgagttctattagatttggtaatgtaatttttgttgactactaaaagatttgttttagtttcttagtaagtattataaatattcatgagagatgacactgagttctttctaagaatatgtgcagtctttccccttctttctttcccctttggcgttactcaaaatgtttaaaatttttcctttgaggtggtgtaatatcttttctcagtctgttgtcatacttcagtacatttgatctaaaggaaactagttgccagcttccaaatattctctgtaagtataatcacataggatgggctaaatcccccaaataacaagttgcaacaaaacgtgaaatgttatctacccagaaagttcattatagacccaatgcccagagtgtttctttgtagctgtcttagcctgtttcttgttattcataacagaattactgaacctcggtaatttataagaaacagtatttaatttttacatttctggaggctgggaagtccaaggttaaggctgggcatctggtgagaaccttcttgctggtggggactctgcagagtccctaggcggcatagagtatcacatggtgagggagctgagtgtctagctcagatctcttactcttctcagaaggacatgagatagctcatttattcattcacccgttacggattaatctattcatgaggtccaaacccttaggactacatcacctcttaaacctcacttttttttttttactgccactttggagattaacattcagtgtgcattttggaggggacaaccattcaaacctagcagtggctgatcaggtgcactccctgtgctgagtatgtaacaaaattccaaactctcagaaggaagatggggttaaggaaatactgtattttttttgcgtaaacaatttaggcacactccacccctattattagttacgctcctggggccctcccctaaatacactgtctagataccatgaaaagcccaactttgtgaaaaagcatttgtaaggacacacagtctcagcactgctaatggtaactcccttttgcacaataagtagtaggactttatcgtgccaaggactgcagacccactgtggaaatcaacattaggggtgatccaggctatgtgattcactcactcagttcgccaacaagtggcatgtttctatcccactgttaatttaccaaacatgtttaactgtagcttcagagttactgtgtaggagaaagtgagtgtagacagagaataagagtgggtttaccatgtcattgaataaaatggttggaaaccacagcatcatgtgaaatttatgaagtgagtatagattctcagtactgtgattttcacccttcctcctctgtacatgtgggatggatcaggcctcagtggctttagaggatgtggctgtgaacttcacccgagaagagtgggctttgctgggtccttgtcagaagaatctctacaaagatgtgatgcaggaaaccatcaggaacctggattgtgtaggaatgaaatggaaagaccagaacattgaagatcaatatagatatcccaggaaaaatctaagatgtcgtatgttagagagatttgttgaaagtaaagatggaactcaatgtggagaaacatctagccagattcaagatagtattgtgaccaagaacactcttcctggagtaggtccatatgaaagccgtatgagtggagaagtcatcatgggtcattcatcccttaattgttacatcagagttggtgctgggcacaaaccatatgagtatcatgaatgtggagagaagccagatacgcataaacaacgtgggaaagccttcagttaccacaactcacttcaaacacatgagaggcttcacactggaaagaaaccatataattgtaaagaatgtgggaagtccttcagttctttgggaaaccttcaaagacacatggcagtgcagcgtggagatggaccttataaatgtaagttgtgtgggaaagcgtttttttggcccagtttattacatatgcatgagagaacgcacactggagagaaaccatatgaatgtaagcagtgttctaaagccttttctttttacagttcctatctaagacatgaaagaacacatactggggagaaactgtatgaatgtaaacagtgttctaaagccttccctgattacagttcttgtctaagacatgaaagaactcacactggaaagaaaccctatacatgtaaacaatgtgggaaagccttcagtgcttccacttcccttcgaagacacgaaacaactcacactgatgagaaaccctatgcatgtcagcaatgtgggaaagcgtttcatcatctgggaagctttcaaagacacatggtaatgcacacgagagatggacctcataagtgtaagatatgtggaaaaggctttgattgtcctagttcactgaaaagtcatgaaagaactcacactggagagaaactctatgaatgcaagcagtgtgggaaagcgttatctcatagctcaagctttcgaagacacatgacaatgcacactggagatggacctcacaaatgcaagatatgtgggaaagcctttgtttatcccagtgtatttcaaaggcatgaaaagactcacactgcagagaaaccctataaatgtaaacaatgtggcaaagcctaccgtatttccagttctcttcgaaggcatgaaacaactcatactggagagaaaccctataaatgcaaatgtgggaaagcctttattgatttctattcctttcaaaatcacaaaacaactcatgctggagagaagccatatgagtgtaaggaatgtgggaaagcattcagttgtttccaatacctttctcaacatagaaggactcacacaggagagaaaccttatgagtgtaacacatgtaagaaagccttcagtcattttggtaacttaaaagtacatgaaagaattcactctggagagaagccgtatgaatgtaaggaatgtgggaaagcattctcttggctcacttgctttctacgacatgaaagaattcacatgagagagaaaccctatgagtgtcaacaatgtggtaaagccttcactcattcccgttttcttcaaggacatgaaaaaactcatactggagagaacccgtatgaatgtaaggaatgtgggaaagcatttgcttctctcagttccttgcatagacataaaaagactcactggaaaaaaactcacactggagagaacccgtatggatgtaaggaatgtgggaaagcatttgcttctctcagttccttgcatagacataaaaagactcactagcattctctctaaatgtatggaatgtgggaaagcatttattaattttatttcatttcagatacttgtacgaaacacattggagatagaccctgtgaatgtaagcacttggtaaaaccttaagtaatttcagtttctttccagtacagtcatcccttgatacctgctgggtattggttccagcactccgtgagccatgtccagtcccttttataaaatgacatatttgtatgtaacttacccacatcctcttgtatactctcaattatgtctagattacttaaaatacctcatgcattgtaaaagctatgcaaatagttgttctattgtattgtttagggactcatgataaggaaaagagtctatgtattttcagtatagatgcagtaattgtcagcctatcaacatagtatagtcagccagaacattaaagtttctttgtttcaactctcacatattgcttttgtttaatgtgttaacacttaccaaaaccctgggtcttctctcttgataacccaagtatagtgattataacgatgatgattctgtggtgcccagtgttttgatgtgttgagatgactagatgtatggcattgtgggtaagtagtgagacatcaggttaacttgaatcttgacaggccatcaggactatcatctatgttggaagaaccaacttgtgattatagatgtggactcatttgaggaggctatgtaatactaatgttaggatctgtttggcttgagggctgaagatctgtaaccattgaatgttccatcttctttgcagatgcttagttataggaagctagttcttcttttcctttgcttcattaaaaaaaaaatcttgcagtgtttataggcatgttgttatttctcgggtggagtgaaagctttgttccattgtaggatctttgaggatcg

SEQ ID NO: 9159 - protein, 645 aa, Homo sapiens
MDQASVALEDVAVNFTREEWALLGPCQKNLYKDVMQETIRNLDCVGMKWKDQNIEDQYRYPRKNLRCRMLERFVESKDGTQCGETSSQIQDSIVTKNTLPGVGPYESRMSGEVIMGHSSLNCYIRVGAGHKPYEYHECGEKPDTHKQRGKAFSYHNSLQTHERLHTGKKPYNCKECGKSFSSLGNLQRHMAVQRGDGPYKCKLCGKAFFWPSLLHMHERTHTGEKPYECKQCSKAFSFYSSYLRHERTHTGEKLYECKQCSKAFPDYSSCLRHERTHTGKKPYTCKQCGKAFSASTSLRRHETTHTDEKPYACQQCGKAFHHLGSFQRHMVMHTRDGPHKCKICGKGFDCPSSLKSHERTHTGEKLYECKQCGKALSHSSSFRRHMTMHTGDGPHKCKICGKAFVYPSVFQRHEKTHTAEKPYKCKQCGKAYRISSSLRRHETTHTGEKPYKCKCGKAFIDFYSFQNHKTTHAGEKPYECKECGKAFSCFQYLSQHRRTHTGEKPYECNTCKKAFSHFGNLKVHERIHSGEKPYECKECGKAFSWLTCFLRHERIHMREKPYECQQCGKAFTHSRFLQGHEKTHTGENPYECKECGKAFASLSSLHRHKKTHWKKTHTGENPYGCKECGKAFASLSSLHRHKKTH

SEQ ID NO: 9160 - DNA, 3504 bp, Homo sapiens
aagggctactccgggatctacggacccgggttcccctggcgtaggtcggccctcggccgcagggtggggctgggcatgcagccgggaccccgggcgtcctgtcccgttcctgcgcggcgactgcggccccggcgccctctctgggcagctccgcgcccgcagcctcgcgtctcccgagattgtgcggctgtaagcaacacaggttcgcggcccgactcactgcaccgagacgctgagggctgcagcagaaacagtttaatagccagagaggggaggacaccccagatccgcctccctgagggatttggggtctggacgggggcggctgggtgtagggtcgttggttggtggggaagtgaggggtgaatcctgggacaggaggtgaagaaaccgcattctgctgaatgggctccctcgttgggacttcaacctgattggcgccagcctttgctgggattcaggatctgagaactccggcgactcttgagcagttctcagagatcttatccccaggcacaatggggaagccggcggtcagcgtctgctgtgacctgactctcagggaggcggccccttgaggcagcggggctgagggcacctggttaatatctaactgcaatctcgcctccagcctggctcgcagttcctgtgaacccggcctcagtggctttagaggatgtggctgtgaacttcacccgagaagagtgggctttgctgggtccttgtcagaagaatctctacaaagatgtgatgcaggaaaccatcaggaacctggattgtgtaggaatgaaatggaaagaccagaacattgaagatcaatatagatatcccaggaaaaatctaagatgtcgtatgttagagagatttgttgaaagtaaagatggaactcaatgtggagaaacatctagccagattcaagatagtattgtgaccaagaacactcttcctggagtaggtccatatgaaagccgtatgagtggagaagtcatcatgggtcattcatcccttaattgttacatcagagttggtgctgggcacaaaccatatgagtatcatgaatgtggagagaagccagatacgcataaacaacgtgggaaagccttcagttaccacaactcacttcaaacacatgagaggcttcacactggaaagaaaccatataattgtaaagaatgtgggaagtccttcagttctttgggaaaccttcaaagacacatggcagtgcagcgtggagatggaccttataaatgtaagttgtgtgggaaagcgtttttttggcccagtttattacatatgcatgagagaacgcacactggagagaaaccatatgaatgtaagcagtgttctaaagccttttctttttacagttcctatctaagacatgaaagaacacatactggggagaaactgtatgaatgtaaacagtgttctaaagccttccctgattacagttcttgtctaagacatgaaagaactcacactggaaagaaaccctatacatgtaaacaatgtgggaaagccttcagtgcttccacttcccttcgaagacacgaaacaactcacactgatgagaaaccctatgcatgtcagcaatgtgggaaagcgtttcatcatctgggaagctttcaaagacacatggtaatgcacacgagagatggacctcataagtgtaagatatgtggaaaaggctttgattgtcctagttcactgaaaagtcatgaaagaactcacactggagagaaactctatgaatgcaagcagtgtgggaaagcgttatctcatagctcaagctttcgaagacacatgacaatgcacactggagatggacctcacaaatgcaagatatgtgggaaagcctttgtttatcccagtgtatttcaaaggcatgaaaagactcacactgcagagaaaccctataaatgtaaacaatgtggcaaagcctaccgtatttccagttctcttcgaaggcatgaaacaactcatactggagagaaaccctataaatgcaaatgtgggaaagcctttattgatttctattcctttcaaaatcacaaaacaactcatgctggagagaagccatatgagtgtaaggaatgtgggaaagcattcagttgtttccaatacctttctcaacatagaaggactcacacaggagagaaaccttatgagtgtaacacatgtaagaaagccttcagtcattttggtaacttaaaagtacatgaaagaattcactctggagagaagccgtatgaatgtaaggaatgtgggaaagcattctcttggctcacttgctttctacgacatgaaagaattcacatgagagagaaaccctatgagtgtcaacaatgtggtaaagccttcactcattcccgttttcttcaaggacatgaaaaaactcatactggagagaacccgtatgaatgtaaggaatgtgggaaagcatttgcttctctcagttccttgcatagacataaaaagactcactggaaaaaaactcacactggagagaacccgtatggatgtaaggaatgtgggaaagcatttgcttctctcagttccttgcatagacataaaaagactcactagcattctctctaaatgtatggaatgtgggaaagcatttattaattttatttcatttcagatacttgtacgaaacacattggagatagaccctgtgaatgtaagcacttggtaaaaccttaagtaatttcagtttctttccagtacagtcatcccttgatacctgctgggtattggttccagcactccgtgagccatgtccagtcccttttataaaatgacatatttgtatgtaacttacccacatcctcttgtatactctcaattatgtctagattacttaaaatacctcatgcattgtaaaagctatgcaaatagttgttctattgtattgtttagggactcatgataaggaaaagagtctatgtattttcagtatagatgcagtaattgtcagcctatcaacatagtatagtcagccagaacattaaagtttctttgtttcaactctcacatattgcttttgtttaatgtgttaacacttaccaaaaccctgggtcttctctcttgataacccaagtatagtgattataacgatgatgattctgtggtgcccagtgttttgatgtgttgagatgactagatgtatggcattgtgggtaagtagtgagacatcaggttaacttgaatcttgacaggccatcaggactatcatctatgttggaagaaccaacttgtgattatagatgtggactcatttgaggaggctatgtaatactaatgttaggatctgtttggcttgagggctgaagatctgtaaccattgaatgttccatcttctttgcagatgcttagttataggaagctagttcttcttttcctttgcttcattaaaaaaaaaatcttgcagtgtttataggcatgttgttatttctcgggtggagtgaaagctttgttccattgtaggatctttgaggatcg

SEQ ID NO: 9161 - protein, 611 aa, Homo sapiens
MQETIRNLDCVGMKWKDQNIEDQYRYPRKNLRCRMLERFVESKDGTQCGETSSQIQDSIVTKNTLPGVGPYESRMSGEVIMGHSSLNCYIRVGAGHKPYEYHECGEKPDTHKQRGKAFSYHNSLQTHERLHTGKKPYNCKECGKSFSSLGNLQRHMAVQRGDGPYKCKLCGKAFFWPSLLHMHERTHTGEKPYECKQCSKAFSFYSSYLRHERTHTGEKLYECKQCSKAFPDYSSCLRHERTHTGKKPYTCKQCGKAFSASTSLRRHETTHTDEKPYACQQCGKAFHHLGSFQRHMVMHTRDGPHKCKICGKGFDCPSSLKSHERTHTGEKLYECKQCGKALSHSSSFRRHMTMHTGDGPHKCKICGKAFVYPSVFQRHEKTHTAEKPYKCKQCGKAYRISSSLRRHETTHTGEKPYKCKCGKAFIDFYSFQNHKTTHAGEKPYECKECGKAFSCFQYLSQHRRTHTGEKPYECNTCKKAFSHFGNLKVHERIHSGEKPYECKECGKAFSWLTCFLRHERIHMREKPYECQQCGKAFTHSRFLQGHEKTHTGENPYECKECGKAFASLSSLHRHKKTHWKKTHTGENPYGCKECGKAFASLSSLHRHKKTH

SEQ ID NO: 9162 - DNA, 3166 bp, Homo sapiens
aatcaggcgcgcttcccagaggagtgtgtggttgaaaaagcccgcggcgtcttctccacccacctgcgctgggcgctcggtgctcggctctgtagctaagagacgacctggaagttccgtggcagcctgtgtcccgcgggaacccgcattggcagcgggagccgtccggaggacctgggacaccgcggaagtcgggaaatgcgtctcactctgttgtccaggctggagtgcagtggcacgatctcagctcactgcaacctccgcctcctgcgttcaagcgattctcctgcctcagcctcccgagtagctgggactacaggcctcagtggctttagaggatgtggctgtgaacttcacccgagaagagtgggctttgctgggtccttgtcagaagaatctctacaaagatgtgatgcaggaaaccatcaggaacctggattgtgtaggaatgaaatggaaagaccagaacattgaagatcaatatagatatcccaggaaaaatctaagatgtcgtatgttagagagatttgttgaaagtaaagatggaactcaatgtggagaaacatctagccagattcaagatagtattgtgaccaagaacactcttcctggagtaggtccatatgaaagccgtatgagtggagaagtcatcatgggtcattcatcccttaattgttacatcagagttggtgctgggcacaaaccatatgagtatcatgaatgtggagagaagccagatacgcataaacaacgtgggaaagccttcagttaccacaactcacttcaaacacatgagaggcttcacactggaaagaaaccatataattgtaaagaatgtgggaagtccttcagttctttgggaaaccttcaaagacacatggcagtgcagcgtggagatggaccttataaatgtaagttgtgtgggaaagcgtttttttggcccagtttattacatatgcatgagagaacgcacactggagagaaaccatatgaatgtaagcagtgttctaaagccttttctttttacagttcctatctaagacatgaaagaacacatactggggagaaactgtatgaatgtaaacagtgttctaaagccttccctgattacagttcttgtctaagacatgaaagaactcacactggaaagaaaccctatacatgtaaacaatgtgggaaagccttcagtgcttccacttcccttcgaagacacgaaacaactcacactgatgagaaaccctatgcatgtcagcaatgtgggaaagcgtttcatcatctgggaagctttcaaagacacatggtaatgcacacgagagatggacctcataagtgtaagatatgtggaaaaggctttgattgtcctagttcactgaaaagtcatgaaagaactcacactggagagaaactctatgaatgcaagcagtgtgggaaagcgttatctcatagctcaagctttcgaagacacatgacaatgcacactggagatggacctcacaaatgcaagatatgtgggaaagcctttgtttatcccagtgtatttcaaaggcatgaaaagactcacactgcagagaaaccctataaatgtaaacaatgtggcaaagcctaccgtatttccagttctcttcgaaggcatgaaacaactcatactggagagaaaccctataaatgcaaatgtgggaaagcctttattgatttctattcctttcaaaatcacaaaacaactcatgctggagagaagccatatgagtgtaaggaatgtgggaaagcattcagttgtttccaatacctttctcaacatagaaggactcacacaggagagaaaccttatgagtgtaacacatgtaagaaagccttcagtcattttggtaacttaaaagtacatgaaagaattcactctggagagaagccgtatgaatgtaaggaatgtgggaaagcattctcttggctcacttgctttctacgacatgaaagaattcacatgagagagaaaccctatgagtgtcaacaatgtggtaaagccttcactcattcccgttttcttcaaggacatgaaaaaactcatactggagagaacccgtatgaatgtaaggaatgtgggaaagcatttgcttctctcagttccttgcatagacataaaaagactcactggaaaaaaactcacactggagagaacccgtatggatgtaaggaatgtgggaaagcatttgcttctctcagttccttgcatagacataaaaagactcactagcattctctctaaatgtatggaatgtgggaaagcatttattaattttatttcatttcagatacttgtacgaaacacattggagatagaccctgtgaatgtaagcacttggtaaaaccttaagtaatttcagtttctttccagtacagtcatcccttgatacctgctgggtattggttccagcactccgtgagccatgtccagtcccttttataaaatgacatatttgtatgtaacttacccacatcctcttgtatactctcaattatgtctagattacttaaaatacctcatgcattgtaaaagctatgcaaatagttgttctattgtattgtttagggactcatgataaggaaaagagtctatgtattttcagtatagatgcagtaattgtcagcctatcaacatagtatagtcagccagaacattaaagtttctttgtttcaactctcacatattgcttttgtttaatgtgttaacacttaccaaaaccctgggtcttctctcttgataacccaagtatagtgattataacgatgatgattctgtggtgcccagtgttttgatgtgttgagatgactagatgtatggcattgtgggtaagtagtgagacatcaggttaacttgaatcttgacaggccatcaggactatcatctatgttggaagaaccaacttgtgattatagatgtggactcatttgaggaggctatgtaatactaatgttaggatctgtttggcttgagggctgaagatctgtaaccattgaatgttccatcttctttgcagatgcttagttataggaagctagttcttcttttcctttgcttcattaaaaaaaaaatcttgcagtgtttataggcatgttgttatttctcgggtggagtgaaagctttgttccattgtaggatctttgaggatcg

SEQ ID NO: 9163 - protein, 611 aa, Homo sapiens; identical to SEQ ID NO: 9161

SEQ ID NO: 9164 - DNA, 3051 bp, Homo sapiens
gtcaatcaggcgcgcttcccagaggagtgtgtggttgaaaaagcccgcggcgtcttctccacccacctgcgctgggcgctcggtgctcggctctgtagctaagagacgacctggaagttccgtggcagcctgtgtcccgcgggaacccgcattggcagcgggagccgtccggaggacctgggacaccgcggaagtcgggaaatggcctcagtggctttagaggatgtggctgtgaacttcacccgagaagagtgggctttgctgggtccttgtcagaagaatctctacaaagatgtgatgcaggaaaccatcaggaacctggattgtgtaggaatgaaatggaaagaccagaacattgaagatcaatatagatatcccaggaaaaatctaagatgtcgtatgttagagagatttgttgaaagtaaagatggaactcaatgtggagaaacatctagccagattcaagatagtattgtgaccaagaacactcttcctggagtaggtccatatgaaagccgtatgagtggagaagtcatcatgggtcattcatcccttaattgttacatcagagttggtgctgggcacaaaccatatgagtatcatgaatgtggagagaagccagatacgcataaacaacgtgggaaagccttcagttaccacaactcacttcaaacacatgagaggcttcacactggaaagaaaccatataattgtaaagaatgtgggaagtccttcagttctttgggaaaccttcaaagacacatggcagtgcagcgtggagatggaccttataaatgtaagttgtgtgggaaagcgtttttttggcccagtttattacatatgcatgagagaacgcacactggagagaaaccatatgaatgtaagcagtgttctaaagccttttctttttacagttcctatctaagacatgaaagaacacatactggggagaaactgtatgaatgtaaacagtgttctaaagccttccctgattacagttcttgtctaagacatgaaagaactcacactggaaagaaaccctatacatgtaaacaatgtgggaaagccttcagtgcttccacttcccttcgaagacacgaaacaactcacactgatgagaaaccctatgcatgtcagcaatgtgggaaagcgtttcatcatctgggaagctttcaaagacacatggtaatgcacacgagagatggacctcataagtgtaagatatgtggaaaaggctttgattgtcctagttcactgaaaagtcatgaaagaactcacactggagagaaactctatgaatgcaagcagtgtgggaaagcgttatctcatagctcaagctttcgaagacacatgacaatgcacactggagatggacctcacaaatgcaagatatgtgggaaagcctttgtttatcccagtgtatttcaaaggcatgaaaagactcacactgcagagaaaccctataaatgtaaacaatgtggcaaagcctaccgtatttccagttctcttcgaaggcatgaaacaactcatactggagagaaaccctataaatgcaaatgtgggaaagcctttattgatttctattcctttcaaaatcacaaaacaactcatgctggagagaagccatatgagtgtaaggaatgtgggaaagcattcagttgtttccaatacctttctcaacatagaaggactcacacaggagagaaaccttatgagtgtaacacatgtaagaaagccttcagtcattttggtaacttaaaagtacatgaaagaattcactctggagagaagccgtatgaatgtaaggaatgtgggaaagcattctcttggctcacttgctttctacgacatgaaagaattcacatgagagagaaaccctatgagtgtcaacaatgtggtaaagccttcactcattcccgttttcttcaaggacatgaaaaaactcatactggagagaacccgtatgaatgtaaggaatgtgggaaagcatttgcttctctcagttccttgcatagacataaaaagactcactggaaaaaaactcacactggagagaacccgtatggatgtaaggaatgtgggaaagcatttgcttctctcagttccttgcatagacataaaaagactcactagcattctctctaaatgtatggaatgtgggaaagcatttattaattttatttcatttcagatacttgtacgaaacacattggagatagaccctgtgaatgtaagcacttggtaaaaccttaagtaatttcagtttctttccagtacagtcatcccttgatacctgctgggtattggttccagcactccgtgagccatgtccagtcccttttataaaatgacatatttgtatgtaacttacccacatcctcttgtatactctcaattatgtctagattacttaaaatacctcatgcattgtaaaagctatgcaaatagttgttctattgtattgtttagggactcatgataaggaaaagagtctatgtattttcagtatagatgcagtaattgtcagcctatcaacatagtatagtcagccagaacattaaagtttctttgtttcaactctcacatattgcttttgtttaatgtgttaacacttaccaaaaccctgggtcttctctcttgataacccaagtatagtgattataacgatgatgattctgtggtgcccagtgttttgatgtgttgagatgactagatgtatggcattgtgggtaagtagtgagacatcaggttaacttgaatcttgacaggccatcaggactatcatctatgttggaagaaccaacttgtgattatagatgtggactcatttgaggaggctatgtaatactaatgttaggatctgtttggcttgagggctgaagatctgtaaccattgaatgttccatcttctttgcagatgcttagttataggaagctagttcttcttttcctttgcttcattaaaaaaaaaatcttgcagtgtttataggcatgttgttatttctcgggtggagtgaaagctttgttccattgtaggatctttgaggatcg

SEQ ID NO: 9165 - protein, 643 aa, Homo sapiens
MASVALEDVAVNFTREEWALLGPCQKNLYKDVMQETIRNLDCVGMKWKDQNIEDQYRYPRKNLRCRMLERFVESKDGTQCGETSSQIQDSIVTKNTLPGVGPYESRMSGEVIMGHSSLNCYIRVGAGHKPYEYHECGEKPDTHKQRGKAFSYHNSLQTHERLHTGKKPYNCKECGKSFSSLGNLQRHMAVQRGDGPYKCKLCGKAFFWPSLLHMHERTHTGEKPYECKQCSKAFSFYSSYLRHERTHTGEKLYECKQCSKAFPDYSSCLRHERTHTGKKPYTCKQCGKAFSASTSLRRHETTHTDEKPYACQQCGKAFHHLGSFQRHMVMHTRDGPHKCKICGKGFDCPSSLKSHERTHTGEKLYECKQCGKALSHSSSFRRHMTMHTGDGPHKCKICGKAFVYPSVFQRHEKTHTAEKPYKCKQCGKAYRISSSLRRHETTHTGEKPYKCKCGKAFIDFYSFQNHKTTHAGEKPYECKECGKAFSCFQYLSQHRRTHTGEKPYECNTCKKAFSHFGNLKVHERIHSGEKPYECKECGKAFSWLTCFLRHERIHMREKPYECQQCGKAFTHSRFLQGHEKTHTGENPYECKECGKAFASLSSLHRHKKTHWKKTHTGENPYGCKECGKAFASLSSLHRHKKTH

SEQ ID NO: 9166 - DNA, 4075 bp, Homo sapiens
cgggatagtccttatacagattggaaaatgcaaggcaataatttgcaaataagatctgatatgctgtctctagaattagtgtccagggttctataccgggaactcaggctgctgtgttcaagactggtattgatagggggagggattgggccaaggacaaataaaagctccacaagacttttctaccagttttcatttttctttatatatatatttatctctctgttaatagtacggggtgccaaataaaatcctttatttgtttttggaatgctgcactttcttggtgagaaggctttcagcattttttagatactgtgagttctattagatttggtaatgtaatttttgttgactactaaaagatttgttttagtttcttagtaagtattataaatattcatgagagatgacactgagttctttctaagaatatgtgcagtctttccccttctttctttcccctttggcgttactcaaaatgtttaaaatttttcctttgaggtggtgtaatatcttttctcagtctgttgtcatacttcagtacatttgatctaaaggaaactagttgccagcttccaaatattctctgtaagtataatcacataggatgggctaaatcccccaaataacaagttgcaacaaaacgtgaaatgttatctacccagaaagttcattatagacccaatgcccagagtgtttctttgtagctgtcttagcctgtttcttgttattcataacagaattactgaacctcggtaatttataagaaacagtatttaatttttacatttctggaggctgggaagtccaaggttaaggctgggcatctggtgagaaccttcttgctggtggggactctgcagagtccctaggcggcatagagtatcacatggtgagggagctgagtgtctagctcagatctcttactcttctcagaaggacatgagatagctcatttattcattcacccgttacggattaatctattcatgaggtccaaacccttaggactacatcacctcttaaacctcacttttttttttttactgccactttggagattaacattcagtgtgcattttggaggggacaaccattcaaacctagcagtggctgatcaggtgcactccctgtgctgagtatgtaacaaaattccaaactctcagaaggaagatggggttaaggaaatactgtattttttttgcgtaaacaatttaggcacactccacccctattattagttacgctcctggggccctcccctaaatacactgtctagataccatgaaaagcccaactttgtgaaaaagcatttgtaaggacacacagtctcagcactgctaatggtaactcccttttgcacaataagtagtaggactttatcgtgccaaggactgcagacccactgtggaaatcaacattaggggtgatccaggctatgtgattcactcactcagttcgccaacaagtggcatgtttctatcccactgttaatttaccaaacatgtttaactgtagcttcagagttactgtgtaggagaaagtgagtgtagacagagaataagagtgggtttaccatgtcattgaataaaatggttggaaaccacagcatcatgtgaaatttatgaagtgagtatagattctcagtactgtgattttcacccttcctcctctgtacatgtgggatggatcaggcctcagtggctttagaggatgtggctgtgaacttcacccgagaagagtgggctttgctgggtccttgtcagaagaatctctacaaagatgtgatgcaggaaaccatcaggaacctggattgtgtaggaatgaaatggaaagaccagaacattgaagatcaatatagatatcccaggaaaaatctaagatgtcgtatgttagagagatttgttgaaagtaaagatggaactcaatgtggagaaacatctagccagattcaagatagtattgtgaccaagaacactcttcctggagtaggtccatatgaaagccgtatgagtggagaagtcatcatgggtcattcatcccttaattgttacatcagagttggtgctgggcacaaaccatatgagtatcatgaatgtggagagaagccagatacgcataaacaacgtgggaaagccttcagttaccacaactcacttcaaacacatgagaggcttcacactggaaagaaaccatataattgtaaagaatgtgggaagtccttcagttctttgggaaaccttcaaagacacatggcagtgcagcgtggagatggaccttataaatgtaagttgtgtgggaaagcgtttttttggcccagtttattacatatgcatgagagaacgcacactggagagaaaccatatgaatgtaagcagtgttctaaagccttttctttttacagttcctatctaagacatgaaagaacacatactggggagaaactgtatgaatgtaaacagtgttctaaagccttccctgattacagttcttgtctaagacatgaaagaactcacactggaaagaaaccctatacatgtaaacaatgtgggaaagccttcagtgcttccacttcccttcgaagacacgaaacaactcacactgatgagaaaccctatgcatgtcagcaatgtgggaaagcgtttcatcatctgggaagctttcaaagacacatggtaatgcacacgagagatggacctcataagtgtaagatatgtggaaaaggctttgattgtcctagttcactgaaaagtcatgaaagaactcacactggagagaaactctatgaatgcaagcagtgtgggaaagcgttatctcatagctcaagctttcgaagacacatgacaatgcacactggagatggacctcacaaatgcaagatatgtgggaaagcctttgtttatcccagtgtatttcaaaggcatgaaaagactcacactgcagagaaaccctataaatgtaaacaatgtggcaaagcctaccgtatttccagttctcttcgaaggcatgaaacaactcatactggagagaaaccctataaatgcaaatgtgggaaagcctttattgatttctattcctttcaaaatcacaaaacaactcatgctggagagaagccatatgagtgtaaggaatgtgggaaagcattcagttgtttccaatacctttctcaacatagaaggactcacacaggagagaaaccttatgagtgtaacacatgtaagaaagccttcagtcattttggtaacttaaaagtacatgaaagaattcactctggagagaagccgtatgaatgtaaggaatgtgggaaagcattctcttggctcacttgctttctacgacatgaaagaattcacatgagagagaaaccctatgagtgtcaacaatgtggtaaagccttcactcattcccgttttcttcaaggacatgaaaaaactcatactggagagaacccgtatgaatgtaaggaatgtgggaaagcatttgcttctctcagttccttgcatagacataaaaagactcactggaaaaaaactcacactggagagaacccgtatggatgtaaggaatgtgggaaagcatttgcttctctcagttccttgcatagacataaaaagactcactagcattctctctaaatgtatggaatgtgggaaagcatttattaattttatttcatttcagatacttgtacgaaacacattggagatagaccctgtgaatgtaagcacttggtaaaaccttaagtaatttcagtttctttccagtacagtcatcccttgatacctgctgggtattggttccagcactccgtgagccatgtccagtcccttttataaaatgacatatttgtatgtaacttacccacatcctcttgtatactctcaattatgtctagattacttaaaatacctcatgcattgtaaaagctatgcaaatagttgttctattgtattgtttagggactcatgataaggaaaagagtctatgtattttcagtatagatgcagtaattgtcagcctatcaacatagtatagtcagccagaacattaaagtttctttgtttcaactctc

SEQ ID NO: 9167 - protein, 645 aa, Homo sapiens; identical to SEQ ID NO: 9159

SEQ ID NO: 9168 - DNA, 3035 bp, Homo sapiens
aagggctactccgggatctacggacccgggttcccctggcgtaggtcggccctcggccgcagggtggggctgggcatgcagccgggaccccgggcgtcctgtcccgttcctgcgcggcgactgcggccccggcgccctctctgggcagctccgcgcccgcagcctcgcgtctcccgagattgtgcggctgtaagcaacacaggttcgcggcccgactcactgcaccgagacgctgagggctgcagcagaaacagtttaatagccagagaggggaggacaccccagatccgcctccctgagggatttggggtctggacgggggcggctgggtgtagggtcgttggttggtggggaagtgaggggtgaatcctgggacaggaggtgaagaaaccgcattctgctgaatgggctccctcgttgggacttcaacctgattggcgccagcctttgctgggattcaggatctgagaactccggcgactcttgagcagttctcagagatcttatccccaggcacaatggggaagccggcggtcagcgtctgctgtgacctgactctcagggaggcggccccttgaggcagcggggctgagggcacctggttaatatctaactgcaatctcgcctccagcctggctcgcagttcctgtgaacccggcctcagtggctttagaggatgtggctgtgaacttcacccgagaagagtgggctttgctgggtccttgtcagaagaatctctacaaagatgtgatgcaggaaaccatcaggaacctggattgtgtaggaatgaaatggaaagaccagaacattgaagatcaatatagatatcccaggaaaaatctaagatgtcgtatgttagagagatttgttgaaagtaaagatggaactcaatgtggagaaacatctagccagattcaagatagtattgtgaccaagaacactcttcctggagtaggtccatatgaaagccgtatgagtggagaagtcatcatgggtcattcatcccttaattgttacatcagagttggtgctgggcacaaaccatatgagtatcatgaatgtggagagaagccagatacgcataaacaacgtgggaaagccttcagttaccacaactcacttcaaacacatgagaggcttcacactggaaagaaaccatataattgtaaagaatgtgggaagtccttcagttctttgggaaaccttcaaagacacatggcagtgcagcgtggagatggaccttataaatgtaagttgtgtgggaaagcgtttttttggcccagtttattacatatgcatgagagaacgcacactggagagaaaccatatgaatgtaagcagtgttctaaagccttttctttttacagttcctatctaagacatgaaagaacacatactggggagaaactgtatgaatgtaaacagtgttctaaagccttccctgattacagttcttgtctaagacatgaaagaactcacactggaaagaaaccctatacatgtaaacaatgtgggaaagccttcagtgcttccacttcccttcgaagacacgaaacaactcacactgatgagaaaccctatgcatgtcagcaatgtgggaaagcgtttcatcatctgggaagctttcaaagacacatggtaatgcacacgagagatggacctcataagtgtaagatatgtggaaaaggctttgattgtcctagttcactgaaaagtcatgaaagaactcacactggagagaaactctatgaatgcaagcagtgtgggaaagcgttatctcatagctcaagctttcgaagacacatgacaatgcacactggagatggacctcacaaatgcaagatatgtgggaaagcctttgtttatcccagtgtatttcaaaggcatgaaaagactcacactgcagagaaaccctataaatgtaaacaatgtggcaaagcctaccgtatttccagttctcttcgaaggcatgaaacaactcatactggagagaaaccctataaatgcaaatgtgggaaagcctttattgatttctattcctttcaaaatcacaaaacaactcatgctggagagaagccatatgagtgtaaggaatgtgggaaagcattcagttgtttccaatacctttctcaacatagaaggactcacacaggagagaaaccttatgagtgtaacacatgtaagaaagccttcagtcattttggtaacttaaaagtacatgaaagaattcactctggagagaagccgtatgaatgtaaggaatgtgggaaagcattctcttggctcacttgctttctacgacatgaaagaattcacatgagagagaaaccctatgagtgtcaacaatgtggtaaagccttcactcattcccgttttcttcaaggacatgaaaaaactcatactggagagaacccgtatgaatgtaaggaatgtgggaaagcatttgcttctctcagttccttgcatagacataaaaagactcactggaaaaaaactcacactggagagaacccgtatggatgtaaggaatgtgggaaagcatttgcttctctcagttccttgcatagacataaaaagactcactagcattctctctaaatgtatggaatgtgggaaagcatttattaattttatttcatttcagatacttgtacgaaacacattggagatagaccctgtgaatgtaagcacttggtaaaaccttaagtaatttcagtttctttccagtacagtcatcccttgatacctgctgggtattggttccagcactccgtgagccatgtccagtcccttttataaaatgacatatttgtatgtaacttacccacatcctcttgtatactctcaattatgtctagattacttaaaatacctcatgcattgtaaaagctatgcaaatagttgttctattgtattgtttagggactcatgataaggaaaagagtctatgtattttcagtatagatgcagtaattgtcagcctatcaacatagtatagtcagccagaacattaaagtttctttgtttcaactctc

SEQ ID NO: 9169 - protein, 611 aa, Homo sapiens; identical to SEQ ID NO: 9161

SEQ ID NO: 9170 - DNA, 2697 bp, Homo sapiens
aatcaggcgcgcttcccagaggagtgtgtggttgaaaaagcccgcggcgtcttctccacccacctgcgctgggcgctcggtgctcggctctgtagctaagagacgacctggaagttccgtggcagcctgtgtcccgcgggaacccgcattggcagcgggagccgtccggaggacctgggacaccgcggaagtcgggaaatgcgtctcactctgttgtccaggctggagtgcagtggcacgatctcagctcactgcaacctccgcctcctgcgttcaagcgattctcctgcctcagcctcccgagtagctgggactacaggcctcagtggctttagaggatgtggctgtgaacttcacccgagaagagtgggctttgctgggtccttgtcagaagaatctctacaaagatgtgatgcaggaaaccatcaggaacctggattgtgtaggaatgaaatggaaagaccagaacattgaagatcaatatagatatcccaggaaaaatctaagatgtcgtatgttagagagatttgttgaaagtaaagatggaactcaatgtggagaaacatctagccagattcaagatagtattgtgaccaagaacactcttcctggagtaggtccatatgaaagccgtatgagtggagaagtcatcatgggtcattcatcccttaattgttacatcagagttggtgctgggcacaaaccatatgagtatcatgaatgtggagagaagccagatacgcataaacaacgtgggaaagccttcagttaccacaactcacttcaaacacatgagaggcttcacactggaaagaaaccatataattgtaaagaatgtgggaagtccttcagttctttgggaaaccttcaaagacacatggcagtgcagcgtggagatggaccttataaatgtaagttgtgtgggaaagcgtttttttggcccagtttattacatatgcatgagagaacgcacactggagagaaaccatatgaatgtaagcagtgttctaaagccttttctttttacagttcctatctaagacatgaaagaacacatactggggagaaactgtatgaatgtaaacagtgttctaaagccttccctgattacagttcttgtctaagacatgaaagaactcacactggaaagaaaccctatacatgtaaacaatgtgggaaagccttcagtgcttccacttcccttcgaagacacgaaacaactcacactgatgagaaaccctatgcatgtcagcaatgtgggaaagcgtttcatcatctgggaagctttcaaagacacatggtaatgcacacgagagatggacctcataagtgtaagatatgtggaaaaggctttgattgtcctagttcactgaaaagtcatgaaagaactcacactggagagaaactctatgaatgcaagcagtgtgggaaagcgttatctcatagctcaagctttcgaagacacatgacaatgcacactggagatggacctcacaaatgcaagatatgtgggaaagcctttgtttatcccagtgtatttcaaaggcatgaaaagactcacactgcagagaaaccctataaatgtaaacaatgtggcaaagcctaccgtatttccagttctcttcgaaggcatgaaacaactcatactggagagaaaccctataaatgcaaatgtgggaaagcctttattgatttctattcctttcaaaatcacaaaacaactcatgctggagagaagccatatgagtgtaaggaatgtgggaaagcattcagttgtttccaatacctttctcaacatagaaggactcacacaggagagaaaccttatgagtgtaacacatgtaagaaagccttcagtcattttggtaacttaaaagtacatgaaagaattcactctggagagaagccgtatgaatgtaaggaatgtgggaaagcattctcttggctcacttgctttctacgacatgaaagaattcacatgagagagaaaccctatgagtgtcaacaatgtggtaaagccttcactcattcccgttttcttcaaggacatgaaaaaactcatactggagagaacccgtatgaatgtaaggaatgtgggaaagcatttgcttctctcagttccttgcatagacataaaaagactcactggaaaaaaactcacactggagagaacccgtatggatgtaaggaatgtgggaaagcatttgcttctctcagttccttgcatagacataaaaagactcactagcattctctctaaatgtatggaatgtgggaaagcatttattaattttatttcatttcagatacttgtacgaaacacattggagatagaccctgtgaatgtaagcacttggtaaaaccttaagtaatttcagtttctttccagtacagtcatcccttgatacctgctgggtattggttccagcactccgtgagccatgtccagtcccttttataaaatgacatatttgtatgtaacttacccacatcctcttgtatactctcaattatgtctagattacttaaaatacctcatgcattgtaaaagctatgcaaatagttgttctattgtattgtttagggactcatgataaggaaaagagtctatgtattttcagtatagatgcagtaattgtcagcctatcaacatagtatagtcagccagaacattaaagtttctttgtttcaactctc

SEQ ID NO: 9171 - protein, 611 aa, Homo sapiens; identical to SEQ ID NO: 9161

SEQ ID NO: 9172 - DNA, 2582 bp, Homo sapiens
gtcaatcaggcgcgcttcccagaggagtgtgtggttgaaaaagcccgcggcgtcttctccacccacctgcgctgggcgctcggtgctcggctctgtagctaagagacgacctggaagttccgtggcagcctgtgtcccgcgggaacccgcattggcagcgggagccgtccggaggacctgggacaccgcggaagtcgggaaatggcctcagtggctttagaggatgtggctgtgaacttcacccgagaagagtgggctttgctgggtccttgtcagaagaatctctacaaagatgtgatgcaggaaaccatcaggaacctggattgtgtaggaatgaaatggaaagaccagaacattgaagatcaatatagatatcccaggaaaaatctaagatgtcgtatgttagagagatttgttgaaagtaaagatggaactcaatgtggagaaacatctagccagattcaagatagtattgtgaccaagaacactcttcctggagtaggtccatatgaaagccgtatgagtggagaagtcatcatgggtcattcatcccttaattgttacatcagagttggtgctgggcacaaaccatatgagtatcatgaatgtggagagaagccagatacgcataaacaacgtgggaaagccttcagttaccacaactcacttcaaacacatgagaggcttcacactggaaagaaaccatataattgtaaagaatgtgggaagtccttcagttctttgggaaaccttcaaagacacatggcagtgcagcgtggagatggaccttataaatgtaagttgtgtgggaaagcgtttttttggcccagtttattacatatgcatgagagaacgcacactggagagaaaccatatgaatgtaagcagtgttctaaagccttttctttttacagttcctatctaagacatgaaagaacacatactggggagaaactgtatgaatgtaaacagtgttctaaagccttccctgattacagttcttgtctaagacatgaaagaactcacactggaaagaaaccctatacatgtaaacaatgtgggaaagccttcagtgcttccacttcccttcgaagacacgaaacaactcacactgatgagaaaccctatgcatgtcagcaatgtgggaaagcgtttcatcatctgggaagctttcaaagacacatggtaatgcacacgagagatggacctcataagtgtaagatatgtggaaaaggctttgattgtcctagttcactgaaaagtcatgaaagaactcacactggagagaaactctatgaatgcaagcagtgtgggaaagcgttatctcatagctcaagctttcgaagacacatgacaatgcacactggagatggacctcacaaatgcaagatatgtgggaaagcctttgtttatcccagtgtatttcaaaggcatgaaaagactcacactgcagagaaaccctataaatgtaaacaatgtggcaaagcctaccgtatttccagttctcttcgaaggcatgaaacaactcatactggagagaaaccctataaatgcaaatgtgggaaagcctttattgatttctattcctttcaaaatcacaaaacaactcatgctggagagaagccatatgagtgtaaggaatgtgggaaagcattcagttgtttccaatacctttctcaacatagaaggactcacacaggagagaaaccttatgagtgtaacacatgtaagaaagccttcagtcattttggtaacttaaaagtacatgaaagaattcactctggagagaagccgtatgaatgtaaggaatgtgggaaagcattctcttggctcacttgctttctacgacatgaaagaattcacatgagagagaaaccctatgagtgtcaacaatgtggtaaagccttcactcattcccgttttcttcaaggacatgaaaaaactcatactggagagaacccgtatgaatgtaaggaatgtgggaaagcatttgcttctctcagttccttgcatagacataaaaagactcactggaaaaaaactcacactggagagaacccgtatggatgtaaggaatgtgggaaagcatttgcttctctcagttccttgcatagacataaaaagactcactagcattctctctaaatgtatggaatgtgggaaagcatttattaattttatttcatttcagatacttgtacgaaacacattggagatagaccctgtgaatgtaagcacttggtaaaaccttaagtaatttcagtttctttccagtacagtcatcccttgatacctgctgggtattggttccagcactccgtgagccatgtccagtcccttttataaaatgacatatttgtatgtaacttacccacatcctcttgtatactctcaattatgtctagattacttaaaatacctcatgcattgtaaaagctatgcaaatagttgttctattgtattgtttagggactcatgataaggaaaagagtctatgtattttcagtatagatgcagtaattgtcagcctatcaacatagtatagtcagccagaacattaaagtttctttgtttcaactctc

SEQ ID NO: 9173 - protein, 643 aa, Homo sapiens; identical to SEQ ID NO: 9165

SEQ ID NO: 9174 - DNA, 2570 bp, Homo sapiens
gctgagagacgacctggaagttctgaggcagcctttgtctggctggaacacgcattggcagcgggagctgtcggtaggacctgggacaccgcggaagtcgggaaatggcctcagtggctttagaggatgtggctgtgaacttcacccgagaagagtgggctttgctgggtccttgtcagaagaatctctacaaagatgtgatgcaggaaaccatcaggaacctggattgtgtagtaatgaaatggaaagaccagaacattgaagatcaatatagatatcccaggaaaaatctaagatgtcgtatgttagagagatttgttgaaagtaaagatggaactcaatgtggagaaacatctagccagattcaagatagtattgtgaccaagaacactcttcctggagtaggtccttgtgaaagcagtatgagaggagaaaaagtcatgggtcattcatcccttaattgttacatcagagttggtgctgggcacaaaccacatgagtatcatgaatgtggagagaagccagatacgcataaacaacgtgggaaagccttcagttaccacaactcatttcaaacacatgagaggcttcacactggaaagaaaccatatgattgtaaagaatgtgggaagtccttcagttctttgggaaaccttcaaagacacatggcagtgcagcgtggagatggaccttataaatgtaagttgtgtgggaaagcgtttttttggcccagtttattacatatgcatgaaagaacgcacactggagagaaaccatatgaatgtaagcagtgttctaaagccttttctttttacagttcctatctaagacatgaaagaacacatactggggagaaaccgtatgaatgtaaacagtgttctaaagcctttcctttttacagttcctatctaagacatgaaagaacacatactggggagaaaccatataaatgtaagcagtgttctaaagccttccctgattccagttcttgtctaatacatgaaagaactcacactggagagaaaccctatacatgtaaacaatgtgggaaagccttcagtgtttccggttcccttcaaagacatgaaaccactcacagtgcagagaaaccctatgcatgtcagcaatgtgggaaagcgtttcatcatctgggaagctttcaaagacacatgataaggcacactggaaatggacctcataaatgtaagatatgtgggaaaggctttgattgtcctagttcactgcaaagtcatgaaagaactcacactggagagaaaccctatgaatgcaagcagtgtgggaaagcattatctcatcgctcaagctttcgaagtcatatgataatgcacactggagatggacctcataaatgcaaggtatgtgggaaagcctttgtttatcccagtgtatttcaaagacatgaaaggactcacactgcagagaaaccctataaatgtaaacaatgtggcaaagcctaccgtatttccagttcccttcgaaggcatgaaacaactcatactggagagaaaccctataaatgcaaacttgggaaagcctgtattgatttctgttcctttcaaaatcacaaaacaactcacactggagagaagccatatgagtgtaaggaatgtgggaaagcattcagtcgtttcagatacctttctcgacataaaaggactcacacaggagagaaaccttatgagtgtaaaacatgtaggaaagccttcggtcattatgataacttaaaggtacatgaaagaattcactctggagagaagccgtatgaatgtaaggaatgtgggaaagcattctcttggctcacttgctttctacgacatgaaagaattcacatgagagagaaatcctatgaatgtccacaatgtggtaaagccttcactcattcccgttttcttcaaggacatgaaaaaactcatactggagagaacccgtatgaatgtaaggaatgtgggaaagcatttgcttctctcagttccttgcatagacataaaaagactcactggaaaaaaactcacactggagagaacccatatgaatgtaaggaatgtgggaaagcatttgcttctctcagttccttgcatagacataaaaagactcactagcattctctctaaatgtatggaatgtgggaaagcatttattaattttatttcatttcagatacttgtacgaaacacattggagatagaccctgtgaatgtaagcacttggtaaagccttaagtagtttcagtttctttccagtacagtcatcccttgatacctgctgggtattggttccagcactccgtgagccatgtccagtcccttttataaaatgacatgtttgtatgtaacttacccacatcctcttgtatagtctcaattatgtctagattacttaaaatacctcatgcattataaaagctatgcaaatagttgttctattgtattgtttagggaatcatgataaggaaaagagtctatgtattttcagtatagatgcagtaattgtgagcctatcaacatagtgtagtcagccagaacattaaagtttctttgtttcaactctca

SEQ ID NO: 9175 - protein, 671 aa, Homo sapiens
MASVALEDVAVNFTREEWALLGPCQKNLYKDVMQETIRNLDCVVMKWKDQNIEDQYRYPRKNLRCRMLERFVESKDGTQCGETSSQIQDSIVTKNTLPGVGPCESSMRGEKVMGHSSLNCYIRVGAGHKPHEYHECGEKPDTHKQRGKAFSYHNSFQTHERLHTGKKPYDCKECGKSFSSLGNLQRHMAVQRGDGPYKCKLCGKAFFWPSLLHMHERTHTGEKPYECKQCSKAFSFYSSYLRHERTHTGEKPYECKQCSKAFPFYSSYLRHERTHTGEKPYKCKQCSKAFPDSSSCLIHERTHTGEKPYTCKQCGKAFSVSGSLQRHETTHSAEKPYACQQCGKAFHHLGSFQRHMIRHTGNGPHKCKICGKGFDCPSSLQSHERTHTGEKPYECKQCGKALSHRSSFRSHMIMHTGDGPHKCKVCGKAFVYPSVFQRHERTHTAEKPYKCKQCGKAYRISSSLRRHETTHTGEKPYKCKLGKACIDFCSFQNHKTTHTGEKPYECKECGKAFSRFRYLSRHKRTHTGEKPYECKTCRKAFGHYDNLKVHERIHSGEKPYECKECGKAFSWLTCFLRHERIHMREKSYECPQCGKAFTHSRFLQGHEKTHTGENPYECKECGKAFASLSSLHRHKKTHWKKTHTGENPYECKECGKAFASLSSLHRHKKTH

SEQ ID NO: 9176 - DNA, 2663 bp, Homo sapiens
gtagctgagagacgacctggaagttctgaggcagcctttgtctggctggaacacgcattggcagcgggagctgtcggtaggacctgggacaccgcggaagtcgggaaatggcctcagtggctttagaggatgtggctgtgaacttcacccgagaagagtgggctttgctgggtccttgtcagaagaatctctacaaagatgtgatgcaggaaaccatcaggaacctggattgtgtagtaatgaaatggaaagaccagaacattgaagatcaatatagatatcccaggaaaaatctaaggtaatttacactcacaagagaaagatatgtccctggagccgttctgagaatgacatgaaaatttaaaaagaagcaaagaaaatgaacaagatgtcgtatgttagagagatttgttgaaagtaaagatggaactcaatgtggagaaacatctagccagattcaagatagtattgtgaccaagaacactcttcctggagtaggtccttgtgaaagcagtatgagaggagaaaaagtcatgggtcattcatcccttaattgttacatcagagttggtgctgggcacaaaccacatgagtatcatgaatgtggagagaagccagatacgcataaacaacgtgggaaagccttcagttaccacaactcatttcaaacacatgagaggcttcacactggaaagaaaccatatgattgtaaagaatgtgggaagtccttcagttctttgggaaaccttcaaagacacatggcagtgcagcgtggagatggaccttataaatgtaagttgtgtgggaaagcgtttttttggcccagtttattacatatgcatgaaagaacgcacactggagagaaaccatatgaatgtaagcagtgttctaaagccttttctttttacagttcctatctaagacatgaaagaacacatactggggagaaaccgtatgaatgtaaacagtgttctaaagcctttcctttttacagttcctatctaagacatgaaagaacacatactggggagaaaccatataaatgtaagcagtgttctaaagccttccctgattccagttcttgtctaatacatgaaagaactcacactggagagaaaccctatacatgtaaacaatgtgggaaagccttcagtgtttccggttcccttcaaagacatgaaaccactcacagtgcagagaaaccctatgcatgtcagcaatgtgggaaagcgtttcatcatctgggaagctttcaaagacacatgataaggcacactggaaatggacctcataaatgtaagatatgtgggaaaggctttgattgtcctagttcactgcaaagtcatgaaagaactcacactggagagaaaccctatgaatgcaagcagtgtgggaaagcattatctcatcgctcaagctttcgaagtcatatgataatgcacactggagatggacctcataaatgcaaggtatgtgggaaagcctttgtttatcccagtgtatttcaaagacatgaaaggactcacactgcagagaaaccctataaatgtaaacaatgtggcaaagcctaccgtatttccagttcccttcgaaggcatgaaacaactcatactggagagaaaccctataaatgcaaacttgggaaagcctgtattgatttctgttcctttcaaaatcacaaaacaactcacactggagagaagccatatgagtgtaaggaatgtgggaaagcattcagtcgtttcagatacctttctcgacataaaaggactcacacaggagagaaaccttatgagtgtaaaacatgtaggaaagccttcggtcattatgataacttaaaggtacatgaaagaattcactctggagagaagccgtatgaatgtaaggaatgtgggaaagcattctcttggctcacttgctttctacgacatgaaagaattcacatgagagagaaatcctatgaatgtccacaatgtggtaaagccttcactcattcccgttttcttcaaggacatgaaaaaactcatactggagagaacccgtatgaatgtaaggaatgtgggaaagcatttgcttctctcagttccttgcatagacataaaaagactcactggaaaaaaactcacactggagagaacccatatgaatgtaaggaatgtgggaaagcatttgcttctctcagttccttgcatagacataaaaagactcactagcattctctctaaatgtatggaatgtgggaaagcatttattaattttatttcatttcagatacttgtacgaaacacattggagatagaccctgtgaatgtaagcacttggtaaagccttaagtagtttcagtttctttccagtacagtcatcccttgatacctgctgggtattggttccagcactccgtgagccatgtccagtcccttttataaaatgacatgtttgtatgtaacttacccacatcctcttgtatagtctcaattatgtctagattacttaaaatacctcatgcattataaaagctatgcaaatagttgttctattgtattgtttagggaatcatgataaggaaaagagtctatgtattttcagtatagatgcagtaattgtgagcctatcaacatagtgtagtcagccagaacattaaagtttctttgtttcaactctca

SEQ ID NO: 9177 - protein, 64 aa, Homo sapiens
MASVALEDVAVNFTREEWALLGPCQKNLYKDVMQETIRNLDCVVMKWKDQNIEDQYRYPRKNLR

SEQ ID NO: 9178 - DNA, 1041 bp, Homo sapiens
aactgtcaatcaggcactgcccagagaagtgtgtgtggttgaaaaagcccgcggcgtctgctccacccacctgcgctcggctctgggttctgtagctgagagacgacctggaagttctgaggcagcctttgtctggctggaacacgcattggcagcgggagctgtcggtaggacctgggacaccgcggaagtcgggaaatggcctcagtggctttagaggatgtggctgtgaacttcacccgagaagagtgggctttgctgggtccttgtcagaagaatctctacaaagatgtgatgcaggaaaccatcaggaacctggattgtgtagtaatgaaatggaaagaccagaacattgaagatcaatatagatatcccaggaaaaatctaagatgtcgtatgttagagagatttgttgaaagtaaagatggaactcaatgtggagaaacatctagccagattcaagatagtattgtgaccaagaacactcttcctggagtaggtccttgtgaaagcagtatgagaggagaaaaagtcatgggtcattcatcccttaattgttacatcagagttggtgctgggcacaaaccacatgagtatcatgaatgtggagagaagccagatacgcataaacaacgtgggaaagccttcagttaccacaactcatttcaaacacatgagaggcttcacactggaaagaaaccatatgattgtaaagaatgtgggaagtccttcagttctttgggaaaccttcaaagacacatggcagtgcagcgtggagatggaccttataaatgtaagttgtgtgggaaagcgtttttttggcccagtttattacatatgcatgaaagaacgcacactggagagaaaccatatgaatgtaagcagtgttctaaagccttttctttttacagttcctatctaagacatgaaagaacacatactggggagaaaccgtatgaatgtaaacagtgttctaaagcctttcctttttacagttcctatctaaacatgaaaggactcacactgcagagaaaccctata

SEQ ID NO: 9179 - protein, 280 aa, Homo sapiens
MASVALEDVAVNFTREEWALLGPCQKNLYKDVMQETIRNLDCVVMKWKDQNIEDQYRYPRKNLRCRMLERFVESKDGTQCGETSSQIQDSIVTKNTLPGVGPCESSMRGEKVMGHSSLNCYIRVGAGHKPHEYHECGEKPDTHKQRGKAFSYHNSFQTHERLHTGKKPYDCKECGKSFSSLGNLQRHMAVQRGDGPYKCKLCGKAFFWPSLLHMHERTHTGEKPYECKQCSKAFSFYSSYLRHERTHTGEKPYECKQCSKAFPFYSSYLNMKGLTLQRNP

SEQ ID NO: 9180 - DNA, 695 bp, Homo sapiens
tacgcttgatgcaccactacctttctaacctcacaccctcacctgtttacccctacgtcctcaagacctgcttctttgtttgatcaccaataaataatgtgggctcccagagctcagggccttcgcagcatccataccagcgttggccccctggacccaccttatgcactcttaacttgtcttttctcattcctttgactacgctggagtttgtagcccccacggcctggtgttgggtctgatcaccccaacatttctggcacccaacgtggggctacgaacactccggtgaaggaacactagagtgtgcggaagcggaggacacattgtcagaggacacccaaggacgactgaaagaagcttggtggaattcatataaagttgcgagtttcaggttggttggctctgactgatcacctgtattatggaccatctgtgtgattatggggaaaagttcaggacaccagcaacctacattggataggaccacctctgactccagggattgccactcaatctttctgagattagcacccacatccaacaaggtgtgatcctggtgatctttgaaaaaaaggcactgaaacaaccatgatttaagtttttggtattatgaatgcatgagaaattttctgggaaaaaatcataactatattaagaataaaaaataaaaaattcctaaggaaaatacttga

SEQ ID NO: 9181 - protein, 36 aa, Homo sapiens
MGKSSGHQQPTLDRTTSDSRDCHSIFLRLAPTSNKV

SEQ ID NO: 9182 - DNA, 4178 bp, Homo sapiens
agccgctgcgctccgctctggggtctcctcaccccagaaggccctcaggtggaggaagggcctcaggtggaggtaggacctgtgctggccgcgggagaggtaaacagaacaccaggacatcccagagtctgggaaatggcccaaatacattttctttgtggatctgcatgacttatggtaccctcctcatctgggctgtgaatatatatgactaataaactgttgtcagttgcatttgtccagtgatggatatcatgtgttagcctacctaaatagccctagggccctaattcctctctcaccaatggggtgagtgggaggctattgaaacatgcacatccatgataccccatggtcaggcactgatgagcaaagaaaagaaggtacatttggtatcaatcctttccaaagcatgagaggatgtaactcaactgttcttccaaagcaaaacaagtagccagggggctacattgttttctgtagtactgctgcttaccagcatgtcaaagggataatcttgagatcacaaggccgttggttcccaccagggtcttaggcaaaattaccttgttggatgtgggtgctaatctcagaaagattgagtggcaatccctggagtcagaggtggtcctatccaatgtaggttgctggtgtcctgaacttttccccataatcacacagatggtccataatacaggtgatcagtcagagccaaccaacctgaaactcgcaactttatatgaattctgagggattttttacagaaagaaaagggaaaagcaatgattaggtggcatgctcaggtccataaacctaatagcagatagaagcaaatttctcccacttgataaagaacctctaaaaagaagccaagctaagatcatacttaattttgatatctagatgctttcccactgagatcaggaacgaggtaaggatgcctcctctcaccactgctattcatcatcatcctagatgtcctcactaatggaataaaacaagaaattttttcttcaattaattgaagttcctctaaggcctctttggacagggagcatttactgtttaagttagaatcacctcgtaaggtagaaaagaggtgagacatagcataagtaggaatgcctaaagtgggacaaatccaattaatgtctcctaatgatttttaaaattatttagtctataaattatctcttctaatttgaactttttgaggtttaatagtactttgttttactttcattcgtaaatactgaaagggagtagaagtttggattttattgggggctatgattaaccctgctgcagttacagccttttctaactgtttgtagcatagcattaatcctccctagtttcagctgcacataaaatatcacccacgtagtggataatataacattttttgaattgttctctaactagcttaatagcttttccaacataagtttgacaaatagtcgggcaatttaacatgccttgtggcagtacttttcaatggtatctgtccgctggttctttgttatttatagtgggaacagtaaaagcaattttttcataatctcgagtagctaaaggaatggtagaaaagcaattttttaaatctattactatgagaggtcagtattttgggatcattgttggagagggcagccctggttcagtgagcccatgggctgaattatagcattaacagccctcaaatctgttaacattctccatttccctgattttttcttaataacaaacacaggagaattccaaggggagaaagtaggctctatgtgtcccttttgtaattgatcctgcactaattcttttaaagcctccggtttttcctgtttcagcggccattgctccacccaaaccggtttggcagttaaccaaacaagcggaatgggagccggaggctcagcaattgcagctcctaaaaatgataccctgatccagttcgatctgtttgcctttttagttctaaaggttctggttggccatttttattttttttttcctagtcccttccctgggagatatcccatttttctcatcatttgtttactgttattattatactgatccataggaatagatattttagcactccattgttgtaataagtctctaccccatagattgacaggaataggtgtaacaataggttgaattgtcccttcttggccatccagcccttggcatggcaaaattaaagaactttaaaaaattctgaggcagcccctactccaacaataccaatggatgccttctgcttaggccaatgccggggccattgatttaaaccaataatagaaacatcagctccagtatctactaacccttcaaagtcctttccttgaatggttactgtacaaataggtctcttatcagacacttgattaacccaatatacagcttttcctgctggattcgtaccaccaaagcctcctattttttttttttctactgtgcctcttcccagttttgcataaggtaacagtaacaactgagcaattctttctcctgggaaagcagaccatggaattgaggaactaataactaactgaatctctccggtataattagaatcaattatttatgtacagcgacacctcttaaatttaaattagaccttccaagcaatagaccaactgttcctgagggtaaagggctcctaactctcatgggacgttctttggtggctccccaggaagtagggaaacgggaattgtgctgcagagatctacagcagcgctgcctgctgtggcgggggacaattgttgtatgtttgtaagggcactgactgtgccggatatgcctcagtttgttgaggggcccaaggtgggcccctattcccgtttcccgaaagaggttgcccatctttgctagatttagaatgacactgatttgcccagtgattgcccttcttacattgggggcatacacctggacttttctgttgattgatggcaatagtttttgccttctgatttccttttctacattcctcttttatgtgtccaaattgcccacaattaaaacaagagcctgagaaatggggcatattttttcccacctttagtcaagccatagctggactaaaattttccccagtgccatcacaagccttaatatattcagccaaatgagtcttccctctcataggtctaatgaaagaaggatatttttaccctgtaacattttttttccatgcctgtaagcacacagtgcataactgaacaatggcaacatttttcattactgcttgattgtctaatcggccccaattagggcccaaccccattaactgttcaaaggaaacaggcacaggcagctgtgcttgtgtgttttctcttgcctgagtttgagctttatcagcccaccaagttttaaactgcaaacactgagatggagtgagaacagattttgttaaagtatcccagtcatatggtattaatctattatcaagagccacattttttagtaaagtttgtacaaaaggagaatttggcctatattgactaatggcttgcttgaattcctttaacaacttaaaaggaaaggtggcccaactagctatattctgtcctcctctctggattatagtaatgggaaattgccatgcttctaggtctccttcagttctagccttctgaataaaattttatatcgcatcaccaattgctccaggttttaatgttgcagctaccggagcggtaagttttacagctaattcatcttctcacccattagggggagagggaggaggtggccattcacttaattcagcaggtggaaccgaagggctagtaaaatatacctttttcagtttccatttcttttctttaatttcttccggttgctgttcctcatattcagaatctgaagttaattttttacactcatctacctcttcctcatctgaatctgccttgtcatctgtttgaaatggctcaagaactgcctttatcaactcccacactgaccaaacagaaactggaattttggctccttctttatatgcgtttttaaaatttctgccaattcttccccattcatctagctccattgtcctttgttctgggaaccatgggcaaaactgctctactgtatcaaagagtgttaataagttctgagtattaactttcactccccctctccataataaatgccttaagaaattt

SEQ ID NO: 9183 - protein, 59 aa, Homo sapiens
MGAGGSAIAAPKNDTLIQFDLFAFLVLKVLVGHFYFFFPSPFPGRYPIFLIICLLLLLY

SEQ ID NO: 9184 - DNA, 2154 bp, Homo sapiens; identical to SEQ ID NO: 1166

SEQ ID NO: 9185 - protein, 641 aa, Homo sapiens; identical to SEQ ID NO: 1167

SEQ ID NO: 9186 - DNA, 554 bp, Homo sapiens
gtctgctgtgaccagctctgaccaaaggaggcgtagtaaggaagccaggacacctggaacccgggatacggactcagtggtctttgaggatgtggctgtgaacttcacccaggaggagtgggctttgctgggtccctctcagaagaaactctacagagatgtgatgcaagaaacctttgttaacttggcctctataggggaaaactgggaggagaagaacattgaagatcacaaaaatcaggggagaaagctaagaagtcatatggtagagaggctctgtgaaaggaaagaaggtagtcagtttggagaaaccatcagtcagactccaaatcctaaaccaaacaagaaaacttttactagagtaaaaccatatgaatgtagtgtgtgtggaaaggactatatgtgtcattcatctcttaataggcacatgagatctcatactgaacatagatcatatgaatatcacaaatatggagagaaatcatatgaatgtaaggaatgtgggaaaagattcagctttcgaagttcatttcgaatacatgaaagaactcaca

SEQ ID NO: 9187 - protein, 129 aa, Homo sapiens
MQETFVNLASIGENWEEKNIEDHKNQGRKLRSHMVERLCERKEGSQFGETISQTPNPKPNKKTFTRVKPYECSVCGKDYMCHSSLNRHMRSHTEHRSYEYHKYGEKSYECKECGKRFSFRSSFRIHERT

SEQ ID NO: 9188 - DNA, 399 bp, Homo sapiens
gtggcgccgctgcagtccctgtctgctgtgaccagctctgaccaaaggaggcgtagtaaggaagccaggacacctggaacccgggatacggactcagtggtctttgaggatgtggctgtgaacttcacccaggaggagtgggctttgctgggtccctctcagaagaaactctacagagatgtgatgcaagaaacctttgttaacttggcctctataggggaaaactgggaggagaagaacattgaagatcacaaaaatcaggggagaaagctaagaagtcatatggtagagaggctctgtgaaaggaaagaaggtagtcagtttggagaaaccatcagtcagactccaaatcctaaaccaaacaagaaaacttttactagagtaaaaccatatgaatgt

SEQ ID NO: 9189 - protein, 71 aa, Homo sapiens
MQETFVNLASIGENWEEKNIEDHKNQGRKLRSHMVERLCERKEGSQFGETISQTPNPKPNKKTFTRVKPYE

SEQ ID NO: 9190 - DNA, 2934 bp, Homo sapiens
aggaactctgcaagggggacaggggcaatgttcaacaactccgcggggtcttcctgtttcgtgtccgctgcgtttgggttccggtctccgcttctccagtggccccggtggctccaccgcagcgtctggcgcgctgggacctgcacaggccggagagagccgtaggcaggaccccgggacaccctggaagccaggaaatggactcagtggcctctgaggatgtggctgtgaacttcacacttgaggagtgggctttgctggatccttcccagaagaaactctacagagatgtgatgcgggaaacctttagaaacctggcctgtgtaggaaaaaaatgggaagaccagagcattgaagattggtacaaaaatcaggggagaattttaagaaatcatatggaagagggactcagtgaaagtaaagaatatgatcaatgtggagaagccttcagtcagattctcaatcttaatctgaacaagaaaattcctactatagtaagaccatgtgaatgtagtttgtgtgggaaagtcttcatgcatcattcatcccttagtaggcacatcagatctcaccttggacacaaaccatatgactatcaggaatatggagagaaaccatataaatgtaagcagtgtgggaaagccttcagttcttgtcaatcctttcgaagacatgaaagaactcacactggtgagaaaccctatgcatgtccggaatgtgggaaagccttcatttctctcccaagtgttcgaagacacatgattaagcacactggagatggaccatataaatgtcaggaatgtgggaaagcctttgatcgcccaagtttatttcagatacatgaaagaactcacactggagagaaaccctatgaatgtcaggaatgtgcaaaagctttcatttctcttccaagttttcaaagacacatgattaggcacactggagatggaccttataaatgtcaggaatgtggaaaagcctttgaccgccccagtttatttcgaatacatgaaagaactcatactggagagaaaccccatgaatgtaaacagtgtgggaaggccttcatttctttcacaaattttcaaagtcatatgattaggcacactggggatggaccttataaatgtaaagtatgtgggagagcctttatttttcccagttatgttcgaaagcatgaaagaactcatactggggagaaaccctatgaatgtaataaatgtggtaaaaccttcagttcttccagtaatgttcgaacacatgaaaggactcacactggagagaagccctatgaatgtaaggaatgcgggaaagccttcatttctctcccaagtgtccgaagacacatgataaagcacactggagatggaccttataaatgtcaggtatgtggtagagcctttgactgtcccagttcatttcaaatacacgaaagaactcacactggagagaaaccctatgaatgtcaggtatgtgggaaagccttcatttctcttaaaaggattagaaaacatatgatactgcacactggagatggaccttataaatgtcaggtatgtggtaaagcctttgactgtcctagttctgtccgaacacatgaaagaactcatactggagaaaaaccctatgaatgtaaagaatgtgggaaagcattcaattatgccagttccattagaatacatgaaagaactcataccggagaaaaaccctatgaatgtaagcaatgtggaaaaacgttcagttattccagttcctttcaaagacatgaaagagctcataatggagataaaccttacgtaaagaatgtgggaaagctttcatttatcacacaaccttcgaatacctgtgaaaatgaatagtggaggacaggtctacaagtatctacatatctaaagaatatggaaagtcttcagtttgctttctgggtttcagacttgtttgggagctcacccctttctcctgtttctcacttttggaataggaatctctatcctgtgcctgtctcatattttggaaatacatgactagtttggttttcaccggttcggagctgaagaagaattttgcctcagcatgaattgagtctcatccatatctgagtgatgtgatattgagatgacactttggagtttgagtttaaacattaggcttcatgctggaattaactgagacttttgaggcctttgggatgagatgaatatattttacatgtgatgacatggattttgggggccagaggtgtaatgttttggctgagtgtatgccacctcagattcatatgttgaaaccttacccccgtgccccccctctcccccacaatgtgatggtatttggaggccctgtctctggtggtttttaggattggaggacatcatgaagatggaggccttgtaattgggattagtttcctgataggaatccctagagagctagctttgcccttcaccatgagagggtgcagtgagaagatagctatctttgaaccgggaagcaggcccttaccagacatggactatgccagtgccttgatattggacttcccagcctcccaaaccatgagaaataaatgtttgttgattaattaagctttccaatttatggtattttgttttagcaacccaagctaagacacaatccaattttaaaatggaggaaaggacttgaatagacatttctccaaagaagatacccagatggccaataagcacgtaacaatgctcgacatctttagtcattagggaaatacaaatcaaactcaagacatacatagcatctcattaggattagtagtatcaaagatggaaaacaagaaatactgtcaaggatgtggaatgttggagaacattgtgcactatcactgggaatgtacagtggtataagcctgctgaaaacagtatggcagatccccagattaaaatatagaaataacatatg

SEQ ID NO: 9191 - protein, 553 aa, Homo sapiens; identical to SEQ ID NO: 1169

SEQ ID NO: 9192 - DNA, 2583 bp, Homo sapiens
aggaactctgcaagggggacaggggcaatgttcaacaactccgcggggtcttcctgtttcgtgtccgctgcgtttgggttccggtctccgcttctccagtggccccggtggctccaccgcagcgtctggcgcgctgggacctgcacaggccggagagagccgtaggcaggaccccgggacaccctggaagccaggaaatggactcagtggcctctgaggatgtggctgtgaacttcacacttgaggagtgggctttgctggatccttcccagaagaaactctacagagatgtgatgcgggaaacctttagaaacctggcctgtgtaggaaaaaaatgggaagaccagagcattgaagattggtacaaaaatcaggggagaattttaagaaatcatatggaagagggactcagtgaaagtaaagaatatgatcaatgtggagaagccttcagtcagattctcaatcttaatctgaacaagaaaattcctactatagtaagaccatgtgaatgtagtttgtgtgggaaagtcttcatgcatcattcatcccttagtaggcacatcagatctcaccttggacacaaaccatatgactatcaggaatatggagagaaaccatataaatgtaagcagtgtgggaaagccttcagttcttgtcaatcctttcgaagacatgaaagaactcacactggtgagaaaccctatgcatgtccggaatgtgggaaagccttcatttctctcccaagtgttcgaagacacatgattaagcacactggagatggaccatataaatgtcaggaatgtgggaaagcctttgatcgcccaagtttatttcagatacatgaaagaactcacactggagagaaaccctatgaatgtcaggaatgtgcaaaagctttcatttctcttccaagttttcaaagacacatgattaggcacactggagatggaccttataaatgtcaggaatgtggaaaagcctttgaccgccccagtttatttcgaatacatgaaagaactcatactggagagaaaccccatgaatgtaaacagtgtgggaaggccttcatttctttcacaaattttcaaagtcatatgattaggcacactggggatggaccttataaatgtaaagtatgtgggagagcctttatttttcccagttatgttcgaaagcatgaaagaactcatactggggagaaaccctatgaatgtaataaatgtggtaaaaccttcagttcttccagtaatgttcgaacacatgaaaggactcacactggagagaagccctatgaatgtaaggaatgcgggaaagccttcatttctctcccaagtgtccgaagacacatgataaagcacactggagatggaccttataaatgtcaggtatgtggtagagcctttgactgtcccagttcatttcaaatacacgaaagaactcacactggagagaaaccctatgaatgtcaggtatgtgggaaagccttcatttctcttaaaaggattagaaaacatatgatactgcacactggagatggaccttataaatgtcaggtatgtggtaaagcctttgactgtcctagttctgtccgaacacatgaaagaactcatactggagaaaaaccctatgaatgtaaagaatgtgggaaagcattcaattatgccagttccattagaatacatgaaagaactcataccggagaaaaaccctatgaatgtaagcaatgtggaaaaacgttcagttattccagttcctttcaaagacatgaaagagctcataatggagataaaccttacgtaaagaatgtgggaaagctttcatttatcacacaaccttcgaatacctgtgaaaatgaatagtggaggacaggtctacaagtatctacatatctaaagaatatggaaagtcttcagtttgctttctgggtttcagacttgtttgggagctcacccctttctcctgtttctcacttttggaataggaatctctatcctgtgcctgtctcatattttggaaatacatgactagtttggttttcaccggttcggagctgaagaagaattttgcctcagcatgaattgagtctcatccatatctgagtgatgtgatattgagatgacactttggagtttgagtttaaacattaggcttcatgctggaattaactgagacttttgaggcctttgggatgagatgaatatattttacatgtgatgacatggattttgggggccagaggtgtaatgttttggctgagtgtatgccacctcagattcatatgttgaaaccttacccccgtgccccccctctcccccacaatgtgatggtatttggaggccctgtctctggtggtttttaggattggaggacatcatgaagatggaggccttgtaattgggattagtttcctgataggaatccctagagagctagctttgcccttcaccatgagagggtgcagtgagaagatagctatctttgaaccgggaagcaggcccttaccagacatggactatgccagtgccttgatattggacttcccagcctcccaaaccatgagaaataaatgtttgttgattaatt

SEQ ID NO: 9193 - protein, 553 aa, Homo sapiens; identical to SEQ ID NO: 1169

SEQ ID NO: 9194 - DNA, 6528 bp, Homo sapiens
cttaatacgaacctggaaactcctactggattaaaaccatgtgactgcagtgtgtgtggggaagtcttcatgcatcaggtctcccttaataggcacatgagatctcacactgaacagaaaccaaatgagtgtcacgaatatggagagaagccacataaatgcaaagaatgtgggaaaaccttcactcgcagctccagtattcgaacccatgaaagaattcacactggagagaaaccctatgaatgtaaggaatgtggcaaagccttcgcatttctcttttcctttcgaaaccatataagaattcatactggagagacaccctatgaatgtaaggaatgtgggaaggcattcagatatctcactgctcttcggcgccatgaaaaaaatcacactggagagaaaccctacaaatgtaaacagtgtggaaaagcctttatatattaccagccttttctaacccacgaaaggactcacactggagagaaaccttatgaatgtaagcaatgtgggaaagccttcagttgtcccacgtacttacggagtcatgagaaaactcatactggagagaaaccttttgtatgtagggaatgtgggagagccttcttttctcactcaagccttcgaaaacacgtgaaaacccacaccggagttcaaccttatacatgtaagaaatgtggggaagccttcaagtcatctagttcctgtgaagtgcacgaaagaactcattttggagaaaaaccctatgaatgtaaacaatgtggtaaagccttcaattcttcaagttaccttcagttgcacgaaagagttcacactggcgagaaaacttacgaatgtaaagaatgtggtaaagcctttctttattccactcactttcgaatccatgaaagaacccatactagagagaaaccctatgaatgcaaacagtgtggtcgggtcttcatttacttcagtcaccttcgaaggcacgaaagaagtcacactggagtgaaaccatgtgagtgtaagcagtgtggcaaagctttcacttgtttaaattccctgaaagtacacaaaagaattcatactggagaaagaccctttcagtgtagacaatgtggtaaagccttcagttactcaaagtctttgcacgtgcacgaaaggactcatagtagacagaagccctaagaaagtaaagtgtggtaatgctgtcagttgtattagttccttttggatgtatgagagtacttacgctggagagaaattcaaggaatgtaaacggtgtgattaagccttcagttgtcctaattccctttgaagacgtgactcatgcggcaatgaaatatttaacaaatgggggaggaacttgcactctcctgcgggattgcagatatgtgaatggactccatggacagaaaagctacgaatgtatggagtgtaggaaagccttcacttcacgtaatcttttaaagacacctgagaatatatactggagagaaactataaagaaaattctatatccatcccatcttttgtggggtttgttttttgtttttgtttttgttgagatgtaattttgctcttgttgcccaggctggagtgcagtggtgcgatcgcggctcaccgcaacctccgcctcccggattcaagcaattctcctgccgcagcctcccaagaagctgggattacaggcatgcgccaccacgcctggctaattttgtaattttagtagagatggggtttctccatgttggtcaggctggtctcaaactcctgacctcaggtgatctgcctgcctcggcctcccaaagtgctgggattacaggtgtgagccacagcacccaacctttttttccccgccgcaccccaagatggtgtctcactctgttgccccaggctggagtgcagtggtgtgatcctggctcactgtaacctctgggttcaagcaattcttctgcctcagccttccaagtagctgggattacaagtgcccaccaccatgcccagctaatttttatatttttagtagagacagtgtttcaccatgttgaccaggctgatcttaaactcttgacctcaaatgatccacccaccttggcctcccaaattgttcgttttacttttttttttttttttttttgagctggagtcttactctgttgcctaggctggagtgaaagtggcgcaacctctgcctcccaggtcaaagcaatcctgcctcaggccccctagtagctggcattacaggcacatgccaccacgcccaactaatttttatatttttagtagagacggggtttcaccatgttggccaggctggtcttgaactcctgacctcaggtaatccacctgccttggcctcccaaagtgctgggattacaggcgtgagccaccacacccggcccccagttctttttttttttttttgagacggagtccttgcccaggctggagtgcagtggcgcgatctcagctcactgcaagctccgcctcctgggttcacgccattctcctgcctcagcctcccgagtagctgggactacaggcgcccgccaccacgcccggctcattttttgtatttttagtggagacggggtttcaccgtgttagccaggatagtcttgatctcctgacctcgtgatccgccctcctcggcctcccaaagtgctgggattataggcgtgagccaccgcgcccggcctccagttcattttaaaaccatgaaaccacccacactggagagccaccttcttaaatgtaagcaatatgggaacatcttcaatgacatctgcaaccattgtcgagattcttcgtaggaagaattaaaggaatggggaagaaggacttgggccccagcaggccttttgtggcatccagtcagaagttaggaaacaccctctagggcagtgcctgccctcagctctcacacatgactggagagaagtgagaagactcccagaatctgccttttaagtttccatcagtgtcctcgggtcagactgtgggaatgctgtacttctaagacaaaggttcgcatcttacagtttttccccaagtgggatctgcctatgcacatcctaattcacagacattgtcagcattgcattattccagggctgttttgaggtcatctccagctccatttcccatctcaaacctacactttggacacttgtttaaacattcacatctgaatttctctgtggcaaccgcaggtggctctgaggtgagagactgaagaagcagagcctgtatcatgggacacacaccccttgaccacacagcatccactctcctgcggttaccagccctgcaccaaccaccacagtcagaataatctcaaaactgctagtggagtcacagacacactctgccatgtcttagctgtaggacactcagaattcttacctcccctaacttgctttccctgttttctggcacattctaccctgagatattcagcggcatatgcactgatgatgctccggccttctcacgtcagtgcatgtcacatgcatcctgctccaggactggtttcctagcctcccgctaagactagcacttagctcttcttggaaaaggacccaccctgcagcgctccagctctgttgtgtatgggaggtgctggtgtcagggttcacaagccatggaactaccttgcttcacatcacaaggcaaggtgaactcaactcccaataaactgcttgctggagcctccgaattctccgttttctgaattgcataggcacgataggggtcgggtctgtcctttgttggagtcagtccccccttttcttagcaagtcagtgtgttttagaagggaggtggcagcattgagggaaaccaggtcaccatccaccctcgtaacaacagtctccctgggtgggtcccagaagtgatctttgtgtcgctcgggtcggaactctttaggcctctggcctccaccctcccccaacagcagggatgggtcaggtggcagcatccaaaaccacggtgaagatactagggtccagaggccgactggagcaaggtttgctggcagatgaggcctcagtggaagtgacggctactgtggagatgcagtggaggacctggtggctgagccaggagatgcacaccttcgcttctctcaccaggaacattcgcttctctcaccaggaacatttatggactcagtggcctctgaggatgtggctgtgaacttcacacttgaggagtgggctttgctggatccttcccagaagaaactctacagagatgtgatgcgggaaacctttagaaacctggcctgtgtaggaaaaaaatgggaagaccagagcattgaagattggtacaaaaatcaggggagaattttaagaaatcatatggaagagggactcagtgaaagtaaagaatatgatcaatgtggagaagccttcagtcagattctcaatcttaatctgaacaagaaaattcctactatagtaagaccatgtgaatgtagtttgtgtgggaaagtcttcatgcatcattcatcccttagtaggcacatcagatctcaccttggacacaaaccatatgactatcaggaatatggagagaaaccatataaatgtaagcagtgtgggaaagccttcagttcttgtcaatcctttcgaagacatgaaagaactcacactggtgagaaaccctatgcatgtccggaatgtgggaaagccttcatttctctcccaagtgttcgaagacacatgattaagcacactggagatggaccatataaatgtcaggaatgtgggaaagcctttgatcgcccaagtttatttcagatacatgaaagaactcacactggagagaaaccctatgaatgtcaggaatgtgcaaaagctttcatttctcttccaagttttcaaagacacatgattaggcacactggagatggaccttataaatgtcaggaatgtggaaaagcctttgaccgccccagtttatttcgaatacatgaaagaactcatactggagagaaaccccatgaatgtaaacagtgtgggaaggccttcatttctttcacaaattttcaaagtcatatgattaggcacactggggatggaccttataaatgtaaagtatgtgggagagcctttatttttcccagttatgttcgaaagcatgaaagaactcatactggggagaaaccctatgaatgtaataaatgtggtaaaaccttcagttcttccagtaatgttcgaacacatgaaaggactcacactggagagaagccctatgaatgtaaggaatgcgggaaagccttcatttctctcccaagtgtccgaagacacatgataaagcacactggagatggaccttataaatgtcaggtatgtggtagagcctttgactgtcccagttcatttcaaatacacgaaagaactcacactggagagaaaccctatgaatgtcaggtatgtgggaaagccttcatttctcttaaaaggattagaaaacatatgatactgcacactggagatggaccttataaatgtcaggtatgtggtaaagcctttgactgtcctagttctgtccgaacacatgaaagaactcatactggagaaaaaccctatgaatgtaaagaatgtgggaaagcattcaattatgccagttccattagaatacatgaaagaactcataccggagaaaaaccctatgaatgtaagcaatgtggaaaaacgttcagttattccagttcctttcaaagacatgaaagagctcataatggagataaaccttacgtaaagaatgtgggaaagctttcatttatcacacaaccttcgaatacctgtgaaaatgaatagtggaggacaggtctacaagtatctacatatctaaagaatatggaaagtcttcagtttgctttctgggtttcagacttgtttgggagctcacccctttctcctgtttctcacttttggaataggaatctctatcctgtgcctgtctcatattttggaaatacatgactagtttggttttcaccggttcggagctgaagaagaattttgcctcagcatgaattgagtctcatccatatctgagtgatgtgatattgagatgacactttggagtttgagtttaaacattaggcttcatgctggaattaactgagacttttgaggcctttgggatgagatgaatatattttacatgtgatgacatggattttgggggccagaggtgtaatgttttggctgagtgtatgccacctcagattcatatgttgaaaccttacccccgtgccccccctctcccccacaatgtgatggtatttggaggccctgtctctggtggtttttaggattggaggacatcatgaagatggaggccttgtaattgggattagtttcctgataggaatccctagagagctagctttgcccttcaccatgagagggtgcagtgagaagatagctatctttgaaccgggaagcaggcccttaccagacatggactatgccagtgccttgatattggacttcccagcctcccaaaccatgagaaataaatgtttgttgattaatt

SEQ ID NO: 9195 - protein, 553 aa, Homo sapiens; identical to SEQ ID NO: 1169

SEQ ID NO: 9196 - DNA, 2707 bp, Homo sapiens
gtccgctgcgtttgggttccggtctccgcttctccagtggccccggtggctccaccgcagcgtctggcgcgctgggacctgcacaggccggagagagccgtaggcaggaccccgggacaccctggaagccaggaaatgacagagtttcgctctgtcgcccaggctggagtgcagtgggaagatctcagctcactgcaaccttcgccttccgggttcaagcaattctcctgcctcagcctcctgagtaactgggattacaggcatgcgccgccacgaccggctactttttgtatttttggtagaaactgggtttctccatgttggccaggactcagtggcctctgaggatgtggctgtgaacttcacacttgaggagtgggctttgctggatccttcccagaagaaactctacagagatgtgatgcgggaaacctttagaaacctggcctgtgtaggaaaaaaatgggaagaccagagcattgaagattggtacaaaaatcaggggagaattttaagaaatcatatggaagagggactcagtgaaagtaaagaatatgatcaatgtggagaagccttcagtcagattctcaatcttaatctgaacaagaaaattcctactatagtaagaccatgtgaatgtagtttgtgtgggaaagtcttcatgcatcattcatcccttagtaggcacatcagatctcaccttggacacaaaccatatgactatcaggaatatggagagaaaccatataaatgtaagcagtgtgggaaagccttcagttcttgtcaatcctttcgaagacatgaaagaactcacactggtgagaaaccctatgcatgtccggaatgtgggaaagccttcatttctctcccaagtgttcgaagacacatgattaagcacactggagatggaccatataaatgtcaggaatgtgggaaagcctttgatcgcccaagtttatttcagatacatgaaagaactcacactggagagaaaccctatgaatgtcaggaatgtgcaaaagctttcatttctcttccaagttttcaaagacacatgattaggcacactggagatggaccttataaatgtcaggaatgtggaaaagcctttgaccgccccagtttatttcgaatacatgaaagaactcatactggagagaaaccccatgaatgtaaacagtgtgggaaggccttcatttctttcacaaattttcaaagtcatatgattaggcacactggggatggaccttataaatgtaaagtatgtgggagagcctttatttttcccagttatgttcgaaagcatgaaagaactcatactggggagaaaccctatgaatgtaataaatgtggtaaaaccttcagttcttccagtaatgttcgaacacatgaaaggactcacactggagagaagccctatgaatgtaaggaatgcgggaaagccttcatttctctcccaagtgtccgaagacacatgataaagcacactggagatggaccttataaatgtcaggtatgtggtagagcctttgactgtcccagttcatttcaaatacacgaaagaactcacactggagagaaaccctatgaatgtcaggtatgtgggaaagccttcatttctcttaaaaggattagaaaacatatgatactgcacactggagatggaccttataaatgtcaggtatgtggtaaagcctttgactgtcctagttctgtccgaacacatgaaagaactcatactggagaaaaaccctatgaatgtaaagaatgtgggaaagcattcaattatgccagttccattagaatacatgaaagaactcataccggagaaaaaccctatgaatgtaagcaatgtggaaaaacgttcagttattccagttcctttcaaagacatgaaagagctcataatggagataaaccttacgtaaagaatgtgggaaagctttcatttatcacacaaccttcgaatacctgtgaaaatgaatagtggaggacaggtctacaagtatctacatatctaaagaatatggaaagtcttcagtttgctttctgggtttcagacttgtttgggagctcacccctttctcctgtttctcacttttggaataggaatctctatcctgtgcctgtctcatattttggaaatacatgactagtttggttttcaccggttcggagctgaagaagaattttgcctcagcatgaattgagtctcatccatatctgagtgatgtgatattgagatgacactttggagtttgagtttaaacattaggcttcatgctggaattaactgagacttttgaggcctttgggatgagatgaatatattttacatgtgatgacatggattttgggggccagaggtgtaatgttttggctgagtgtatgccacctcagattcatatgttgaaaccttacccccgtgccccccctctcccccacaatgtgatggtatttggaggccctgtctctggtggtttttaggattggaggacatcatgaagatggaggccttgtaattgggattagtttcctgataggaatccctagagagctagctttgcccttcaccatgagagggtgcagtgagaagatagctatctttgaaccgggaagcaggcccttaccagacatggactatgccagtgccttgatattggacttcccagcctcccaaaccatgagaaataaatgtttgttgatt

SEQ ID NO: 9197 - protein, 574 aa, Homo sapiens
MRRHDRLLFVFLVETGFLHVGQDSVASEDVAVNFTLEEWALLDPSQKKLYRDVMRETFRNLACVGKKWEDQSIEDWYKNQGRILRNHMEEGLSESKEYDQCGEAFSQILNLNLNKKIPTIVRPCECSLCGKVFMHHSSLSRHIRSHLGHKPYDYQEYGEKPYKCKQCGKAFSSCQSFRRHERTHTGEKPYACPECGKAFISLPSVRRHMIKHTGDGPYKCQECGKAFDRPSLFQIHERTHTGEKPYECQECAKAFISLPSFQRHMIRHTGDGPYKCQECGKAFDRPSLFRIHERTHTGEKPHECKQCGKAFISFTNFQSHMIRHTGDGPYKCKVCGRAFIFPSYVRKHERTHTGEKPYECNKCGKTFSSSSNVRTHERTHTGEKPYECKECGKAFISLPSVRRHMIKHTGDGPYKCQVCGRAFDCPSSFQIHERTHTGEKPYECQVCGKAFISLKRIRKHMILHTGDGPYKCQVCGKAFDCPSSVRTHERTHTGEKPYECKECGKAFNYASSIRIHERTHTGEKPYECKQCGKTFSYSSSFQRHERAHNGDKPYVKNVGKLSFITQPSNTCENE

SEQ ID NO: 9198 - DNA, 533 bp, Homo sapiens
gattttctgcctgttggatctcttaattactgctggaggggtgctgcagtctccaactatacaaaggaatattttctttcaaccaacttgatctgtctacgtctgatggcctggaatccttcaggaaagtgtggtcagctggattttgtcagaacgtggatttctacgggccttctggcctctcatgtttgatgaagggaacagaagaaaatggtttcacttcttcagtgtatatttatttattcatggatacctttttcagtttttatcctgtgtttctttttttctttctttctttctttttttttttttttttgagacagagttttgctcttgtcacccaggctggagtgcagtggcacaatctctactcactgcaacgtccgcctcctggtctcaagcgattctccttcctcagcctcccaagtagctggtattacaggtgcccaccaccacgcccagtgaattttttgtatttttagtagagacagggttttgccatgttgggctggctggtctcaaactcctgatct

SEQ ID NO: 9199 - protein, 96 aa, Homo sapiens
MKGTEENGFTSSVYIYLFMDTFFSFYPVFLFFFLSFFFFFFLRQSFALVTQAGVQWHNLYSLQRPPPGLKRFSFLSLPSSWYYRCPPPRPVNFLYF

SEQ ID NO: 9200 - DNA, 1008 bp, Homo sapiens
agcggctgcagcctcctgatttcatcgaccccctagccaacaagaaaccccggatatcgcagcaagtgtgggtgtgtgagtgtgcgtatgtggggaccccccagggcatggtggggtctgaggcgtgtgttcccatttagggctgaatgaagccatgacttggaaaggtggtggggggtggatggcggctgtgactcagggcccagggatcacatgggggtcactgctgccatcagcagtcaggcagggagaacagaaatgcaaaaatacagatgtctatttttctaaactggggggtggaggggtgcctcctgacagcttccaaagagctgactgtggagggcccacagtgtatcccacccctgcccgagagtctctctcctttgggacccccgggttcccagagctccgaggaaactgatccttcatgtttcaatagctgttgttgtttttctctttgggccgggccgggccggggaagggccgagcaggctccaggaggcctccagagtcagctggaccttgctgtgtcgcccgcaggcagccctgcagacaccggtgaggtgggatgatttcaggaggtcccagcccgggactgcccgcccctctgccctgggaaccagtccaaggggctgtcagttgaatttgcctttttgttgttgttgttgtttttgttgtttatttgttctccttttaaggaattatgaagctaagaaaagttttgtgttttgggggttggtggacaaagttctagctgattaaatatggtctaacttattgatactatttttttttcttttaatgttgtactgtggagaaaaactattttgagccatggggttggtgtttacaagaactttccacttttgccaaaatgttacaattgaaaggcatctatctgcgtcttcagtttcctgatattttcttaaaagatctagtgtcctttttgtacactaaacaggtgaatgctgacttttttcattctccaataaatttcactgaactgaa

SEQ ID NO: 9201 - protein, 99 aa, Homo sapiens [sequence omitted]

SEQ ID NO: 9202 - DNA, 487 bp, Homo sapiens
gtgagtgggggcagcggggtgtcccagaggcccttccgtgaccgagtgctgcacctcctggcactacggccctaccgcaaggctgagctgcctgggaaccagtccaaggggctgtcagttgaatttgcctttttgttgttgttgttgtttttgttgtttatttgttctccttttaaggaattatgaagctaagaaaagttttgtgttttgggggttggtggacaaagttctagctgattaaatatggtctaacttattgatactatttttttttcttttaatgttgtactgtggagaaaaactattttgagccatggggttggtgtttacaagaactttccacttttgccaaaatgttacaattgaaaggcatctatctgcgtcttcagtttcctgatattttcttaaaagatctagtgtcctttttgtacactaaacaggtgaatgctgacttttttcattctccaataaatttcactgaactgaa

SEQ ID NO: 9203 - protein, 43 aa, Homo sapiens
MLQLKGIYLRLQFPDIFLKDLVSFLYTKQVNADFFHSPINFTE

SEQ ID NO: 9204 - DNA, 4081 bp, Homo sapiens
gcggggcgtggccggcgtggcggcgctggagccgggaagggggcgcgggggagagatggtcgcaagatggcggcgctgaaggaggataggagctacgggctgtcgtgcgggcgggttagcgacggcagcaaggtgtcggtgttccacgtgaagctcaccgacagtgccctgagggccttcgagagctaccgcgccagacaggattctgtttcactgaggccatctatccgatttcaaggaagccaagggcctgagagctctgcacagctggatgtggggatatggacatgatgatccatgggcttccagcacatctccatcccccagcctgactgccccgcagaggcgcggacgttctccttctacctctccaacatcggccgcgacaacccccagggcagcttcgactgcatccagcagtatgtctccagtcatggggaagttcacctggactgcctgggcagcatacaggacaagatcacggtgtgtgccaccgacgactcctaccagaaggcgcggcagagcatggcccaggcggaggaggagacgcggagccgaagtgccattgtcatcaaggctggaggccgctacctgggcaagaaggttcagtttcggaaaccagccccaggtgcaacagacgcggtgccctcccggaagcgggcaacccccatcaacttggcgagtgccatcaggaagagtggtgccagtgccgtgagtgggggcagcggggtgtcccagaggcccttccgtgaccgagtgctgcacctcctggcactacggccctaccgcaaggctgagctgctgctgcgactgcagaaggacggcctgacgcaggcggacaaggacgcgctggatggcctcctccagcaggtggccaacatgagtgctaaggacggcacgtgtacactgcaggactgcatgtacaaggatgtgcagaaggactggcctggctactcggagggggaccagcagctgctgaagcgggtgctcgtccggaagctgtgccagccacagagcactggcagcctccttggagaccctgctgcctccagccccccaggcgagcgtgggcgctcggcctcgcccccacagaagcggctgcagcctcctgatttcatcgaccccctagccaacaagaaaccccggatatcgcacttcactcagagagctcagcctgccgtcaacgggaagctgggcgtgcccaatggccgtgaggccttgctgcccaccccgggcccaccagccagcacggacaccctcagctccagcactcacctgcccccgcggctggagcccccgagggcccacgaccccctggccgatgtcagcaatgacctgggccacagcggccgagactgtgagcacggagaggcggctgccccagcccccactgtgcgcctcggcctgcccctgctgacggactgtgcccagcccagcaggccacacggcagcccctcgcgcagcaagcccaagaagaagtccaagaagcacaaagacaaggagagggcggctgaggacaagccccgggcccagcttccagactgtgcacctgccacccatgccacccccggagccccagcagacaccccaggtttaaacggaacctgcagcgtttccagtgttcccacgtccacgtcggagacgcctgactacttgctgaagtacgcagccatctcctcttcggagcagcgccagagctacaagaacgacttcaatgccgagtacagcgagtaccgcgacctgcacgcccgcattgagcgcatcacgcggcggttcacccagctcgacgcccagctccggcagctctcccagggctccgaggagtatgagactactcgagggcagattttgcaggaatatcgaaaaatcaaaaagaccaacaccaactacagccaggagaagcaccgctgcgagtacctgcacagcaagctggcccacatcaagaggctcatcgccgagtacgaccagcggcagctgcaggcttggccctagccgccctccccgatggcggggatctgggagggtcgggggagcaaaaggcggtgagagaggatttatttaaaaaaataaacccgaggaagatgctcatctgagccagcaccgccggctttcagggcagcccctgcagacgtctggccctggcgggtggctgcaagcccacctcggccctccctgcgcttcctgagcagtccctgcttatgatgggctccccaggaagcccactgcctcctccctggctgcagcctccggggttcagcctcctgtctcgccagaagactcctaggcccttggggtggcgcgcctgccttttctagttttatacaaagacagccacttttagctactgctaatgagacttgagtctatttttgtacaaaagagaagcaaaatcttttttctaaacctgtgcctccctctcctcggacacccagggtctagccgctgccctgggtcctgcctgcagtattacagaggtcgtcgaaaggtgcagctgcgttctgagggcgtggggaatgggcaggtggcctctgctggtctctggctctacgtttaggcacccctttccccagcctctcctccttgggcagggtctctgctccagcaagcaaacagggtggcccaggtggctattttgagaactccagctggtgcccccagacagctgctcagagccaagggggcagagggctttcagcgcccccaggcctgccctgctatttcaggccctcagctgtcgggggccactgtgtttctgtgctccaagttgagactcggccgcagcggcgtcagacttttctttgcgatgtcctcggtttcccatttgttgctgctgctgctcattccacactgttgagaccttgtggtctcgatgctgctggcctccctccgtccctctgtccacttgtgggtcctggggtcgtcttagcagagccaccgccaaggtttgcactcagggaggggctgatggagggctgggcgccatggggtcagggaggccccagggacccatgggcagagctggggagccaggaggatgggtctgcctgctctgggggtgcaggctctgcagacaccccaattgctgctctgttgctgtgcctagtctagtgtcccccaaagcatcggggggccacgcaagtgtgggtgtgtgagtgtgcgtatgtggggaccccccagggcatggtggggtctgaggcgtgtgttcccatttagggctgaatgaagccatgacttggaaaggtggtggggggtggatggcggctgtgactcagggcccagggatcacatgggggtcactgctgccatcagcagtcaggcagggagaacagaaatgcaaaaatacagatgtctatttttctaaactggggggtggaggggtgcctcctgacagcttccaaagagctgactgtggagggcccacagtgtatcccacccctgcccgagagtctctctcctttgggacccccgggttcccagagctccgaggaaactgatccttcatgtttcaatagctgttgttgtttttctctttgggccgggccgggccggggaagggccgagcaggctccaggaggcctccagagtcagctggaccttgctgtgtcgcccgcaggcagccctgcagacaccggtgaggtgggatgatttcaggaggtcccagcccgggactgcccgcccctctgccctgggaaccagtccaaggggctgtcagttgaatttgcctttttgttgttgttgttgtttttgttgtttatttgttctccttttaaggaattatgaagctaagaaaagttttgtgttttgggggttggtggacaaagttctagctgattaaatatggtctaacttattgatactatttttttttcttttaatgttgtactgtggagaaaaactattttgagccatggggttggtgtttacaagaactttccacttttgccaaaatgttacaattgaaaggcatctatctgcgtcttcagtttcctgatattttcttaaaagatctagtgtcctttttgtacactaaacaggtgaatgctgacttttttcattctccaataaatttcactgaactgaa

SEQ ID NO: 9205 - protein, 564 aa, Homo sapiens [sequence omitted]

SEQ ID NO: 9206 - DNA, 4027 bp, Homo sapiens
ggcggggcggggcgtggccggcgtggcggcgctggagccgggaagggggcgcgggggagagatggtcgcaagatggcggcgctgaaggaggataggagctacgggctgtcgtgcgggcgggttagcgacggcagcaaggtgtcggtgttccacgtgaagctcaccgacagtgccctgagggccttcgagagctaccgcgccagacaggattctgtttcactgaggccatctatccgatttcaaggaagccaagggcacatctccatcccccagcctgactgccccgcagaggcgcggacgttctccttctacctctccaacatcggccgcgacaacccccagggcagcttcgactgcatccagcagtatgtctccagtcatggggaagttcacctggactgcctgggcagcatacaggacaagatcacggtgtgtgccaccgacgactcctaccagaaggcgcggcagagcatggcccaggcggaggaggagacgcggagccgaagtgccattgtcatcaaggctggaggccgctacctgggcaagaaggttcagtttcggaaaccagccccaggtgcaacagacgcggtgccctcccggaagcgggcaacccccatcaacttggcgagtgccatcaggaagagtggtgccagtgccgtgagtgggggcagcggggtgtcccagaggcccttccgtgaccgagtgctgcacctcctggcactacggccctaccgcaaggctgagctgctgctgcgactgcagaaggacggcctgacgcaggcggacaaggacgcgctggatggcctcctccagcaggtggccaacatgagtgctaaggacggcacgtgtacactgcaggactgcatgtacaaggatgtgcagaaggactggcctggctactcggagggggaccagcagctgctgaagcgggtgctcgtccggaagctgtgccagccacagagcactggcagcctccttggagaccctgctgcctccagccccccaggcgagcgtgggcgctcggcctcgcccccacagaagcggctgcagcctcctgatttcatcgaccccctagccaacaagaaaccccggatatcgcacttcactcagagagctcagcctgccgtcaacgggaagctgggcgtgcccaatggccgtgaggccttgctgcccaccccgggcccaccagccagcacggacaccctcagctccagcactcacctgcccccgcggctggagcccccgagggcccacgaccccctggccgatgtcagcaatgacctgggccacagcggccgagactgtgagcacggagaggcggctgccccagcccccactgtgcgcctcggcctgcccctgctgacggactgtgcccagcccagcaggccacacggcagcccctcgcgcagcaagcccaagaagaagtccaagaagcacaaagacaaggagagggcggctgaggacaagccccgggcccagcttccagactgtgcacctgccacccatgccacccccggagccccagcagacaccccaggtttaaacggaacctgcagcgtttccagtgttcccacgtccacgtcggagacgcctgactacttgctgaagtacgcagccatctcctcttcggagcagcgccagagctacaagaacgacttcaatgccgagtacagcgagtaccgcgacctgcacgcccgcattgagcgcatcacgcggcggttcacccagctcgacgcccagctccggcagctctcccagggctccgaggagtatgagactactcgagggcagattttgcaggaatatcgaaaaatcaaaaagaccaacaccaactacagccaggagaagcaccgctgcgagtacctgcacagcaagctggcccacatcaagaggctcatcgccgagtacgaccagcggcagctgcaggcttggccctagccgccctccccgatggcggggatctgggagggtcgggggagcaaaaggcggtgagagaggatttatttaaaaaaataaacccgaggaagatgctcatctgagccagcaccgccggctttcagggcagcccctgcagacgtctggccctggcgggtggctgcaagcccacctcggccctccctgcgcttcctgagcagtccctgcttatgatgggctccccaggaagcccactgcctcctccctggctgcagcctccggggttcagcctcctgtctcgccagaagactcctaggcccttggggtggcgcgcctgccttttctagttttatacaaagacagccacttttagctactgctaatgagacttgagtctatttttgtacaaaagagaagcaaaatcttttttctaaacctgtgcctccctctcctcggacacccagggtctagccgctgccctgggtcctgcctgcagtattacagaggtcgtcgaaaggtgcagctgcgttctgagggcgtggggaatgggcaggtggcctctgctggtctctggctctacgtttaggcacccctttccccagcctctcctccttgggcagggtctctgctccagcaagcaaacagggtggcccaggtggctattttgagaactccagctggtgcccccagacagctgctcagagccaagggggcagagggctttcagcgcccccaggcctgccctgctatttcaggccctcagctgtcgggggccactgtgtttctgtgctccaagttgagactcggccgcagcggcgtcagacttttctttgcgatgtcctcggtttcccatttgttgctgctgctgctcattccacactgttgagaccttgtggtctcgatgctgctggcctccctccgtccctctgtccacttgtgggtcctggggtcgtcttagcagagccaccgccaaggtttgcactcagggaggggctgatggagggctgggcgccatggggtcagggaggccccagggacccatgggcagagctggggagccaggaggatgggtctgcctgctctgggggtgcaggctctgcagacaccccaattgctgctctgttgctgtgcctagtctagtgtcccccaaagcatcggggggccacgcaagtgtgggtgtgtgagtgtgcgtatgtggggaccccccagggcatggtggggtctgaggcgtgtgttcccatttagggctgaatgaagccatgacttggaaaggtggtggggggtggatggcggctgtgactcagggcccagggatcacatgggggtcactgctgccatcagcagtcaggcagggagaacagaaatgcaaaaatacagatgtctatttttctaaactggggggtggaggggtgcctcctgacagcttccaaagagctgactgtggagggcccacagtgtatcccacccctgcccgagagtctctctcctttgggacccccgggttcccagagctccgaggaaactgatccttcatgtttcaatagctgttgttgtttttctctttgggccgggccgggccggggaagggccgagcaggctccaggaggcctccagagtcagctggaccttgctgtgtcgcccgcaggcagccctgcagacaccggtgaggtgggatgatttcaggaggtcccagcccgggactgcccgcccctctgccctgggaaccagtccaaggggctgtcagttgaatttgcctttttgttgttgttgttgtttttgttgtttatttgttctccttttaaggaattatgaagctaagaaaagttttgtgttttgggggttggtggacaaagttctagctgattaaatatggtctaacttattgatactatttttttttcttttaatgttgtactgtggagaaaaactattttgagccatggggttggtgtttacaagaactttccacttttgccaaaatgttacaattgaaaggcatctatctgcgtcttcagtttcctgatattttcttaaaagatctagtgtcctttttgtacactaaacaggtgaatgctgacttttttcattctccaataaatttcactgaactgaa

SEQ ID NO: 9207 - protein, 621 aa, Homo sapiens
MAALKEDRSYGLSCGRVSDGSKVSVFHVKLTDSALRAFESYRARQDSVSLRPSIRFQGSQGHISIPQPDCPAEARTFSFYLSNIGRDNPQGSFDCIQQYVSSHGEVHLDCLGSIQDKITVCATDDSYQKARQSMAQAEEETRSRSAIVIKAGGRYLGKKVQFRKPAPGATDAVPSRKRATPINLASAIRKSGASAVSGGSGVSQRPFRDRVLHLLALRPYRKAELLLRLQKDGLTQADKDALDGLLQQVANMSAKDGTCTLQDCMYKDVQKDWPGYSEGDQQLLKRVLVRKLCQPQSTGSLLGDPAASSPPGERGRSASPPQKRLQPPDFIDPLANKKPRISHFTQRAQPAVNGKLGVPNGREALLPTPGPPASTDTLSSSTHLPPRLEPPRAHDPLADVSNDLGHSGRDCEHGEAAAPAPTVRLGLPLLTDCAQPSRPHGSPSRSKPKKKSKKHKDKERAAEDKPRAQLPDCAPATHATPGAPADTPGLNGTCSVSSVPTSTSETPDYLLKYAAISSSEQRQSYKNDFNAEYSEYRDLHARIERITRRFTQLDAQLRQLSQGSEEYETTRGQILQEYRKIKKTNTNYSQEKHRCEYLHSKLAHIKRLIAEYDQRQLQAWP

SEQ ID NO: 9208 - DNA, 778 bp, Homo sapiens
agcggctgcagcctcctgatttcatcgaccccctagccaacaagaaaccccggatatcgcagcaagtgtgggtgtgtgagtgtgcgtatgtggggaccccccagggcatggtggggtctgaggcgtgtgttcccatttagggctgaatgaagccatgacttggaaaggtggtggggggtggatggcggctgtgactcagggcccagggatcacatgggggtcactgctgccatcagcagtcaggcagggagaacagaaatgcaaaaatacagatgtctatttttctaaactggggggtggaggggtgcctcctgacagcttccaaagagctgactgtggagggcccacagtgtatcccacccctgcccgagagtctctctcctttgggacccccgggttcccagagctccgaggaaactgatccttcatgtttcaatagctgttgttgtttttctctttgggccgggccgggccggggaagggccgagcaggctccaggaggcctccagagtcagctggaccttgctgtgtcgcccgcaggcagccctgcagacaccggtgaggtgggatgatttcaggaggtcccagcccgggactgcccgcccctctgccctgggaaccagtccaaggggctgtcagttgaatttgcctttttgttgttgttgttgtttttgttgtttatttgttctccttttaaggaattatgaagctaagaaaagttttgtgttttgggggttggtggacaaagttctagctgattaaatatggtctaacttat

SEQ ID NO: 9209 - protein, 99 aa, Homo sapiens [sequence omitted]

SEQ ID NO: 9210 - DNA, 3797 bp, Homo sapiens
ggcggggcggggcgtggccggcgtggcggcgctggagccgggaagggggcgcgggggagagatggtcgcaagatggcggcgctgaaggaggataggagctacgggctgtcgtgcgggcgggttagcgacggcagcaaggtgtcggtgttccacgtgaagctcaccgacagtgccctgagggccttcgagagctaccgcgccagacaggattctgtttcactgaggccatctatccgatttcaaggaagccaagggcacatctccatcccccagcctgactgccccgcagaggcgcggacgttctccttctacctctccaacatcggccgcgacaacccccagggcagcttcgactgcatccagcagtatgtctccagtcatggggaagttcacctggactgcctgggcagcatacaggacaagatcacggtgtgtgccaccgacgactcctaccagaaggcgcggcagagcatggcccaggcggaggaggagacgcggagccgaagtgccattgtcatcaaggctggaggccgctacctgggcaagaaggttcagtttcggaaaccagccccaggtgcaacagacgcggtgccctcccggaagcgggcaacccccatcaacttggcgagtgccatcaggaagagtggtgccagtgccgtgagtgggggcagcggggtgtcccagaggcccttccgtgaccgagtgctgcacctcctggcactacggccctaccgcaaggctgagctgctgctgcgactgcagaaggacggcctgacgcaggcggacaaggacgcgctggatggcctcctccagcaggtggccaacatgagtgctaaggacggcacgtgtacactgcaggactgcatgtacaaggatgtgcagaaggactggcctggctactcggagggggaccagcagctgctgaagcgggtgctcgtccggaagctgtgccagccacagagcactggcagcctccttggagaccctgctgcctccagccccccaggcgagcgtgggcgctcggcctcgcccccacagaagcggctgcagcctcctgatttcatcgaccccctagccaacaagaaaccccggatatcgcacttcactcagagagctcagcctgccgtcaacgggaagctgggcgtgcccaatggccgtgaggccttgctgcccaccccgggcccaccagccagcacggacaccctcagctccagcactcacctgcccccgcggctggagcccccgagggcccacgaccccctggccgatgtcagcaatgacctgggccacagcggccgagactgtgagcacggagaggcggctgccccagcccccactgtgcgcctcggcctgcccctgctgacggactgtgcccagcccagcaggccacacggcagcccctcgcgcagcaagcccaagaagaagtccaagaagcacaaagacaaggagagggcggctgaggacaagccccgggcccagcttccagactgtgcacctgccacccatgccacccccggagccccagcagacaccccaggtttaaacggaacctgcagcgtttccagtgttcccacgtccacgtcggagacgcctgactacttgctgaagtacgcagccatctcctcttcggagcagcgccagagctacaagaacgacttcaatgccgagtacagcgagtaccgcgacctgcacgcccgcattgagcgcatcacgcggcggttcacccagctcgacgcccagctccggcagctctcccagggctccgaggagtatgagactactcgagggcagattttgcaggaatatcgaaaaatcaaaaagaccaacaccaactacagccaggagaagcaccgctgcgagtacctgcacagcaagctggcccacatcaagaggctcatcgccgagtacgaccagcggcagctgcaggcttggccctagccgccctccccgatggcggggatctgggagggtcgggggagcaaaaggcggtgagagaggatttatttaaaaaaataaacccgaggaagatgctcatctgagccagcaccgccggctttcagggcagcccctgcagacgtctggccctggcgggtggctgcaagcccacctcggccctccctgcgcttcctgagcagtccctgcttatgatgggctccccaggaagcccactgcctcctccctggctgcagcctccggggttcagcctcctgtctcgccagaagactcctaggcccttggggtggcgcgcctgccttttctagttttatacaaagacagccacttttagctactgctaatgagacttgagtctatttttgtacaaaagagaagcaaaatcttttttctaaacctgtgcctccctctcctcggacacccagggtctagccgctgccctgggtcctgcctgcagtattacagaggtcgtcgaaaggtgcagctgcgttctgagggcgtggggaatgggcaggtggcctctgctggtctctggctctacgtttaggcacccctttccccagcctctcctccttgggcagggtctctgctccagcaagcaaacagggtggcccaggtggctattttgagaactccagctggtgcccccagacagctgctcagagccaagggggcagagggctttcagcgcccccaggcctgccctgctatttcaggccctcagctgtcgggggccactgtgtttctgtgctccaagttgagactcggccgcagcggcgtcagacttttctttgcgatgtcctcggtttcccatttgttgctgctgctgctcattccacactgttgagaccttgtggtctcgatgctgctggcctccctccgtccctctgtccacttgtgggtcctggggtcgtcttagcagagccaccgccaaggtttgcactcagggaggggctgatggagggctgggcgccatggggtcagggaggccccagggacccatgggcagagctggggagccaggaggatgggtctgcctgctctgggggtgcaggctctgcagacaccccaattgctgctctgttgctgtgcctagtctagtgtcccccaaagcatcggggggccacgcaagtgtgggtgtgtgagtgtgcgtatgtggggaccccccagggcatggtggggtctgaggcgtgtgttcccatttagggctgaatgaagccatgacttggaaaggtggtggggggtggatggcggctgtgactcagggcccagggatcacatgggggtcactgctgccatcagcagtcaggcagggagaacagaaatgcaaaaatacagatgtctatttttctaaactggggggtggaggggtgcctcctgacagcttccaaagagctgactgtggagggcccacagtgtatcccacccctgcccgagagtctctctcctttgggacccccgggttcccagagctccgaggaaactgatccttcatgtttcaatagctgttgttgtttttctctttgggccgggccgggccggggaagggccgagcaggctccaggaggcctccagagtcagctggaccttgctgtgtcgcccgcaggcagccctgcagacaccggtgaggtgggatgatttcaggaggtcccagcccgggactgcccgcccctctgccctgggaaccagtccaaggggctgtcagttgaatttgcctttttgttgttgttgttgtttttgttgtttatttgttctccttttaaggaattatgaagctaagaaaagttttgtgttttgggggttggtggacaaagttctagctgattaaatatggtctaacttat

SEQ ID NO: 9211 - protein, 621 aa, Homo sapiens; identical to SEQ ID NO: 9207

SEQ ID NO: 9212 - DNA, 2295 bp, Homo sapiens
ggcggggcggggcgtggccggcgtggcggcgctggagccgggaagggggcgcgggggagagatggtcgcaagatggcggcgctgaaggaggataggagctacgggctgtcgtgcgggcgggttagcgacggcagcaaggtgtcggtgttccacgtgaagctcaccgacagtgccctgagggccttcgagagctaccgcgccagacaggattctgtttcactgaggccatctatccgatttcaaggaagccaagggcacatctccatcccccagcctgactgccccgcagaggcgcggacgttctccttctacctctccaacatcggccgcgacaacccccagggcagcttcgactgcatccagcagtatgtctccagtcatggggaagttcacctggactgcctgggcagcatacaggacaagatcacggtgtgtgccaccgacgactcctaccagaaggcgcggcagagcatggcccaggcggaggaggagacgcggagccgaagtgccattgtcatcaaggctggaggccgctacctgggcaagaaggttcagtttcggaaaccagccccaggtgcaacagacgcggtgccctcccggaagcgggcaacccccatcaacttggcgagtgccatcaggaagagtggtgccagtgccgtgagtgggggcagcggggtgtcccagaggcccttccgtgaccgagtgctgcacctcctggcactacggccctaccgcaaggctgagctgctgctgcgactgcagaaggacggcctgacgcaggcggacaaggacgcgctggatggcctcctccagcaggtggccaacatgagtgctaaggacggcacgtgtacactgcaggactgcatgtacaaggatgtgcagaaggactggcctggctactcggagggggaccagcagctgctgaagcgggtgctcgtccggaagctgtgccagccacagagcactggcagcctccttggagaccctgctgcctccagccccccaggcgagcgtgggcgctcggcctcgcccccacagaagcggctgcagcctcctgatttcatcgaccccctagccaacaagaaaccccggatatcgcacttcactcagagagctcagcctgccgtcaacgggaagctgggcgtgcccaatggccgtgaggccttgctgcccaccccgggcccaccagccagcacggacaccctcagctccagcactcacctgcccccgcggctggagcccccgagggcccacgaccccctggccgatgtcagcaatgacctgggccacagcggccgagactgtgagcacggagaggcggctgccccagcccccactgtgcgcctcggcctgcccctgctgacggactgtgcccagcccagcaggccacacggcagcccctcgcgcagcaagcccaagaagaagtccaagaagcacaaagacaaggagagggcggctgaggacaagccccgggcccagcttccagactgtgcacctgccacccatgccacccccggagccccagcagacaccccaggtttaaacggaacctgcagcgtttccagtgttcccacgtccacgtcggagacgcctgactacttgctgaagtacgcagccatctcctcttcggagcagcgccagagctacaagaacgacttcaatgccgagtacagcgagtaccgcgacctgcacgcccgcattgagcgcatcacgcggcggttcacccagctcgacgcccagctccggcagctctcccagggctccgaggagtatgagactactcgagggcagattttgcaggaatatcgaaaaatcaaaaagaccaacaccaactacagccaggagaagcaccgctgcgagtacctgcacagcaagctggcccacatcaagaggctcatcgccgagtacgaccagcggcagctgcaggcttggccctagccgccctccccgatggcggggatctgggagggtcgggggagcaaaaggcggtgagagaggatttatttaaaaaaataaacccgaggaagatgctcatctgagccagcaccgccggctttcagggcagcccctgcagacgtctggccctggcgggtggctgcaagcccacctcggccctccctgcgcttcctgagcagtccctgcttatgatgggctccccaggaagcccactgcctcctccctggctgcagcctccggggttcagcctcctgtctcgccagaagactcctaggcccttggggtggcgcgcctgccttttctagttttatacaaagacagccacttttagctactgct

SEQ ID NO: 9213 - protein, 621 aa, Homo sapiens; identical to SEQ ID NO: 9207

SEQ ID NO: 9214 - DNA, 2045 bp, Homo sapiens
ggcggggcggggcgtggccggcgtggcggcgctggagccgggaagggggcgcgggggagagatggtcgcaagatggcggcgctgaaggaggataggagctacgggctgtcgtgcgggcgggttagcgacggcagcaaggtgtcggtgttccacgtgaagctcaccgacagtgccctgagggccttcgagagctaccgcgccagacaggattctgtttcactgaggccatctatccgatttcaaggaagccaagggcacatctccatcccccagcctgactgccccgcagaggcgcggacgttctccttctacctctccaacatcggccgcgacaacccccagggcagcttcgactgcatccagcagtatgtctccagtcatggggaagttcacctggactgcctgggcagcatacaggacaagatcacggtgtgtgccaccgacgactcctaccagaaggcgcggcagagcatggcccaggcggaggaggagacgcggagccgaagtgccattgtcatcaaggctggaggccgctacctgggcaagaaggttcagtttcggaaaccagccccaggtgcaacagacgcggtgccctcccggaagcgggcaacccccatcaacttggcgagtgccatcaggaagagtggtgccagtgccgtgagtgggggcagcggggtgtcccagaggcccttccgtgaccgagtgctgcacctcctggcactacggccctaccgcaaggctgagctgctgctgcgactgcagaaggacggcctgacgcaggcggacaaggacgcgctggatggcctcctccagcaggtggccaacatgagtgctaaggacggcacgtgtacactgcaggactgcatgtacaaggatgtgcagaaggactggcctggctactcggagggggaccagcagctgctgaagcgggtgctcgtccggaagctgtgccagccacagagcactggcagcctccttggagaccctgctgcctccagccccccaggcgagcgtgggcgctcggcctcgcccccacagaagcggctgcagcctcctgatttcatcgaccccctagccaacaagaaaccccggatatcgcacttcactcagagagctcagcctgccgtcaacgggaagctgggcgtgcccaatggccgtgaggccttgctgcccaccccgggcccaccagccagcacggacaccctcagctccagcactcacctgcccccgcggctggagcccccgagggcccacgaccccctggccgatgtcagcaatgacctgggccacagcggccgagactgtgagcacggagaggcggctgccccagcccccactgtgcgcctcggcctgcccctgctgacggactgtgcccagcccagcaggccacacggcagcccctcgcgcagcaagcccaagaagaagtccaagaagcacaaagacaaggagagggcggctgaggacaagccccgggcccagcttccagactgtgcacctgccacccatgccacccccggagccccagcagacaccccaggtttaaacggaacctgcagcgtttccagtgttcccacgtccacgtcggagacgcctgactacttgctgaagtacgcagccatctcctcttcggagcagcgccagagctacaagaacgacttcaatgccgagtacagcgagtaccgcgacctgcacgcccgcattgagcgcatcacgcggcggttcacccagctcgacgcccagctccggcagctctcccagggctccgaggagtatgagactactcgagggcagattttgcaggaatatcgaaaaatcaaaaagaccaacaccaactacagccaggagaagcaccgctgcgagtacctgcacagcaagctggcccacatcaagaggctcatcgccgagtacgaccagcggcagctgcaggcttggccctagccgccctccccgatggcggggatctgggagggtcgggggagcaaaaggcggtgagagaggatttatttaaaaaaataaacccgaggaagatgctcatctgagccagc

SEQ ID NO: 9215 - protein, 621 aa, Homo sapiens; identical to SEQ ID NO: 9207

SEQ ID NO: 9216 - DNA, 452 bp, Homo sapiens
ctgtgcacctgccacccatgccacccccggagccccagcagacaccccaggtttaaacggaacctgcagcgtttccagtgttcccacgtccacgtcggagacgcctgactacttgctgaagtacgcagccatctcctcttcggagcagcgccagagctacaagaacgacttcaatgccgagtacagcgagtaccgcgacctgcacgcccgcattgagcgcatcacgcggcggttcacccagctcgacgcccagctccggcagctctcccagggctccgaggagtatgaggtagagcccccccgctgcctactgtgccctggctctggcgggagccagggcccacttgggcgcgcaccatcgccaccacgagcttggtggccccagagtctggcccttccccaggcagcgcttctccccctggtgcactccatgcagcaaccccatggttctg

SEQ ID NO: 9217 - protein, 39 aa, Homo sapiens
MPSTASTATCTPALSASRGGSPSSTPSSGSSPRAPRSMR

SEQ ID NO: 9218 - DNA, 448 bp, Homo sapiens
gtgtattgaggatacatctgaaattgataaaatcatttctgtatcggaaagaaagccactgcaagaaggtctagaaaacgcactaaattgtagttgtggtcttaggcgacgcgcacttcagtcttcctgcccctcccctccccctgaaggggcgaagggctgagcgtcatcatggacactttgctcatggatggccgattggggtggcccatgggctcctctggctggccctgtcctggagctgccttgtggagcgtgcaattcagtgtctagtggaaaggacgggatgatctgggtggggcacagaccaagggcgtggaactttgtcagcagcaagagatgcaggccctgctggccatcttgtctttgtcctgtctggccagagactgggatgccccagagactcaggtcaagccaggggtcatttgttttcagcttagtgaccttt

SEQ ID NO: 9219 - protein, 85 aa, Homo sapiens
MADWGGPWAPLAGPVLELPCGACNSVSSGKDGMIWVGHRPRAWNFVSSKRCRPCWPSCLCPVWPETGMPQRLRSSQGSFVFSLVT

SEQ ID NO: 9220 - DNA, 969 bp, Homo sapiens
gatggtcgcaagatggcggcgctgaaggaggataggagctacgggctgtcgtgcgggcgggttagcgacggcagcaaggtgtcggtgttccacgtgaagctcaccgacagtgccctgagggccttcgagagctaccgcgccagacaggattctgtttcactgaggccatctatccgatttcaaggaagccaagggtcatggggaagttcacctggactgcctgggcagcatacaggacaagatcacggtgtgtgccaccgacgactcctaccagaaggcgcggcagagcatggcccaggcggaggaggagacgcggagccgaagtgccattgtcatcaaggctggaggccgctacctgggcaagaaggttcagtttcggaaaccagccccaggtgcaacagacgcggtgccctcccggaagcgggcaacccccatcaacttggcgagtgccatcaggaagagtggtgccagtgccgtgagtgggggcagcggggtgtcccagaggcccttccgtgaccgagtgctgcacctcctggcactacggccctaccgcaaggctgagctgctgctgcgactgcagaaggacggcctgacgcaggcggacaaggacgcgctggatggcctcctccagcaggtgggtgccgccccgatgtcttgtctttaccagtggtctccgcagatggtcttgtgcgggtgggatgggccagagcatggagactgggattgggactggcaaggaagagcccttcctggggtctctcacaggttcagaacctgcctgagagccagggcctcctggattagaacaagcttagggggccatggatgcgtttctgggcatggccccgactgtccagggttgagaggtggactcagcatggagcccaggccctccttcactgtctgctgacacacgggccgtggggcctggcacagtggattcaggcttcagttgcagacgatttgtgg

SEQ ID NO: 9221 - protein, 206 aa, Homo sapiens
MAQAEEETRSRSAIVIKAGGRYLGKKVQFRKPAPGATDAVPSRKRATPINLASAIRKSGASAVSGGSGVSQRPFRDRVLHLLALRPYRKAELLLRLQKDGLTQADKDALDGLLQQVGAAPMSCLYQWSPQMVLCGWDGPEHGDWDWDWQGRALPGVSHRFRTCLRARASWIRTSLGGHGCVSGHGPDCPGLRGGLSMEPRPSFTVC

SEQ ID NO: 9222 - DNA, 623 bp, Homo sapiens
gatggtcgcaagatggcggcgctgaaggaggataggagctacgggctgtcgtgcgggcgggttagcgacggcagcaaggtgtcggtgttccacgtgaagctcaccgacagtgccctgagggccttcgagagctaccgcgccagacaggattctgtttcactgaggccatctatccgatttcaaggaagccaaggggtaagtttttgtcttaatcattcatatttggaatcttgggactggtatagtctcaggtctgtccttgctcgctgggtacagcagcagctcatggcagtgtttgggccctgtctgccaccatgcaaggctgggttctaggcccccaggatagccccttggctggggccacaccaggacgtgtcgggtgcacgtcacaggctgcttgggcaatgggcggctctcctctcccagtggctcccttcatgcagcgatgtgcacctagcttccactctgatagggcaggggcccccaacccccagcactggactggttaggaactgcccacacagcaggaggtgagctgtgggtgagtgagcacgaccacctgagctctgcctcctgtcagctgagcctgttattagattcttacaggagcgcgaaccctattg

SEQ ID NO: 9223 - protein, 106 aa, Homo sapiens
MAALKEDRSYGLSCGRVSDGSKVSVFHVKLTDSALRAFESYRARQDSVSLRPSIRFQGSQGVSFCLNHSYLESWDWYSLRSVLARWVQQQLMAVFGPCLPPCKAGF

SEQ ID NO: 9224 - DNA, 1720 bp, Homo sapiens
gttacaccttctctggtcagtctcacagctgcgcggtggcagacaggacttgttccacagtggtaactgggatagagctgatgtggccccaaccccacctcccttcccgccctgccatgtcggaagaaacccgacgagcaaattggcagcagcaaagaaaaagttgagagactatcagtggaggaacagccctggtgttcctacaggagtgaaaaagaaaattaaaaattgcagtaaccccgagacaaccacttctggtggttgccactcacctggagatgtaatggaggcatgtagacaaatacaactggagagagatacatttgctgagattcttaaaggagagagagccacatggcagcagaggatgaatcagatgtcggagcagatgcacacactgagggaggagaaggagtgtattatgaatcggttacaggagctggagacaagcttggtggaattgagaaaacagatgactgaactcccagccctggcacccccagcaaggccctccgaggtggagcagcagctacaagaggaggctgagcacctgagggaggagctggagagtctggcaggacagctccaagcccaggagcacctggaagctgccagccagagaaccagcagctacaggcccagctgagcctcatggctctccctgaggaaggtacgggagatcactcagaggaagaggagggagcccaggaggaaggggggactgttagcagataggagtgaggagtttagaacagctggtttacagctgctcattcccctctggagagggactggcccagggttatacagtgacggttgaggcagaggtgggcccaccctacttcccttgttgggtcgcgtgaggacccctctagctctgtgccctaggaggtagactggacggagggtcgtctcggcccatgaagagcatcctgcaggacctggaaagccaggagtccatggtggcatttttaacatcagctgtagccagtgcagatggggagcaggctcggctccgtgggcagctgaaggagcaaaggctgcgctgccggtgcctggctcacctgctggcctgggcccagaagcagccagaggcagcagccccagccccagggactgggatggattctgtgtgtggggggacccaccgggccctgcagggtgccatggagaaactgcagagctgctttatgcagctgatgcaggaaaaggtggacctgaaagagcgggtggaggagctggaacatcgctgcatccagctctctggagagacagacaccatcggagtctacactgccctctctcagccagggggcagcgctgaaggagcagcaccgagaggaggaggagcacatccacaggctagcccaggacaaggaggagatgaagatctttgccaggtgaccctcaccagcagcgtggagcctgcacaaggagaggccggggagggttctcccctcgacaaccccagtgcacagcagatcatgcagctgtttggtgagatgcagaaccctcaggagcgcccaggcttgggcagcatcccctgcattctgttttcccaccaggctgacaaaaaccaccaggtgaagatcaccctcatctgaaagccagttgccttcagcaaagccaggagaaggggggtgggaggctccgcccccccatgtccctcccacccctttgcagtcacccctttacccttaaagtaaatggatttagccat

SEQ ID NO: 9225 - protein, 227 aa, Homo sapiens
MKSILQDLESQESMVAFLTSAVASADGEQARLRGQLKEQRLRCRCLAHLLAWAQKQPEAAAPAPGTGMDSVCGGTHRALQGAMEKLQSCFMQLMQEKVDLKERVEELEHRCIQLSGETDTIGVYTALSQPGGSAEGAAPRGGGAHPQASPGQGGDEDLCQVTLTSSVEPAQGEAGEGSPLDNPSAQQIMQLFGEMQNPQERPGLGSIPCILFSHQADKNHQVKITLI

SEQ ID NO: 9226 - DNA, 652 bp, Homo sapiens
agtctcacagctgcgcggtggcagacaggacttgttccacagtggtaactgggatagagctgatgtggccccaaccccacctcccttcccgccctgccatgtcggaagaaacccgacgagcaaattggcagcagcaaagaaaaagttgagagactatcagtggaggaacagccctggtgttcctacaggagtgaaaaagaaaattaaaaattgcagtaaccccgagacaaccacttctggtggttgccactcacctggagatgtaatggaggcatgtagacaaatacaactggagagagatacatttgctgagattcttaaaggagagagagccacatggcagcagaggatgaatcagatgtcggagcagctgaactcccagccctggcacccccagcaaggccctccgaggtggagcagcagctacaagaggaggctgagcacctgagggaggagctggagagtctggcaggacagctccaagcccaggagcacctggaagctgccagccagagaaccagcagctacaggcccagctgagcctcatggctctccctgaggaaggtacgggagatcactcagaggaagaggagggagcccaggaggaaggggggactgttagcagataggagtgaggagtttagaacagctg

SEQ ID NO: 9227 - protein, 67 aa, Homo sapiens
MAAEDESDVGAAELPALAPPARPSEVEQQLQEEAEHLREELESLAGQLQAQEHLEAASQRTSSYRPS

SEQ ID NO: 9228 - DNA, 1110 bp, Homo sapiens
ggttggcagcctggagtctggagtgcaggtgccgggcaggcagcactgggagcgctcggcgacttggctggaggccgaaggtgccgcccctcggggaccagagcgtctttgcaagcgtggttggggaactccagagtcccacatcacagttcagcatgtgcctcaggagcttcagcaagtctttcgtggaaggagagtctgccggtgacgggggaagcaggccatcagcccgcccagcttcatctcaggccgcttccaacaccgccaagcaaactcccttggcaagatccatgcaaggccgcggctgaccaccgggaggcagcagcctactctgcaaggcactttctttacccgacccccacccccttttaacaggtggcaggaaacctgctggcccagccatctgccgcacccacccttcactcccagtcccatctccccatagcacagatttccctatcatgagccctgacgtgacctgggtgtcctcttgccttcctctgcccaaggaattcctacagagattctttctctatcctcctttgtacatttccaaggaattgtttccccagggcccctccccttgaagaaattagacaggaagctggagtagatggttccctctttcccacctctcacactcccaagctctggttaactctctgtgggccagtggctagattccccaacacagatgacaactgaacaatacacatgcagcgtaagaatgttgtcgctgccaccagccacttacagatacaccattgctaaggtccacccaactggactgtttccccctcccatagactaagccccaaaggccaaaaagtaaaacccgctaccccaaacctgcctgtaactgtttgaccagaggccagctgtcccaggatgcggttaagacgtctactttgcacaagagaactggcaagaaaaacatctccaggaagcggtcagacacatggcacaaaggacccccccccttttctttttccttcaccctgatccagttctatgtcctataaaaccttgctctagcctataagtggggctgccttctctgcttttgtcaagaggtagccaggcaggactgacaataaatcagcttgcctg

SEQ ID NO: 9229 - protein, 50 aa, Homo sapiens
MCLRSFSKSFVEGESAGDGGSRPSARPASSQAASNTAKQTPLARSMQGRG

SEQ ID NO: 9230 - DNA, 423 bp, Homo sapiens
ctggagtgcaggtgccgggcaggcagcactgggagcgctcggcgacttggctggaggccgaaggtgccgcccctcggggaccagagcgtctttgcaagcccatagaagaaacagtgaagagtaagaggaaaaggctgccagaaggggagtctcacaacaggaagaagtaacagctacgcatagaggaagggaagctgttcaagagcgggcccaggaacacaacacagaaccattgtcgtggttggggaactccagagtcccacatcacagttcagcatgtgcctcaggagcttcagcaagtctttcgtggaaggagagtctgccggtgacgggggaagcaggccatcagcccgcccagcttcatctcaggccgcttccaacaccgccaagcaaactcccttggcaagatccatgcaaggccgc

SEQ ID NO: 9231 - protein, 48 aa, Homo sapiens
MCLRSFSKSFVEGESAGDGGSRPSARPASSQAASNTAKQTPLARSMQG

SEQ ID NO: 9232 - DNA, 1095 bp, Homo sapiens
gtctttgtctctcgctgcagtcggagtatggtctagtgttcgctgttctgcgtcctctggtcctagaggcccatcctctgtggccctgtgacctgcaggtattgggagatccacagctaagacgctaggaccccctggaagcctagaaacgggagtgttgacatttagggatgtggccatagaattctctctggaggagtggcaatgcctggacaccgcacagcagaatttatataggaatgtgatgttagagaactacagaaacctggtcttcgtgggtattgctgcctctaagccagacctgatcacctgtctggagcaaggaaaagaaccttggaatgtgaagagacatgagatggtagctgaacccccagttgtatgttcttattttgcccgagacctttggccaaagcagggcaaaaaaaattatttccaaaaagtgatactgagaagatataaaaaatgtggatgtgaaaatttacagttaagaaaatactgtaaaagcatggatgagtgtaaggtgcacaaagaatgttacaatggacttaaccagtgtttgacgactacccagaacaaaatatttcaatgtgacaaatatgtgaaagtctttcataaattttcaaattcaaacagacatacgataagacatactggaaagaaatctttcaaatgtaaagaatgtgaaaagtcattttgcatgctttcacacttagctcaacataaaagaattcatagtggagagaaaccctacaaatgtaaagaatgtgggaaagcctataatgagacctcaaacctttctacacataaaagaattcatactggaaagaaaccctacaaatgcgaagagtgtggaaaagcctttaaccggctctcacaccttactacacataagataattcatactggaaagaaaccctacaaatgtgaggagtgtggcaaagcttttaaccaatctgcaaaccttactacacataagagaattcatactggagagaaaccctacaaatgtgaagaatgtggcagagcttttagccagtcctcaacccttactgcacataagataattcatgctggagagaaaccttacaaatgtga

SEQ ID NO: 9233 - protein, 282 aa, Homo sapiens
MLENYRNLVFVGIAASKPDLITCLEQGKEPWNVKRHEMVAEPPVVCSYFARDLWPKQGKKNYFQKVILRRYKKCGCENLQLRKYCKSMDECKVHKECYNGLNQCLTTTQNKIFQCDKYVKVFHKFSNSNRHTIRHTGKKSFKCKECEKSFCMLSHLAQHKRIHSGEKPYKCKECGKAYNETSNLSTHKRIHTGKKPYKCEECGKAFNRLSHLTTHKIIHTGKKPYKCEECGKAFNQSANLTTHKRIHTGEKPYKCEECGRAFSQSSTLTAHKIIHAGEKPYK

SEQ ID NO: 9234 - DNA, 3176 bp, Homo sapiens
cagttgtatgttcttattttgcccgagacctttggccaaagcagggcaaaaaaaattatttccaaaaagtgatactgagaagatataaaaaatgtggatgtgaaaatttacagttaagaaaatactgtaaaagcatggatgagtgtaaggtgcacaaagaatgttacaatggacttaaccagtgtttgacgactacccagaacaaaatatttcaatgtgacaaatatgtgaaagtctttcataaattttcaaattcaaacagacatacgataagacatactggaaagaaatctttcaaatgtaaagaatgtgaaaagtcattttgcatgctttcacacttagctcaacataaaagaattcatagtggagagaaaccctacaaatgtaaagaatgtgggaaagcctataatgagacctcaaacctttctacacataaaagaattcatactggaaagaaaccctacaaatgcgaagagtgtggaaaagcctttaaccggctctcacaccttactacacataagataattcatactggaaagaaaccctacaaatgtgaggagtgtggcaaagcttttaaccaatctgcaaaccttactacacataagagaattcatactggagagaaaccctacaaatgtgaagaatgtggcagagcttttagccagtcctcaacccttactgcacataagataattcatgctggagagaaaccttacaaatgtgaagaatgtggcaaagcttttagccagtcctcaacccttactacacataagataattcatactggagagaaattctacaaatgtgaagaatgtggtaaggcctttagccagttatcccaccttactacacataagagaattcattctggagagaaaccctacaagtgtgaagaatgtggcaaagcttttaaacaatcctcaacccttactacacataagagaattcatgctggagagaaattctacaaatgtgaagtatgtagcaaagcctttagccggttctcacaccttactacacataagagaattcatactggagagaagccctacaaatgtgaagaatgtggcaaagcttttaacctatcgtcacaacttactacacataagataattcatactggagagaaaccctacaaatgtgaagaatgtggcaaagcttttaaccagtcctcaactctttctaaacataaggtaattcatactggagagaagccctacaaatatgaagaatgtggcaaagcttttaaccagtcctcacaccttactacacataagatgattcatactggagagaaaccctacaagtgtgaagaatgtggcaaagcctttaacaactcctctattcttaacagacataagatgattcatactggagagaaactctacaaacctgaaagttgtaacaatgcttgtgacaacattgcaaagatttccaaatataaaagaaattgtgctggtgagaaataatagaaatatgaatgtgacaaagcctttaaatggttatcacactggattgtaggtaaggtaattcattctggagaaaacttctacaagtgtgaatgaacagtgtggcaaaacttacacaatgtgctcaaactttgttcaacatcagagaatttatatcgaagaaaaaccctgtaaatgtaataaatttagaaaaaaacatagcaaaatattacaatgtgataaatatgtgaaagtctttcataaattttcaaattcaaacagatataagataagacatactggaaagaaacctttcaaatgtaaagaatgtgaaaagtcattttgcatgctttcacacttagctcaacataaaagaattcatactagagagaaaccctacaaatgtaaagaatgtgggaaagcctataatgaggcctcaaacctttctacacataagagaattcatactggaaagaaaccctacaaatgcgaacagtgtggaaaagcctttaaccggctctcacaccttactacacataagataattcatactggaaagaaaccctacatatgtgaggactgtggcaaagcttttaaccaatctgcaaaccttactacacataagagaattcatactggagagaaaccctacaaatgtgaagaaagtggcaaagcttttagccagtcctcaacccttactacacataagataattcatgctggagagaaaccctacaaatatgaagaatgtggcaaatcttttaaccaatcctcaacccttactacacgtaagataattcatactggagagaaattctgcaaatgtgaagaatggggcaaggcctttagccggttatcccaccttactacacataagagaattcattctggagagaaaccctacaaatgtgaagaatgtggcaaagcttttaaacaatcctcaacccttactacacataagaggattcattctggagagaaattctacaaatgtgaagtatgtagcaaagcctttagccggttctcacaccttactacacataagagaattcattctggagagaagccctacaaatgtgaagaatgtggcaaagcttttaacctatcttcacaccttactacacataagataattcatactggagagaaaccctacaaatgtgaagaatgtggcaaagcttttaacctatcttcacaccttactacacataagataattcatactggagagaaaccctacaaatgtgaagaatgtggcaaagcttttaaccagtcctcaactctttctaaacataaggtaattcatactggagagaaaccctacaaatgtggagaatgtggcaaagcctttaaccagtcctcacaccttactacacataagataattcatactggagagaaaccctacaagtgtgaagaatgtggcaaagcctttaacaactcctctattcttaacagacataagatgattcatactggagagaaattctacaaacctgaaagttgtgacaatgcttgtgacaacatctcaaacatttccaaacataaaagaaattgtgctggtgagaaaacatagaaatatgaataatgtgacaaagcctttaaatggttatcacacttgtttgtaagtagggtaattcatactggagaaaacatcacgagtcctttaaagtgctgaagaggatttattttgaagacaaacattacaaatataaagagagttatagt

SEQ ID NO: 9235 - protein, 478 aa, Homo sapiens
MCSNFVQHQRIYIEEKPCKCNKFRKKHSKILQCDKYVKVFHKFSNSNRYKIRHTGKKPFKCKECEKSFCMLSHLAQHKRIHTREKPYKCKECGKAYNEASNLSTHKRIHTGKKPYKCEQCGKAFNRLSHLTTHKIIHTGKKPYICEDCGKAFNQSANLTTHKRIHTGEKPYKCEESGKAFSQSSTLTTHKIIHAGEKPYKYEECGKSFNQSSTLTTRKIIHTGEKFCKCEEWGKAFSRLSHLTTHKRIHSGEKPYKCEECGKAFKQSSTLTTHKRIHSGEKFYKCEVCSKAFSRFSHLTTHKRIHSGEKPYKCEECGKAFNLSSHLTTHKIIHTGEKPYKCEECGKAFNLSSHLTTHKIIHTGEKPYKCEECGKAFNQSSTLSKHKVIHTGEKPYKCGECGKAFNQSSHLTTHKIIHTGEKPYKCEECGKAFNNSSILNRHKMIHTGEKFYKPESCDNACDNISNISKHKRNCAGEKT

SEQ ID NO: 9236 - DNA, 618 bp, Homo sapiens
tgtgacatgttaccatgttcaacagctaaatgatgtgactcttttctcctgagtgagccctactcataagccttgaacccagatgatttaactctcctatctgggcttcgcctatggagaacactgtgacatacctctgcacccatcatctaggtgatgtgactctcctctcctgcctggttctggctcacagaagggaatgtaacatgtctctggatccagcacctaggtgggattgtgacatacctaggcctagctcacaggtgtgatgatgactgtcatatgtggacccaaccaacagaaaagattttgactctcatggctagaattaggggaatagattcagggaatacacctgcagattggtagcataggtatactgcatggtgttgaagtttggacacttttaactatcccattgcccaagcagtgtacactacacatgggtttttcttcgatataaattctctgatgttgaacaaagtttgagcaattgcctcagggtttgctctaatacagaatgaatacaacaagatctgtgttacaagtaaagttaccacaacttcgtttatatttgtaatgtttgtcttcaaaataaatcctcttcagcactttaaa

SEQ ID NO: 9237 - protein, 51 aa, Homo sapiens
MENTVTYLCTHHLGDVTLLSCLVLAHRRECNMSLDPAPRWDCDIPRPSSQV

SEQ ID NO: 9238 - DNA, 201 bp, Homo sapiens
cttttatgaaaatgcagtacatgttaaaaattttagattatgtgtgaacttaatttcttaattcaacatttttaacagtttaaatattgtgcattcaatcaagtcacattattccacttactttaacctagtccaccttactcaagggtgtaggtaaaaggtggtaacaactatttggtaaaagaatgcactaacatctgt

SEQ ID NO: 9239 - protein, 31 aa, Homo sapiens
FNIFNSLNIVHSIKSHYSTYFNLVHLTQGCR

SEQ ID NO: 9240 - DNA, 572 bp, Homo sapiens
tgcataggacctgcactgtacccctcatgtaaagtgtgctctctaactttagtctttattgtaaactttacaaccaccacatactcacatacaaagaataaaaaaaaatttctttttttcttgaaagtcagtgatttacattttactctattaaatctgttccacattcctgtaataaggctgttgaaatgaaccctctttccccagaaggtcacctgtgtgaatgtgaataaactgacactggcgaggaccagctcagcacactcacttgaactttcgctctgcttttcagggaatgaaaatgcccttgaagagtaaaaataaagtgactgctgattaagcagagtttcacatgaaaaaagttgtgaaagccgaggctggactgtgctgccgccatctccgctcactgcaacctccctgcctgatttctcctgcctcagcctgcagactgcctgggattgcaggcgcgcgccgccacgcctgactggtttttgcattttttggtggagactgggttttgccgtgttggccgggctggtctccagctcctgaccgcgagtgatccgcctgcc

SEQ ID NO: 9241 - protein, 43 aa, Homo sapiens [sequence omitted]

SEQ ID NO: 9242 - DNA, 1821 bp, Homo sapiens
aatcatttattaagcattgccctggcctaagacaccacatgggtcatttcttccaggctccaacttgcttctgctttgccatatggtaacacgccgtattatggaagcaccatcattaccgccatttgcaggggaagcctaaagagataaatgccagccagcatccctgtctctggggccctggagaggccttcaacacacctggcctcactgccctgtggcttcaacaaagaggccgagcatctcctataaaccttgaggtccatggatgacatagcggaatgatggatttcagaaaaggcaggtgcttcccactctttaaatttttgtttattctttccaagtttcccatcaacagccctgcagtaaaaattcagggcttcagagacaaatatttcatgagtacagactgtgatgaggaaaagcaagccattccctctctatcaggatccagagcacactgctgttacgactccagaaccgataaggaagctatgtgtggaagtatgagctcaggtcgccttctgaccctctgtgacggtctatttcaggcagttatggatagataacattacagacactgggatctttaacaagtgacacaaacaagagaagaagcaataagaaaatggctgagaagtggcagagtcaaagttccgatgcaggcccatgggccctcttggttcacctcctccagcccaggcttctaaaactacttcccatacctgctgtattgcagcaaccatgctaatttagcaacttcccatcccagatgcataaagaagatggaaccaattcaccatgaatctatccacccaggcatttagacacaaaggtgaaaataacaacaggccctgtcctcgagaaactcctcgtccaacaggggaagggggagagtgccagtaaacagggccgttgagctctgtcccagcagtggggacaggcttgcatagaaccaccctcactcctgcagcaacttccctcatgccagacaagaatagagtgaaaggagacccccaccttagctttcttggcctggggctccatcctgctgtgcctagcaagaacacaacacacagacacacaccaatagatacatgtatcttaccactactgggggagaaagaaaagaaaaaataaatcactgggaaccgcagcagggtgagaacccagacctcagcaagtcccaatttcagaggtgacagcatctttaaatgccgcaggagtgcgctcctagctgaggcaggtgtgtggattcaacagttgaccccagctgtcgcagagcgcgaggaagctgcgcagtaaaccccttacatatcaacctctgaggaccggtttttctgcacctggtggtccttctagacgtctaggaggatcgtgttctcaggagagggttcttcagcatctgtgctgaagaacactgccccagcgggtcacatgcaagattccaccttcgagcaacatagctgacactctgcagcccagttgtcacttgtaacaaaccccagtgggtcacatagtgaggggaggcaaggctgcgtaaggcagtggctgaactatcccagaaaacaaggatcacaggcccccagtgacaccaatgttgcagaaacacctgcagtggcaagtcagatgtcctccaggaccaggcagataacaaggagtaggggtctgcagaggcctcgggagggtctgcaccatccaaagaaatcaattgttctgcacagtggtaaggatccagtgttcccagcacttccaaacatttgaatgaagccagaattccagataattatgtgaaatccccaattactaaatattggcaac

SEQ ID NO: 9243 - protein, 95 aa, Homo sapiens
MMDFRKGRCFPLFKFLFILSKFPINSPAVKIQGFRDKYFMSTDCDEEKQAIPSLSGSRAHCCYDSRTDKEAMCGSMSSGRLLTLCDGLFQAVMDR

SEQ ID NO: 9244 - DNA, 618 bp, Homo sapiens
gccatttgcaggggaagcctaaagaggctgataaaatgactagctacacaggacccagagggatgtgccgctccacctggttcccgccgcatcttcccccgaggagccactagtcccttcctcctggaacagataaatgccagccagcatccctgtctctggggccctggagaggccttcaacacacctggcctcactgccctgtggcttcaacaaagaggccgagcatctcctataaaccttgaggtccatggatgacatagcggaatgatggatttcagaaaagacacaatgaacaaaaaccagagcttttgaatacagatttccagtaaaaccaaacccagcttgggtcagatgcacctttccagcaaccaccatctcagcaacaacctgccagctgtcaactggaagttcagcttctgggaacttcagcccccttctcagaggagcaaggtcctagcaccaacagcacctgcagtggagcccaagtatggctgcttcatggagaaggcaggtatctgtttgcgtgcaaatccgtgagtgcttgcatctcgtgtatttgaaaatcctgtttaagaatgcagaggtccatatagtgtcattaaaacaaatgagtat

SEQ ID NO: 9245 - protein, 61 aa, Homo sapiens
MHLSSNHHLSNNLPAVNWKFSFWELQPPSQRSKVLAPTAPAVEPKYGCFMEKAGICLRANP

SEQ ID NO: 9246 - DNA, 435 bp, Homo sapiens
cagtcttcatttctcagcggaaaagccactcccttgagactctccaggcaccccccaaccgcattttttatcaagtgtctaaaagacacaatgaacaaaaaccagagcttttgaatacagatttccagtaaaaccaaacccagcttgggtcagatgcacctttccagcaaccaccatctcagcaacaacctgccagctgtcaactggaagttcagcttctgggaacttcagcccccttctcagaggagcaaggtcctagcaccaacagcacctgcagtggagcccaagtatggctgcttcatggagaaggcaggtatctgtttgcgtgcaaatccgtgagtgcttgcatctcgtgtatttgaaaatcctgtttaagaatgcagaggtccatatagtgtcattaaaacaaatgagtataaccctttggtcatctag

SEQ ID NO: 9247 - protein, 61 aa, Homo sapiens; identical to SEQ ID NO: 9245

SEQ ID NO: 9248 - DNA, 482 bp, Homo sapiens
atccctttgctctcaaactccccgatgcaatgccttctgatttcaacagaaaagcaagaggctccaggcaccccattcagggactgccaccaaagtacccgcaaatccttcatgaaaggggagacattgacacattctttttttattctctggcatggagatgaacatacttggtatcatccactctcctgcactgctggctcagtcaccagccttttcaggcacggggtctgcaacctctctcatggtttgtgccatctcttgagtcaggagccacagacctcatccaggacttacagcctgacagattaaggagtccgataaatccacacattctgagttgttatgctgggcaaaagccatgcccatccacaagccagactcttggcctccactggaagctttggaactttattcccatcaaacactgacctaatccttgcactgagactgctatttacattaaaattggtcacataatg

SEQ ID NO: 9249 - protein, 95 aa, Homo sapiens
MQCLLISTEKQEAPGTPFRDCHQSTRKSFMKGETLTHSFFILWHGDEHTWYHPLSCTAGSVTSLFRHGVCNLSHGLCHLLSQEPQTSSRTYSLTD

SEQ ID NO: 9250 - DNA, 518 bp, Homo sapiens
tccaactacaaaaatgaaaggagagacccaatcttgctatgctgcccaggctagtcttgaacccctgacctcaagcaatcctcctgtctcagcctcccaagtctctgggattacagacacttccaataagaagactgagccaccaggcagatgttataagcaatgtgagcttgtgctggaagaagagagaatccaccagtgtcctgggccctccaaggcctctctgagggaaagacatttggacagagatgccaaggacaaggaagaggcagtcacccacctctgggcaaggtgcaaaagcccaagattcacgttcatgtgttgcaagcacaaaaagaagatcctgtggctggagtagagtgaggaacagtgagaatggtaggagcagagggcagagaaagtggcaaaaacaaggtcgcatgaggccttgtaagccatggtcaagaggtgatattttattttaaatgaatccaaagtaattgcaagtttttgagcaagtaagcaaaatgctcctttgc

SEQ ID NO: 9251 - protein, 114 aa, Homo sapiens
MKGETQSCYAAQASLEPLTSSNPPVSASQVSGITDTSNKKTEPPGRCYKQCELVLEEERIHQCPGPSKASLRERHLDRDAKDKEEAVTHLWARCKSPRFTFMCCKHKKKILWLE

SEQ ID NO: 9252 - DNA, 2685 bp, Homo sapiens
agcgagcaggcccagtggagaggcatcctggctggtctgcgggtgagagctgatgagcaggagaaactcgtgggggctgtcagatttggccagagacagatgctccaacaggcagatactgtgactgtcagtcggaagccattggcgtttgccagacagtggaaggagagggtcagttcgtcgtgctcttggccgggggcaggcaggcaacctgtcgtgcctttaaggacctttgggtgattagagacaggcaggcagcttgccgcctggaaatgatcaagtggtcagcctgaccaaattcaggacagctgaagggtctgactgggcactgtgtgactggtgggttggaggctgtcgtgtggctgagcagagatggccagctgatgggtcacacagttggggatggtgtcaggaggtcaacctgaccagcagagacggctggcaggaaggtcacggaaggccagccaggcatggtgccactgggtgcaggcaggtggcggatctgagtggcctgacacattggatggtcgcttatttgggcagcgtgattgtcagaacagtgtggcaggggctgctgcagggagccatttggacatctgcagggccccgccggaggcctcggatggccacgtagggtctgcctatcaggagaacccccagatgatcacagtccccagagacagccagacccccggggacccagcctctcacagtcagtcctcccacccgagtgaccccgatggcggcctcccagctggcggcgctggaaggagtggactccggtcccagggtgcccggggccagccccggctttctatattccgagggccagcggctggcactggaggctctgttgagcaagggcgcggaggcgttccagacctgcgtgcagcgcgaggagctgtggcccttcctcagtgcggatgaggttcagggcttggcagcggcagctgaagactggacagtggccaagcaggagcccagcgggatggcagagggagccaccaccaccgatgtggacgcgggcagcctgagctactggcctgggcagtcggagcagccggcgcccgtcctgcggctgggctggccagtggactctgcgtggaaaggcatcacccgggcgcagctgtacacccagcctcctggagagggtcagccgcccctcaaggagctggtgcggctggagatccaggctgcccacaagctggtggccgtggtcatggacgtcttcactgacccagacctgcttttggacttggtggatgctgccacgcgccgctgggtacctgtctacctgctcctggaccgccagcagctgcctgccttcctggaactggcccagcagctgggggtgaacccctggaacacggagaacgtggatgtccgtgtcgtgcggggctgcagcttccagagccgctggcgacggcaggtgagcggcaccgtgcgggagaagtttgtgctgctggacggcgagagggtcatctcaggatcctacagcttcacgtggagtgacgcacgcctgcaccgaggcctggtgaccctgctgactggtgaaattgttgacgccttcagccttgagttccggacgctgtacgcggcctcctgcccgctcccacctgcgcccccccagaaaccctcggtcataggtggcctgcagcggggccgcagcccgcaccgcgtgtcccgccgccgctccgtggcccccgcgtcgcctccgccgcctgacggcccgctggcccaccgcctggccgcctgccgcgtctcccctgctaccccggggccggcactcagtgacattctaaggagtgtgcagcgcgcccggacccccagcggccccccggcccggcccagccgctccatgtgggacctaagccgcctgtcccagctgtctggctccagtgatggggacaacgagctcaagaaatcctggggctccaaggacactccagccaaggctctgatgaggcagcggggcactggaggaggcccctggggggaagtggactcccgacctccgtggggcggtgccctgcccctgccccccgcccaccgcctccgctatctgtccccagcccgaaggcggttcggtggggatgctacattcaaacttcaagagcccagaggcgtcaggccgtcagactgggccccccgggcaggacttggggggcaaccctgaacaggagcccaagccaaatctgctggcccacccaaggagcagtgccggacaactgtcggctcagagccctctgcctcaatgccctgccttggacaaggcttctggcctcggcgtctgtcaagcagaagggatgtttgtcacttgttctgcaacttgggccgggagtggtggctcatgcctgtaatccctgcactttgggaggctaaggtgggagggttgcttaaggccaggagttggagaccagcctgggcaacatagtgagaccccatctctacaattaaaaaaacaaattagttgggtgtggtggcgcacgcctgtggtcccagctacgcaggaggctgaggtgggaggatcccttgagctcaggaggtggaggcagcagtgagccaagatcatgcccttgcactccagcctgggcaacacagtgagaggccatctctttaaaaaaaaaaaaaaaagaaaaaagaaaaagaaaggctgatcgaggtggctcactcctgtaatcccag

SEQ ID NO: 9253 - protein, 478 aa, Homo sapiens; identical to SEQ ID NO: 1173

SEQ ID NO: 9254 - DNA, 676 bp, Homo sapiens
gaagccgggaagcaccgcagaagtagaagccggggagccacagcctacgttctcggaaaaagcaggcactggaagggaggccattgagcccggcactagccggtgtggccccggctttctatattccgagggccagcggctggcactggaggctctgttgagcaagggcgcggaggcgttccagacctgcgtgcagcgcgaggagctgtggcccttcctcagtgcggatgaggttcagggcttggcagcggcagctgaagactggacagtggccaagcaggagcccagcgggatggcagagggagccaccaccaccgatgtggacgcgggcagcctgagctactggcctgggcagtcggagcagccggcgcccgtcctgcggctgggctggccagtggactctgcgtggaaaggcatcacccgggcgcagctgtacacccagcctcctggagagggtcagccgcccctcaaggagctggtgcggctggagatccaggctgcccacaagctggtggccgtggtcatggacgtcttcactgacccagacctgcttttggacttggtggatgctgccacgcgccgctgggtacctgtctacctgctcctggaccgccagcagctgcctgccttcctggaactggcccagcagctgggggtgaacccctggaacacggag

SEQ ID NO: 9255 - protein, 127 aa, Homo sapiens
MAEGATTTDVDAGSLSYWPGQSEQPAPVLRLGWPVDSAWKGITRAQLYTQPPGEGQPPLKELVRLEIQAAHKLVAVVMDVFTDPDLLLDLVDAATRRWVPVYLLLDRQQLPAFLELAQQLGVNPWNT

SEQ ID NO: 9256 - DNA, 1878 bp, Homo sapiens
aggtcgaggcctgatgagtgaggccagaagccgggaagcaccgcagaagtagaagccggggagccacagcctacgttctcggaaaaagcaggcactggaagggaggccattgagcccggcactagccggtgtggctccctgctgtggtctggaggaagcagcggcctgggttggtgggattggaatgaagggcttctggtttgcagggatcaagggtccagggtccccgaggttgggtcaggagcctcaaggggataactgaggcttgggagggagacagggcgagatagagactggcccctgtccgggaagaagcgtccgggtagctggcaggagatagcatttaggcagaaaccaggctgggggcagcttgggtagggctccccgcagatcagaggacggcctggaacaggtcccagggccaggccccaggcaggggcagccagcctgaggagggtggctggttaggtggcactcacacctagatgggctgtgaagatcatagacctgtcccatagtaatggagacccctgtagcgcatttcaccctccactgcagcagctggaaggagtgtgaggagggtccagggagcagggtcccccattgacagggtagggaagggtttgccaagccttcggcctttaaggctgagcgagcaggcccagtggagaggcatcctggctggtctgcgggtgagagctgatgagcaggagaaactcgtgggggctgtcagatttggccagagacagatgctccaacaggcagatactgtgactgtcagtcggaagccattggcgtttgccagacagtggaaggagagggtcagttcgtcgtgctcttggccgggggcaggcaggcaacctgtcgtgcctttaaggacctttgggtgattagagacaggcaggcagcttgccgcctggaaatgatcaagtggtcagcctgaccaaattcaggacagctgaagggtctgactgggcactgtgtgactggtgggttggaggctgtcgtgtggctgagcagagatggccagctgatgggtcacacagttggggatggtgtcaggaggtcaacctgaccagcagagacggctggcaggaaggtcacggaaggccagccaggcatggtgccactgggtgcaggcaggtggcggatctgagtggcctgacacattggatggtcgcttatttgggcagcgtgattgtcagaacagtgtggcaggggctgctgcagggagccatttggacatctgcagggccccgccggaggcctcggatggccacgtagggtctgcctatcaggagaacccccagatgatcacagtccccagagacagccagacccccggggacccagcctctcacagtcagtcctcccacccgagtgaccccgatggcggcctcccagctggcggcgctggaaggagtggactccggtcccagggtgcccggggccagccccggctttctatattccgagggccagcggctggcactggaggctctgttgagcaagggcgcggaggcgttccagacctgcgtgcagcgcgaggagctgtggcccttcctcagtgcggatgaggttcagggcttggcagcggcagctgaagactggacagtggccaagcaggagcccagcgggatggcagagggagccaccaccaccgatgtggacgcgggcagcctgagctactggcctgggcagtcggagcagccggcgcccgtcctgcggctgggctggccagtggactctgcgtggaaaggcatcacccgggcgcagctgtacacccagcctcctggagagggtcagccgcccctcaaggagctggtgcggctggagatccaggctgcccacaaggtgggtgtcgcgggggccctgtgt

SEQ ID NO: 9257 - protein, 174 aa, Homo sapiens [sequence omitted]

SEQ ID NO: 9258 - DNA, 1796 bp, Homo sapiens
agggagagactgcctgggaacaggtcgaggcctgatgagtgaggccagaagccgggaagcaccgcagaagtagaagccggggagccacagcctacgttctcggaaaaagcaggcactggaagggaggccattgagcccggcactagccggtgtggctccctgctgtggtctggaggaagcagcggcctgggttggtgggattggaatgaagggcttctggtttgcagggatcaagggtccagggtccccgaggttgggtcaggagcctcaaggggataactgaggcttgggagggagacagggcgagatagagactggcccctgtccgggaagaagcgtccgggtagctggcaggggcagccagcctgaggagggtggctggttaggtggcactcacacctagatgggctgtgaagatcatagacctgtcccatagtaatggagacccctgtagcgcatttcaccctccactgcagcagctggaaggagtgtgaggagggtccagggagcagggtcccccattgacagggtagggaagggtttgccaagccttcggcctttaaggctgagcgagcaggcccagtggagaggcatcctggctggtctgcgggtgagagctgatgagcaggagaaactcgtgggggctgtcagatttggccagagacagatgctccaacaggcagatactgtgactgtcagtcggaagccattggcgtttgccagacagtggaaggagagggtcagttcgtcgtgctcttggccgggggcaggcaggcaacctgtcgtgcctttaaggacctttgggtgattagagacaggcaggcagcttgccgcctggaaatgatcaagtggtcagcctgaccaaattcaggacagctgaagggtctgactgggcactgtgtgactggtgggttggaggctgtcgtgtggctgagcagagatggccagctgatgggtcacacagttggggatggtgtcaggaggtcaacctgaccagcagagacggctggcaggaaggtcacggaaggccagccaggcatggtgccactgggtgcaggcaggtggcggatctgagtggcctgacacattggatggtcgcttatttgggcagcgtgattgtcagaacagtgtggcaggggctgctgcagggagccatttggacatctgcagggccccgccggaggcctcggatggccacgtagggtctgcctatcaggagaacccccagatgatcacagtccccagagacagccagacccccggggacccagcctctcacagtcagtcctcccacccgagtgaccccgatggcggcctcccagctggcggcgctggaaggagtggactccggtcccagggtgcccggggccagccccggctttctatattccgagggccagcggctggcactggaggctctgttgagcaagggcgcggaggcgttccagacctgcgtgcagcgcgaggagctgtggcccttcctcagtgcggatgaggttcagggcttggcagcggcagctgaagactggacagtggccaagcaggagcccagcgggatggcagagggagccaccaccaccgatgtggacgcgggcagcctgagctactggcctgggcagtcggagcagccggcgcccgtcctgcggctgggctggccagtggactctgcgtggaaaggcatcacccgggcgcagctgtacacccagcctcctggagagggtcagccgcccctcaaggagctggtgcggctggagatccaggctgcccacaaggtgggtgtcgcgggggccctgtgt

SEQ ID NO: 9259 - protein, 174 aa, Homo sapiens [sequence omitted]

SEQ ID NO: 9260 - DNA, 1005 bp, Homo sapiens
actgggcccgccgggtcctccgggagccactgagaggccgtcggcgtcgggccagagcgtcaccgcgcgacgcatcgtgctagctacacgcatctcgctcccagatccctttcttccggaaagctatcgagaacacggcctgggtagggccagagaggcccccgacgtgctggcccttccctcttggacgttgcgcttgttcctgcgctctatgctctctgccgttatcgcccggctagtcagtcgtccaactcaccacagagaagtccggatcgtggtagagcgccgcgtcgcacccatgtgacgtcacggcggcgccactcgcttgaggctttccccgcccaccccagcccgttctctctttccggacctggccgagcaggaggcgccatcatgggagtggacatccgccataacaaggaccgaaaggttcggcgcaaggagcccaagagccaggatatctacctgaggctgttggtcaagttatacaggtttctggccagaagaaccaactccacattcaaccaggttgtgttgaagaggttgtttatgagtcgcaccaaccggccgcctctgtccctttcccggatgatccggaagatgaagcttcctggccgggaaaacaagacggccgtggttgtggggaccataactgatgatgtgcgggttcaggaggtacccaaactgaaggtatgtgcactgcgcgtgaccagccgggcccgcagccgcatcctcagggcagggggcaagatcctcactttcgaccagctggccctggactcccctaagggctgtggcactgtcctgctctccggtcctcgcaagggccgagaggtgtaccggcatttcggcaaggccccaggaaccccgcacagccacaccaaaccctacgtccgctccaagggccggaagttcgagcgtgccagaggccgacgggccagccgaggctacaaaaactaaccctggatcctactctcttattaaaaagatttttgctgacagtgc

SEQ ID NO: 9261 - protein, 188 aa, Homo sapiens [sequence omitted]

SEQ ID NO: 9262 - DNA, 1331 bp, Homo sapiens
agacggccgtggttgtggggaccataactgatgatgtgcgggttcaggaggtacccaaactgaaggtgagctggcgggggctgggcagacccatcagacccttgctgtactgtgctgtgctgtgctgtgctgtgctgtgctgtgctggtccatcctcagtcttgccaccgctggtgaggcaagcatcctgcctgtctgagtggctttgaggattggtgtgggtcgtctctggcatggttgatggtggggtcccctgggcaagcttcttctggggcaagttgtaaactgttagtgctggcccctagagccagacagcctgggctcaagtctagactcctttgtcacctctgcacaggtctttttttggcccagcttccttgctgtagtttctagcataacaccagggatgtggtggtgaaagttccggaagtgttgagaactgctgctgtcagcccagggtgctccgggtagtaaacgatagtgttggttaccagggctctgctgcgccaaggcagtggagggtgagtcctggcagcccctgggtgaccacgcaggggtctgacccgccagccttgtcctctccaccaggtatgtgcactgcgcgtgaccagccgggcccgcagccgcatcctcagggcagggggcaagatcctcactttcgaccagctggccctggactcccctaagggctgtggcactgtcctgctctccggtcctcgcaagggccgagaggtgtaccggcatttcggcaaggccccaggaaccccgcacagccacaccaagtgagtatcaggcccccagccctgccctctccccagactcagcctgcagggccaggcctggccacacttgggctgcttctcctatccctcgtaccagccagccccaggccttctggaactctcagctgcctcatcctgcctgcttttcccttcaacactgcttggagctgtgttttccagggcctgagcaggcatctcctggggagcatgcagttcaccggcctttgccagcccaggctgggaccctccaggtggtggggcaggtgcttccatagcccctcctggctccttggcttcccactctgccaagcttttccagcagcattgactctcctggggctgaatgtgacaggcttgtggtgttcctgtgccactccacaatggcctcctttaagagggcccccctctcactccctcctctccccacagaccctacgtccgctccaagggccggaagttcgagcgtgccagaggccgacgggccagccgaggctacaaaaactaaccctggatcctactctcttattaaaaagatttttgctgacagtg

SEQ ID NO: 9263 - protein, 113 aa, Homo sapiens
MQFTGLCQPRLGPSRWWGRCFHSPSWLLGFPLCQAFPAALTLLGLNVTGLWCSCATPQWPPLRGPPSHSLLSPQTLRPLQGPEVRACQRPTGQPRLQKLTLDPTLLLKRFLLT

SEQ ID NO: 9264 - DNA, 1629 bp, Homo sapiens
ggccgagcaggaggcgccatcatgttatacaggtttctggccagaagaaccaactccacattcaaccaggttgtgttgaagaggttgtttatgagtcgcaccaaccggccgcctctgtccctttcccggatgatccggaagatgaagcttcctggccgggaaaacaagacggccgtggttgtggggaccataactgatgatgtgcgggttcaggaggtacccaaactgaaggtgagctggcgggggctgggcagacccatcagacccttgctgtactgtgctgtgctgtgctgtgctgtgctgtgctgtgctggtccatcctcagtcttgccaccgctggtgaggcaagcatcctgcctgtctgagtggctttgaggattggtgtgggtcgtctctggcatggttgatggtggggtcccctgggcaagcttcttctggggcaagttgtaaactgttagtgctggcccctagagccagacagcctgggctcaagtctagactcctttgtcacctctgcacaggtctttttttggcccagcttccttgctgtagtttctagcataacaccagggatgtggtggtgaaagttccggaagtgttgagaactgctgctgtcagcccagggtgctccgggtagtaaacgatagtgttggttaccagggctctgctgcgccaaggcagtggagggtgagtcctggcagcccctgggtgaccacgcaggggtctgacccgccagccttgtcctctccaccaggtatgtgcactgcgcgtgaccagccgggcccgcagccgcatcctcagggcagggggcaagatcctcactttcgaccagctggccctggactcccctaagggctgtggcactgtcctgctctccggtgagtgatacgtggtcgacgggtttggactgagctgtgtggctactggcagccttcaccctcctggatctgggaggccagaagctgggcgccagatccctgtctcacccggttctccttccccttccctaggtcctcgcaagggccgagaggtgtaccggcatttcggcaaggccccaggaaccccgcacagccacaccaagtgagtatcaggcccccagccctgccctctccccagactcagcctgcagggccaggcctggccacacttgggctgcttctcctatccctcgtaccagccagccccaggccttctggaactctcagctgcctcatcctgcctgcttttcccttcaacactgcttggagctgtgttttccagggcctgagcaggcatctcctggggagcatgcagttcaccggcctttgccagcccaggctgggaccctccaggtggtggggcaggtgcttccatagcccctcctggctccttggcttcccactctgccaagcttttccagcagcattgactctcctggggctgaatgtgacaggcttgtggtgttcctgtgccactccacaatggcctcctttaagagggcccccctctcactccctcctctccccacagaccctacgtccgctccaagggccggaagttcgagcgtgccagaggccgacgggccagccgaggctacaaaaactaaccctggatcctactctcttattaaaaagatttttgctgacagtg

SEQ ID NO: 9265 - protein, 117 aa, Homo sapiens
MLYRFLARRTNSTFNQVVLKRLFMSRTNRPPLSLSRMIRKMKLPGRENKTAVVVGTITDDVRVQEVPKLKVSWRGLGRPIRPLLYCAVLCCAVLCCAGPSSVLPPLVRQASCLSEWL

SEQ ID NO: 9266 - DNA, 547 bp, Homo sapiens
tccggacctggccgagcaggaggcgccatcatgggagtggacatccgccataacaaggaccgaaaggttcggcgcaaggagcccaagagccaggatatctacctgaggctgttggtcaagttatacaggtttctggccagaagaaccaactccacattcaaccaggttgtgttgaagaggttgtggggaccataactgatgatgtgcgggttcaggaggtacccaaactgaaggtatgtgcactgcgcgtgaccagccgggcccgcagccgcatcctcagggcagggggcaagatcctcactttcgaccagctggccctggactcccctaagggctgtggcactgtcctgctctccggtcctcgcaagggccgagaggtgtaccggcatttcggcaaggccccaggaaccccgcacagccacaccaaaccctacgtccgctccaagggccggaagttcgagcgtgccagaggccgacgggccagccgaggctacaaaaactaaccctggatcctactctcttattaaaaagatttttgctgacagtg

SEQ ID NO: 9267 - protein, 54 aa, Homo sapiens
MGVDIRHNKDRKVRRKEPKSQDIYLRLLVKLYRFLARRTNSTFNQVVLKRLWGP

SEQ ID NO: 9268 - DNA, 472 bp, Homo sapiens
ctttccggacctggccgagcaggaggcgccatcatgggagtggacatccgccataacaaggaccgaaaggttcggcgcaaggagcccaagagccaggatatctacctgaggctgttggtcaagttatacaggtttctggccagaagaaccaactccacattcaaccaggttgtgttgaagaggttgtttatgaccgcatcctcagggcagggggcaagatcctcactttcgaccagctggccctggactcccctaagggctgtggcactgtcctgctctccggtcctcgcaagggccgagaggtgtaccggcatttcggcaaggccccaggaaccccgcacagccacaccaaaccctacgtccgctccaagggccggaagttcgagcgtgccagaggccgacgggccagccgaggctacaaaaactaaccctggatcctactctcttattaaaaagatttttgctgacagtg

SEQ ID NO: 9269 - protein, 145 aa, Homo sapiens
MGVDIRHNKDRKVRRKEPKSQDIYLRLLVKLYRFLARRTNSTFNQVVLKRLFMTASSGQGARSSLSTSWPWTPLRAVALSCSPVLARAERCTGISARPQEPRTATPNPTSAPRAGSSSVPEADGPAEATKTNPGSYSLIKKIFAD

SEQ ID NO: 9270 - DNA, 562 bp, Homo sapiens
tctctctttccggacctggccgagcaggaggcgccatcatgttatacaggtttctggccagaagaaccaactccacattcaaccaggttgtgttgaagaggttgtttatgagtcgcaccaaccggccgcctctgtccctttcccggatgatccggaagatgaagcttcctggccgggaaaacaagacggccgtggttgtggggaccataactgatgatgtgcgggttcaggaggtacccaaactgaaggtatgtgcactgcgcgtgaccagccgggcccgcagccgcatcctcagggcagggggcaagatcctcactttcgaccagctggccctggactcccctaagggctgtggcactgtcctgctctccggtcctcgcaagggccgagaggtgtaccggcatttcggcaaggccccaggaaccccgcacagccacaccaaaccctacgtccgctccaagggccggaagttcgagcgtgccagaggccgacgggccagccgaggctacaaaaactaaccctggatcctactctcttattaaaaagatttttgctgacagtg

SEQ ID NO: 9271 - protein, 159 aa, Homo sapiens
MLYRFLARRTNSTFNQVVLKRLFMSRTNRPPLSLSRMIRKMKLPGRENKTAVVVGTITDDVRVQEVPKLKVCALRVTSRARSRILRAGGKILTFDQLALDSPKGCGTVLLSGPRKGREVYRHFGKAPGTPHSHTKPYVRSKGRKFERARGRRASRGYKN

SEQ ID NO: 9272 - DNA, 1737 bp, Homo sapiens
ccgttctctctttccggacctggccgagcaggaggcgccatcatgggagtggacatccgccataacaaggaccgaaaggttcggcgcaaggagcccaagagccaggatatctacctgaggctgttggtcaagttatacaggtttctggccagaagaaccaactccacattcaaccaggttgtgttgaagaggttgtttatgagtcgcaccaaccggccgcctctgtccctttcccggatgatccggaagatgaagcttcctggccgggaaaacaagacggccgtggttgtggggaccataactgatgatgtgcgggttcaggaggtacccaaactgaaggtgagctggcgggggctgggcagacccatcagacccttgctgtactgtgctgtgctgtgctgtgctgtgctgtgctgtgctggtccatcctcagtcttgccaccgctggtgaggcaagcatcctgcctgtctgagtggctttgaggattggtgtgggtcgtctctggcatggttgatggtggggtcccctgggcaagcttcttctggggcaagttgtaaactgttagtgctggcccctagagccagacagcctgggctcaagtctagactcctttgtcacctctgcacaggtctttttttggcccagcttccttgctgtagtttctagcataacaccagggatgtggtggtgaaagttccggaagtgttgagaactgctgctgtcagcccagggtgctccgggtagtaaacgatagtgttggttaccagggctctgctgcgccaaggcagtggagggtgagtcctggcagcccctgggtgaccacgcaggggtctgacccgccagccttgtcctctccaccaggtatgtgcactgcgcgtgaccagccgggcccgcagccgcatcctcagggcagggggcaagatcctcactttcgaccagctggccctggactcccctaagggctgtggcactgtcctgctctccggtgagtgatacgtggtcgacgggtttggactgagctgtgtggctactggcagccttcaccctcctggatctgggaggccagaagctgggcgccagatccctgtctcacccggttctccttccccttccctaggtcctcgcaagggccgagaggtgtaccggcatttcggcaaggccccaggaaccccgcacagccacaccaagtgagtatcaggcccccagccctgccctctccccagactcagcctgcagggccaggcctggccacacttgggctgcttctcctatccctcgtaccagccagccccaggccttctggaactctcagctgcctcatcctgcctgcttttcccttcaacactgcttggagctgtgttttccagggcctgagcaggcatctcctggggagcatgcagttcaccggcctttgccagcccaggctgggaccctccaggtggtggggcaggtgcttccatagcccctcctggctccttggcttcccactctgccaagcttttccagcagcattgactctcctggggctgaatgtgacaggcttgtggtgttcctgtgccactccacaatggcctcctttaagagggcccccctctcactccctcctctccccacagaccctacgtccgctccaagggccggaagttcgagcgtgccagaggccgacgggccagccgaggctacaaaaactaaccctggatcctactctcttattaaaaagatttttgctgacagtg

SEQ ID NO: 9273 - protein, 146 aa, Homo sapiens
MGVDIRHNKDRKVRRKEPKSQDIYLRLLVKLYRFLARRTNSTFNQVVLKRLFMSRTNRPPLSLSRMIRKMKLPGRENKTAVVVGTITDDVRVQEVPKLKVSWRGLGRPIRPLLYCAVLCCAVLCCAGPSSVLPPLVRQASCLSEWL

SEQ ID NO: 9274 - DNA, 1433 bp, Homo sapiens
actgggcccgccgggtcctccgggagccactgagaggccgtcggcgtcgggccagagcgtcaccgcgcgacgcatcgtgctagctacacgcatctcgctcccagatccctttcttccggaaagctatcgagaacacggcctgggtagggccagagaggcccccgacgtgctggcccttccctcttggacgttgcgcttgttcctgcgctctatgctctctgccgttatcgcccggctagtcagtcgtccaactcaccacagagaagtccggatcgtggtagagcgccgcgtcgcacccatgtgacgtcacggcggcgccactcgcttgaggctttccccgcccaccccagcccgttctctctttccggacctggccgagcaggaggcgccatcatgggagtggacatccgccataacaaggaccgaaaggttcggcgcaaggagcccaagagccaggatatctacctgaggctgttggtcaagttatacaggtttctggccagaagaaccaactccacattcaaccaggttgtgttgaagaggttgtttatgagtcgcaccaaccggccgcctctgtccctttcccggatgatccggaagatgaagcttcctggccgggaaaacaagacggccgtggttgtggggaccataactgatgatgtgcgggttcaggaggtacccaaactgaaggtatgtgcactgcgcgtgaccagccgggcccgcagccgcatcctcagggcagggggcaagatcctcactttcgaccagctggccctggactcccctaagggctgtggcactgtcctgctctccggtcctcgcaagggccgagaggtgtaccggcatttcggcaaggccccaggaaccccgcacagccacaccaagtgagtatcaggcccccagccctgccctctccccagactcagcctgcagggccaggcctggccacacttgggctgcttctcctatccctcgtaccagccagccccaggccttctggaactctcagctgcctcatcctgcctgcttttcccttcaacactgcttggagctgtgttttccagggcctgagcaggcatctcctggggagcatgcagttcaccggcctttgccagcccaggctgggaccctccaggtggtggggcaggtgcttccatagcccctcctggctccttggcttcccactctgccaagcttttccagcagcattgactctcctggggctgaatgtgacaggcttgtggtgttcctgtgccactccacaatggcctcctttaagagggcccccctctcactccctcctctccccacagaccctacgtccgctccaagggccggaagttcgagcgtgccagaggccgacgggccagccgaggctacaaaaactaaccctggatcctactctcttattaaaaagatttttgctgacagtg

SEQ ID NO: 9275 - protein, 164 aa, Homo sapiens
MGVDIRHNKDRKVRRKEPKSQDIYLRLLVKLYRFLARRTNSTFNQVVLKRLFMSRTNRPPLSLSRMIRKMKLPGRENKTAVVVGTITDDVRVQEVPKLKVCALRVTSRARSRILRAGGKILTFDQLALDSPKGCGTVLLSGPRKGREVYRHFGKAPGTPHSHTK

SEQ ID NO: 9276 - DNA, 902 bp, Homo sapiens
actgggcccgccgggtcctccgggagccactgagaggccgtcggcgtcgggccagagcgtcaccgcgcgacgcatcgtgctagctacacgcatctcgctcccagatccctttcttccggaaagctatcgagaacacggcctgggtagggccagagaggcccccgacgtgctggcccttccctcttggacgttgcgcttgttcctgcgctctatgctctctgccgttatcgcccggctagtcagtcgtccaactcaccacagagaagtccggatcgtggtagagcgccgcgtcgcacccatgtgacgtcacggcggcgccactcgcttgaggctttccccgcccaccccagcccgttctctctttccggacctggccgagcaggaggcgccatcatgggagtggacatccgccataacaaggaccgaaaggttcggcgcaaggagcccaagagccaggatatctacctgaggctgttggtcaagttatacaggtttctggccagaagaaccaactccacattcaaccaggttgtgttgaagaggttgtttatgagtcgcaccaaccggccgcctctgtccctttcccggatgatccggaagatgaagcttcctggccgggaaaacaagacggccgtggttgtggggaccataactgatgatgtgcgggttcaggaggtacccaaactgaaggtatgtgcactgcgcgtgaccagccgggcccgcagccgcatcctcagggcagggggcaagatcctcactttcgaccagctggccctggactcaccctacgtccgctccaagggccggaagttcgagcgtgccagaggccgacgggccagccgaggctacaaaaactaaccctggatcctactctcttattaaaaagatttttgctgacagtg

SEQ ID NO: 9277 - protein, 154 aa, Homo sapiens
MGVDIRHNKDRKVRRKEPKSQDIYLRLLVKLYRFLARRTNSTFNQVVLKRLFMSRTNRPPLSLSRMIRKMKLPGRENKTAVVVGTITDDVRVQEVPKLKVCALRVTSRARSRILRAGGKILTFDQLALDSPYVRSKGRKFERARGRRASRGYKN

SEQ ID NO: 9278 - DNA, 445 bp, Homo sapiens
ggccgagcaggaggcgccatcatgggagtggacatccgccataacaaggaccgaaaggttcggcgcaaggagcccaagagccaggatatctacctgaggctgttggtcaagttatacaggtttctggccagaagtatgtgcactgcgcgtgaccagccgggcccgcagccgcatcctcagggcagggggcaagatcctcactttcgaccagctggccctggactcccctaagggctgtggcactgtcctgctctccggtcctcgcaagggccgagaggtgtaccggcatttcggcaaggccccaggaaccccgcacagccacaccaaaccctacgtccgctccaagggccggaagttcgagcgtgccagaggccgacgggccagccgaggctacaaaaactaaccctggatcctactctcttattaaaaagatttttgctgacag

SEQ ID NO: 9279 - protein, 69 aa, Homo sapiens
MGVDIRHNKDRKVRRKEPKSQDIYLRLLVKLYRFLARSMCTARDQPGPQPHPQGRGQDPHFRPAGPGLP

SEQ ID NO: 9280 - DNA, 813 bp, Homo sapiens
cctgggtgaccacgcaggggtctgacccgccagccttgtcctctccaccaggtatgtgcactgcgcgtgaccagccgggcccgcagccgcatcctcagggcagggggcaagatcctcactttcgaccagctggccctggactcccctaagggctgtggcactgtcctgctctccggtgagtgatacgtggtcgacgggtttggactgagctgtgtggctactggcagccttcaccctcctggatctgggaggccagaagctgggcgccagatccctgtctcacccggttctccttccccttccctaggtcctcgcaagggccgagaggtgtaccggcatttcggcaaggccccaggaaccccgcacagccacaccaagtgagtatcaggcccccagccctgccctctccccagactcagcctgcagggccaggcctggccacacttgggctgcttctcctatccctcgtaccagccagccccaggccttctggaactctcagctgcctcatcctgcctgcttttcccttcaacactgcttggagctgtgttttccagggcctgagcaggcatctcctggggagcatgcagttcaccggcctttgccagcccaggctgggaccctccaggtggtggggcaggtgcttccatagcccctcctggctccttggcttcccacttccctcctctccccacagaccctacgtccgctccaagggccggaagttcgagcgtgccagaggccgacgggccagccgaggctacaaaaactaaccctggatcctactctcttattaaaaagatttttgctgac

SEQ ID NO: 9281 - protein, 62 aa, Homo sapiens
MQFTGLCQPRLGPSRWWGRCFHSPSWLLGFPLPSSPHRPYVRSKGRKFERARGRRASRGYKN

SEQ ID NO: 9282 - DNA, 1132 bp, Homo sapiens
ggatgcctcaagcggggctgaatgtaaacaccagaacaacttacgacgtacatcctccccaccctaagatccggaagatgaagcttcctggccgggaaaacaagacggccgtggttgtggggaccataactgatgatgtgcgggttcaggaggtacccaaactgaaggtgagctggcgggggctgggcagacccatcagacccttgctgtactgtgctgtgctgtgctgtgctgtgctgtgctgtgctggtccatcctcagtcttgccaccgctggtgaggcaagcatcctgcctgtctgagtggctttgaggattggtgtgggtcgtctctggcatggttgatggtggggtcccctgggcaagcttcttctggggcaagttgtaaactgttagtgctggcccctagagccagacagcctgggctcaagtctagactcctttgtcacctctgcacaggtctttttttggcccagcttccttgctgtagtttctagcataacaccagggatgtggtggtgaaagttccggaagtgttgagaactgctgctgtcagcccagggtgctccgggtagtaaacgatagtgttggttaccagggctctgctgcgccaaggcagtggagggtgagtcctggcagcccctgggtgaccacgcaggggtctgacccgccagccttgtcctctccaccaggtatgtgcactgcgcgtgaccagccgggcccgcagccgcatcctcagggcagggggcaagatcctcactttcgaccagctggccctggactcccctaagggctgtggcactgtcctgctctccggtgagtgatacgtggtcgacgggtttggactgagctgtgtggctactggcagccttcaccctcctggatctgggaggccagaagctgggcgccagatccctgtctcacccggttctccttccccttccctaggtcctcgcaagggccgagaggtgtaccggcatttcggcaaggccccaggaaccccgcacagccacaccaaaccctacgtccgctccaagggccggaagttcgagcgtgccagaggccgacgggccagccgaggctacaaaaactaaccctggatcctactctcttattaaaaagatttttgctgac

SEQ ID NO: 9283 - protein, 102 aa, Homo sapiens
MPQAGLNVNTRTTYDVHPPHPKIRKMKLPGRENKTAVVVGTITDDVRVQEVPKLKVSWRGLGRPIRPLLYCAVLCCAVLCCAGPSSVLPPLVRQASCLSEWL

SEQ ID NO: 9284 - DNA, 1338 bp, Homo sapiens
ctccgggtatgggaaccagttttgataacattgttgcaaaatacaagttgtaaagaattgacctttttgtattaagttaatatgattgctgtgttacgatgtttcagggttctgtgtgccatgggctgaaggctttgtaaacagcccctttttacagagggatcagtggcagcccacaggtctcctggtggtgggcctgggatttgagctggtgtgttcagacctgggcttgtgtcccagctctcagtttcagaaataagtaataattggctatggttgggggtaattgggtccatggttgcctcttcacccccacagggagtggacatccgccataacaaggaccgaaaggttcggcgcaaggagcccaagagccaggatatctacctgaggctgttggtcaaggtgaggctgggccctgaggtctttgggaagggtcaccccaggtctgacttgcagatcctccattctagtgctggcaccaagctcctcccaggggcctgcagagcagtctcgggtctctggttctgttccagggtctcctgcatttgtattttcagcctctaggctgtgtacagctcgggagtggagccaggattttctaggtccttggccaggaaggacctgggccagctttctccctctaggtcggtgggttgggggaaagggataaagattattttagtccagatcatcatgtgtttgccccttcactggaaggctgcgggggagcaggctgtcccagcttctcactgtcttcccgtccctccagttatacaggtttctggccagaagaaccaactccacattcaaccaggttgtgttgaagaggttgtttatgagtcgcaccaaccggccgcctctgtccctttcccggatggtgagtggctggtccagagagcacggtagacctgggagccgctgggtcttgtctgtctggaagggaggcaggacttggagctctgggagcaaccagggcatcaagggtttgtctcagccagtcgcgagcgtagagcttggactgttggttggaactgagtgtccatgggcagtgggcaagtctcctggtcctcctctccttctctttgtgaggtggaggtgtcctggtggcttcaggagattgccccaagtcataactgagttttatgtcaaaggctctgctgagggaggccctattgaacagtctgcatttttttttttatctggagctttccccagctggaccctacgtccgctccaagggccggaagttcgagcgtgccagaggccgacgggccagccgaggctacaaaaactaaccctggatcctactctcttattaaaaagatttttgctgac

SEQ ID NO: 9285 - protein, 165 aa, Homo sapiens
MSRTNRPPLSLSRMVSGWSREHGRPGSRWVLSVWKGGRTWSSGSNQGIKGLSQPVASVELGLLVGTECPWAVGKSPGPPLLLFVRWRCPGGFRRLPQVITEFYVKGSAEGGPIEQSAFFFLSGAFPSWTLRPLQGPEVRACQRPTGQPRLQKLTLDPTLLLKRFL

SEQ ID NO: 9286 - DNA, 879 bp, Homo sapiens
cgttctctctttccggacctggccgagcaggaggcgccatcatgggagtggacatccgccataacaaggaccgaaaggttcggcgcaaggagcccaagagccaggatatctacctgaggctgttggtcaaggtgaggctgggccctgaggtctttgggaagggtcaccccaggtctgacttgcagatcctccattctagtgctggcaccaagctcctcccaggggcctgcagagcagtctcgggtctctggttctgttccagggtctcctgcatttgtattttcagcctctaggctgtgtacagctcgggagtggagccaggattttctaggtccttggccaggaaggacctgggccagctttctccctctaggtcggtgggttgggggaaagggataaagattattttagtccagatcatcatgtgtttgccccttcactggaaggctgcgggggagcaggctgtcccagcttctcactgtcttcccgtccctccagttatacaggtttctggccagaagaaccaactccacattcaaccaggttgtgttgaagaggttgtttatgagtcgcaccaaccggccgcctctgtccctttcccggatggtgagtggctggtccagagagcacggtagacctgggagccgctgggtcttgtctgtctggaagggaggcaggacttggagctctgggagcaaccagggcatcaagggtttgtctcagccagtcgcgagcgtagagcttggactgttggttggaactgagtgtccatgggcagtgggcaagtctcctggtcctcctctccttctctttgtgaggtggaggtgtcctggtggcttcaggagattgccccaagtcataactgagttttatgtcaaa

SEQ ID NO: 9287 - protein, 83 aa, Homo sapiens
MGVDIRHNKDRKVRRKEPKSQDIYLRLLVKVRLGPEVFGKGHPRSDLQILHSSAGTKLLPGACRAVSGLWFCSRVSCICIFSL

SEQ ID NO: 9288 - DNA, 2804 bp, Homo sapiens
ctctgtggtgagttggacgactgactagccgggcgataacggcagagagcatagagcgcaggaacaagcgcaacgtccaagagggaagggccagcacgtcgggggcctctctggccctacccaggccgtgttctcgatagctttccggaagaaagggatctgggagcgagatgcgtgtagctagcacgatgcgtcgcgcggtgacgctctggcccgacgccgacggcctctcagtggctcccggaggacccggcgggcccagtgttggagagctgaaggtcaggccaggacagtgagacctgactccttgctcctaccagcctactatggcttaagacccagggccagggtcccgttgatgtaacagagcagaggaccagcagatgaatggacaccttgaagcagaggagcagcaggaccagaggccagaccaggagctgaccgggagctggggccacgggcctaggagcaccctggtcagggctaaggccatggccccgcccccaccgccactggctgccagcaccccgctcctccatggcgagtttggctcctacccagcccgaggcccacgctttgccctcacccttacatcgcaggccctgcacatacagcggctgccccctcagactcagcggcctacttctgcatctacacctaccctcggggccggcgcggggcccggcgcagagccactcgcaccttccgggcagatggggccgccacctacgaagagaaccgtgccgaggcccagcgctgggccactgccctcacctgtctgctccgaggactgccactgcccggggatggggagatcacccctgacctgctacctcggccgccccggttgcttctattggtcaatccctttgggggtcggggcctggcctggcagtggtgtaagaaccacgtgcttcccatgatctctgaagctgggctgtccttcaacctcatccagacagaacgacagaaccacgcccgggagctggtccaggggctgagcctgagtgagtgggatggcatcgtcacggtctcgggagacgggctgctccatgaggtgctgaacgggctcctagatcgccctgactgggaggaagctgtgaagatgcctgtgggcatcctcccctgcggctcgggcaacgcgctggccggagcagtgaaccagcacgggggatttgagccagccctgggcctcgacctgttgctcaactgctcactgttgctgtgccggggtggtggccacccactggacctgctctccgtgacgctggcctcgggctcccgctgtttctccttcctgtctgtggcctggggcttcgtgtcagatgtggatatccagagcgagcgcttcagggccttgggcagtgcccgcttcacactgggcacggtgctgggcctcgccacactgcacacctaccgcggacgcctctcctacctccccgccactgtggaacctgcctcgcccacccctgcccatagcctgcctcgtgccaagtcggagctgaccctaaccccagaagaacccctgcccatcctgtccctcaacggtgggggcccagagctggctggggactggggtggggctggggatgctccgctgtccccggacccactgctgtcttcacctcctggctctcccaaggcagctctacactcacccgtctccgaaggggcccccgtaattcccccatcctctgggctcccacttcccacccctgatgcccgggtaggggcctccacctgcggcccgcccgaccacctgctgcctccgctgggcaccccgctgcccccagactgggtgacgctggagggggactttgtgctcatgttggccatctcgcccagccacctaggcgctgacctggtggcagctccgcatgcgcgcttcgacgacggcctggtgcacctgtgctgggtgcgtagcggcatctcgcgggctgcgctgctgcgccttttcttggccatggagcgtggtagccacttcagcctgggctgtccgcagctgggctacgccgcggcccgtgccttccgcctagagccgctcacaccacgcggcgtgctcacagtggacggggagcaggtggagtatgggccgctacaggcacagatgcaccctggcatcggtacactgctcactgggcctcctggctgcccggggcgggagccctgaaactaaacaagcttggtacccgccgggggcggggcctacattccaatggggcggagcctgagctagggggtgtggcctggctgctagagttgtggtggcaggggccctggccccgtctcaggattgcgctcgctttcatgggaccagacgtgatgctggaaggtgggcgtcgtcacggttaaagagaaatgggctcgtcccgagggtagtgcctgatcaatgagggcggggcctggcgtctgatctggggccgcccttacggggcagggctcagtcctgacgcttgccacctgctcctacccggccaggatggctgagggcggagtctattttacgcgtcgcccaatgacaggacctggaatgtactggctggggtaggcctcagtgagtcggccggtcagggcccgcagcctcgccccatccactccggtgcctccatttagctggccaatcagcccaggaggggcaggttccccggggccggcgctaggatttgcactaatgttcctctccccgcgggtgggggcggggaaattcatatcccctgttcgtctcatgcgcgtcctccgtccccaatctaaaaagcaattgaaaaggtctatgcaataaaggcagtcgcttcattcctctcaga

SEQ ID NO: 9289 - protein, 416 aa, Homo sapiens
MISEAGLSFNLIQTERQNHARELVQGLSLSEWDGIVTVSGDGLLHEVLNGLLDRPDWEEAVKMPVGILPCGSGNALAGAVNQHGGFEPALGLDLLLNCSLLLCRGGGHPLDLLSVTLASGSRCFSFLSVAWGFVSDVDIQSERFRALGSARFTLGTVLGLATLHTYRGRLSYLPATVEPASPTPAHSLPRAKSELTLTPEEPLPILSLNGGGPELAGDWGGAGDAPLSPDPLLSSPPGSPKAALHSPVSEGAPVIPPSSGLPLPTPDARVGASTCGPPDHLLPPLGTPLPPDWVTLEGDFVLMLAISPSHLGADLVAAPHARFDDGLVHLCWVRSGISRAALLRLFLAMERGSHFSLGCPQLGYAAARAFRLEPLTPRGVLTVDGEQVEYGPLQAQMHPGIGTLLTGPPGCPGREP

SEQ ID NO: 9290 - DNA, 2965 bp, Homo sapiens
cgactgactagccgggcgataacggcagagagcatagagcgcaggaacaagcgcaacgtccaagagggaagggccagcacgtcgggggcctctctggccctacccaggccgtgttctcgatagctttccggaagaaagggatctgggagcgagatgcgtgtagctagcacgatgcgtcgcgcggtgacgctctggcccgacgccgacggcctctcagtggctcccggaggacccggcgggcccagtgttggagagctgaaggtcaggccaggacagtgagacctgactccttgctcctaccagcctactatggcttaagacccagggccagggtcccgttgatgtaacagagcagaggaccagcagatgaatggacaccttgaagcagaggagcagcaggaccagaggccagaccaggagctgaccgggagctggggccacgggcctaggagcaccctggtcagggctaaggccatggccccgcccccaccgccactggctgccagcaccccgctcctccatggcgagtttggctcctacccagcccgaggcccacgctttgccctcacccttacatcgcaggccctgcacatacagcggctgcgccccaaacctgaagccaggccccggggtggcctggtcccgttggccgaggtctcaggctgctgcaccctgcgaagccgcagcccctcagactcagcggcctacttctgcatctacacctaccctcggggccggcgcggggcccggcgcagagccactcgcaccttccgggcagatggggccgccacctacgaagagaaccgtgccgaggcccagcgctgggccactgccctcacctgtctgctccgaggactgccactgcccggggatggggagatcacccctgacctgctacctcggccgccccggttgcttctattggtcaatccctttgggggtcggggcctggcctggcagtggtgtaagaaccacgtgcttcccatgatctctgaagctgggctgtccttcaacctcatccagacagaacgacagaaccacgcccgggagctggtccaggggctgagcctgagtgagtgggatggcatcgtcacggtctcgggagacgggctgctccatgaggtgctgaacgggctcctagatcgccctgactgggaggaagctgtgaagatgcctgtgggcatcctcccctgcggctcgggcaacgcgctggccggagcagtgaaccagcacgggggatttgagccagccctgggcctcgacctgttgctcaactgctcactgttgctgtgccggggtggtggccacccactggacctgctctccgtgacgctggcctcgggctcccgctgtttctccttcctgtctgtggcctggggcttcgtgtcagatgtggatatccagagcgagcgcttcagggccttgggcagtgcccgcttcacactgggcacggtgctgggcctcgccacactgcacacctaccgcggacgcctctcctacctccccgccactgtggaacctgcctcgcccacccctgcccatagcctgcctcgtgccaagtcggagctgaccctaaccccagacccagccccgcccatggcccactcacccctgcatcgttctgtgtctgacctgcctcttcccctgccccagcctgccctggcctctcctggctcgccagaacccctgcccatcctgtccctcaacggtgggggcccagagctggctggggactggggtggggctggggatgctccgctgtccccggacccactgctgtcttcacctcctggctctcccaaggcagctctacactcacccgtctccgaaggggcccccgtaattcccccatcctctgggctcccacttcccacccctgatgcccgggtaggggcctccacctgcggcccgcccgaccacctgctgcctccgctgggcaccccgctgcccccagactgggtgacgctggagggggactttgtgctcatgttggccatctcgcccagccacctaggcgctgacctggtggcagctccgcatgcgcgcttcgacgacggcctggtgcacctgtgctgggtgcgtagcggcatctcgcgggctgcgctgctgcgccttttcttggccatggagcgtggtagccacttcagcctgggctgtccgcagctgggctacgccgcggcccgtgccttccgcctagagccgctcacaccacgcggcgtgctcacagtggacggggagcaggtggagtatgggccgctacaggcacagatgcaccctggcatcggtacactgctcactgggcctcctggctgcccggggcgggagccctgaaactaaacaagcttggtacccgccgggggcggggcctacattccaatggggcggagcctgagctagggggtgtggcctggctgctagagttgtggtggcaggggccctggccccgtctcaggattgcgctcgctttcatgggaccagacgtgatgctggaaggtgggcgtcgtcacggttaaagagaaatgggctcgtcccgagggtagtgcctgatcaatgagggcggggcctggcgtctgatctggggccgcccttacggggcagggctcagtcctgacgcttgccacctgctcctacccggccaggatggctgagggcggagtctattttacgcgtcgcccaatgacaggacctggaatgtactggctggggtaggcctcagtgagtcggccggtcagggcccgcagcctcgccccatccactccggtgcctccatttagctggccaatcagcccaggaggggcaggttccccggggccggcgctaggatttgcactaatgttcctctccccgcgggtgggggcggggaaattcatatcccctgttcgtctcatgcgcgtcctccgtccccaatctaaaaagcaattgaaaaggtctatgcaataaaggcagtcgcttcattcctctcaga

SEQ ID NO: 9291 - protein, 654 aa, Homo sapiens; identical to SEQ ID NO: 1177

SEQ ID NO: 9292 - DNA, 755 bp, Homo sapiens
tgactagccgggcgataacggcagagagcatagagcgcaggaacaagcgcaacgtccaagagggaagggccagcacgtcgggggcctctctggccctacccaggccgtgttctcgatagctttccggaagaaagggatctgggagcgagatgcgtgtagctagcacgatgcgtcgcgcggtgacgctctggcccgacgccgacggcctctcagtggctcccggaggacccggcgggcccagtgttggagagctgaaggtcaggccaggacagtgagacctgactccttgctcctaccagcctactatggcttaagacccagggccagggtcccgttgatgtaacagagcagaggaccagcagatgaatggacaccttgaagcagaggagcagcaggaccagaggccagaccaggagctgaccgggagctggggccacgggcctaggagcaccctggtcagggctaaggccatggccccgcccccaccgccactggctgccagcaccccgctcctccatggcgagtttggctcctacccagcccgaggcccacgctttgccctcacccttacatcgcaggccctgcacatacagcggctgcgccccaaacctgaagccaggccccggggtggcctggtcccgttggccgaggtctcaggctgctgcaccctgcgaagccgcagcccctcagactcagcggcctacttctgcatctacacctacgaagagaaccgtgccgaggcccagcgctgggcc

SEQ ID NO: 9293 - protein, 130 aa, Homo sapiens
MNGHLEAEEQQDQRPDQELTGSWGHGPRSTLVRAKAMAPPPPPLAASTPLLHGEFGSYPARGPRFALTLTSQALHIQRLRPKPEARPRGGLVPLAEVSGCCTLRSRSPSDSAAYFCIYTYEENRAEAQRW

SEQ ID NO: 9294 - DNA, 378 bp, Homo sapiens
gtgttctcgatagctttccggaagaaagggatctgggagcgagatgcgtgtagctagcacgatgcgtcgcgcggtgacgctctggcccgacgccgacggcctctcagtggctcccggaggacccggcgggcccagtgttggagagctgaaggtcaggccaggacagtgagacctgactccttgctcctaccagcctactatggcttaagacccagggccagggtcccgttgatgtaacagagcagaggaccagcagatgaatggacaccttgaagcagaggagcagcaggaccaggtaagggaccatctaaaagccaagatcctcatactgtggaaagacaaaatctgaagcttttctttaaaaaaaaaaaaaaaaaa

SEQ ID NO: 9295 - protein, 41 aa, Homo sapiens [sequence omitted]

SEQ ID NO: 9296 - DNA, 636 bp, Homo sapiens
ataaacaagagaccaaaacagtgggattgagaatgtgcaagtatgaggatcttggcttttagatggtcccttacctggtcctgctgctcctctgcttcaaggtgtccattcatctgctggtcctctgctctgttacatcaacgggaccctggccctgggtcttaagccatagtaggctggtaggagcaaggagtcaggtctcactgtcctggcctgaccttcagctctgtggaggagaggtcagggaagggccatctaggggccgggggagaaggagaagcggaactcaaaggatgggaatacaggatgctatagattgaggtgcagcaagatcatctcgggttagaccttaagtaggacttcccaagcagcggctgcgcctacgaagtgcagcgcgagatcagggagcggtgaacctgataaggaaacgcccgaagcgtggggtcggaaatttccagatgccccgactagccctgccagccccgcctcctcacctccaacactgggcccgccgggtcctccgggagccactgagaggccgtcggcgtcgggccagagcgtcaccgcgcgacgcatcgtgctagctacacgcatctcgctcccagatccctttcttccggaaagctatcgagaaca

SEQ ID NO: 9297 - protein, 85 aa, Homo sapiens
MVPYLVLLLLCFKVSIHLLVLCSVTSTGPWPWVLSHSRLVGARSQVSLSWPDLQLCGGEVREGPSRGRGRRRSGTQRMGIQDAID

SEQ ID NO: 9298 - DNA, 820 bp, Homo sapiens
agctttccggaagaaagggatctgggagcgagatgcgtgtagctagcacgatgcgtcgcgcggtgacgctctggcccgacgccgacggcctctcagtggctcccggaggacccggcgggcccagtgttggagagctgaaggtcaggccaggacagtgagacctgactccttgctcctaccagcctactatggcttaagacccagggccagggtcccgttgatgtaacagagcagaggaccagcagatgaatggacaccttgaagcagaggagcagcaggaccagaggccagaccaggagctgaccgggagctggggccacgggcctaggagcaccctggtcagggctaaggccatggccccgcccccaccgccactggctgccagcaccccgctcctccatggcgagtttggctcctacccagcccgaggcccacgctttgccctcacccttacatcgcaggccctgcacatacagcggctgcgccccaaacctgaagccaggccccggggtggcctggtcccgttggccgaggtctcaggctgctgcaccctgcgaagccgcagcccctcagactcagcggcctacttctgcatctacacctaccctcggggccggcgcggggcccggcgcagagccactcgcaccttccgggcagatggggccgccacctacgaagagaaccgtgccgaggcccagcgctgggccactgccctcacctgtctgctccgaggactgccactgcccggggatgggggtgaggtgctgggcagctgctctatcctggagccaccttggtgtctctgcagaatttcctccat

SEQ ID NO: 9299 - protein, 190 aa, Homo sapiens
MNGHLEAEEQQDQRPDQELTGSWGHGPRSTLVRAKAMAPPPPPLAASTPLLHGEFGSYPARGPRFALTLTSQALHIQRLRPKPEARPRGGLVPLAEVSGCCTLRSRSPSDSAAYFCIYTYPRGRRGARRRATRTFRADGAATYEENRAEAQRWATALTCLLRGLPLPGDGGEVLGSCSILEPPWCLCRIS

SEQ ID NO: 9300 - DNA, 544 bp, Homo sapiens
atctgggagcgagatgcgtgtagctagcacgatgcgtcgcgcggtgacgctctggcccgacgccgacggcctctcagtggctcccggaggacccggcgggcccagtgttggagagctgaaggtcaggccaggacagtgagacctgactccttgctcctaccagcctactatggcttaagacccagggccagggtcccgttgatgtaacagacccgaggcccacgctttgccctcacccttacatcgcaggccctgcacatacagcggctgcgccccaaacctgaagccaggccccggggtggcctggtcccgttggccgaggtctcaggctgctgcaccctgcgaagccgcagcccctcagactcagcggcctacttctgcatctacacctaccctcggggccggcgcggggcccggcgcagagccactcgcaccttccgggcagatggggccgccacctacgaagagaaccgtgccgaggcccagcgctgggccactgccctcacctgtctgctccgaggactgccactgcccggggatgggg

SEQ ID NO: 9301 - protein, 41 aa, Homo sapiens [sequence omitted]

SEQ ID NO: 9302 - DNA, 899 bp, Homo sapiens
gtagctagcacgatgcgtcgcgcggtgacgctctggcccgacgccgacggcctctcagtggctcccggaggacccggcgggcccagtgttggagagctgaaggtcaggccaggacagtgagacctgactccttgctcctaccagcctactatggcttaagacccagggccagggtcccgttgatgtaacagagcagaggaccagcagatgaatggacaccttgaagcagaggagcagcaggaccagagtcttggtctgttgcccaggctggagtgcagtggcatcatctcggctcactgtaacctccgcctcttgggttcaagcgatctcctgcctcagcctcctgagtagctgggattacagaggccagaccaggagctgaccgggagctggggccacgggcctaggagcaccctggtcagggctaaggccatggccccgcccccaccgccactggctgccagcaccccgctcctccatggcgagtttggctcctacccagcccgaggcccacgctttgccctcacccttacatcgcaggccctgcacatacagcggctgcgccccaaacctgaagccaggccccggggtggcctggtcccgttggccgaggtctcaggctgctgcaccctgcgaagccgcagcccctcagactcagcggcctacttctgcatctacacctaccctcggggccggcgcggggcccggcgcagagccactcgcaccttccgggcagatggggccgccacctacgaagagaaccgtgccgaggcccagcgctgggccactgccctcacctgtctgctccgaggactgccactgcccggggatgggggtgaggtgctgggcagctgctctatcctggagccaccttggtgtctctgcagaatttcctccat

SEQ ID NO: 9303 - protein, 56 aa, Homo sapiens [sequence omitted]

SEQ ID NO: 9304 - DNA, 539 bp, Homo sapiens
gtagctagcacgatgcgtcgcgcggtgacgctctggcccgacgccgacggcctctcagtggctcccggaggacccggcgggcccagtgttggagagctgaaggtcaggccaggacagtgagacctgactccttgctcctaccagcctactatggcttaagacccagggccagggtcccgttgatgtaacagagcagaggaccagcagatgaatggacaccttgaagcagaggagcagcaggaccagagatcacccctgacctgctacctcggccgccccggttgcttctattggtcaatccctttgggggtcggggcctggcctggcagtggtgtaagaaccacgtgcttcccatgatctctgaagctgggctgtccttcaacctcatccagacagaacgacagaaccacgcccgggagctggtccaggggctgagcctgagtgagtgggatggcatcgtcacggtctcgggagacgggctgctccatgaggtagagcaggagcaccctgcccctagccctgggccctgggggactata

SEQ ID NO: 9305 - protein, 61 aa, Homo sapiens
MISEAGLSFNLIQTERQNHARELVQGLSLSEWDGIVTVSGDGLLHEVEQEHPAPSPGPWGT

SEQ ID NO: 9306 - DNA, 373 bp, Homo sapiens
agtgttggaggtgaggaggcggggctggcagggctagtcggggcatctggaaatttccgaccccacgcttcgggcgtttccttatcaggttcaccgctccctgatctcgcgctgcacttcgtaggcgcagccgctgcttgggaagtcctacttaagagctgaaggtcaggccaggacagtgagacctgactccttgctcctaccagcctactatggcttaagacccagggccagggtcccgttgatgtaacagagcagaggaccagcagatgaatggacaccttgaagcagaggagcagcaggaccaggtaagggaccatctaaaagccaagatcctcatactgtggaaagacaaaatctgaagcttttcttt

SEQ ID NO: 9307 - protein, 30 aa, Homo sapiens
MNGHLEAEEQQDQVRDHLKAKILILWKDKI

SEQ ID NO: 9308 - DNA, 776 bp, Homo sapiens
agtgttggaggtgaggaggcggggctggcagggctagtcggggcatctggaaatttccgaccccacgcttcgggcgtttccttatcagagctgaaggtcaggccaggacagtgagacctgactccttgctcctaccagcctactatggcttaagacccagggccagggtcccgttgatgtaacagagcagaggaccagcagatgaatggacaccttgaagcagaggagcagcaggaccagaggccagaccaggagctgaccgggagctggggccacgggcctaggagcaccctggtcagggctaaggccatggccccgcccccaccgccactggctgccagcaccccgctcctccatggcgagtttggctcctacccagcccgaggcccacgctttgccctcacccttacatcgcaggccctgcacatacagcggctgcgccccaaacctgaagccaggccccggggtggcctggtcccgttggccgaggtctcaggctgctgcaccctgcgaagccgcagcccctcagactcagcggcctacttctgcatctacacctaccctcggggccggcgcggggcccggcgcagagccactcgcaccttccgggcagatggggccgccacctacgaagagaaccgtgccgaggcccagcgctgggccactgccctcacctgtctgctccgaggactgccactgcccggggatgggggtgaggtgctgggcagctgctctatcctggagccaccttggtgtctctgcagaatttcctccat

SEQ ID NO: 9309 - protein, 190 aa, Homo sapiens; identical to SEQ ID NO: 9299

SEQ ID NO: 9310 - DNA, 867 bp, Homo sapiens
agtgttggaggtgaggaggcggggctggcagggctagtcggggcatctggaaatttccgaccccacgcttcgggcgtttccttatcaggttcaccgctccctgatctcgcgctgcacttcgtaggcgcagccgctgcttgggaagtcctacttaagagctgaaggtcaggccaggacagtgagacctgactccttgctcctaccagcctactatggcttaagacccagggccagggtcccgttgatgtaacagagcagaggaccagcagatgaatggacaccttgaagcagaggagcagcaggaccagaggccagaccaggagctgaccgggagctggggccacgggcctaggagcaccctggtcagggctaaggccatggccccgcccccaccgccactggctgccagcaccccgctcctccatggcgagtttggctcctacccagcccgaggcccacgctttgccctcacccttacatcgcaggccctgcacatacagcggctgcgccccaaacctgaagccaggccccggggtggcctggtcccgttggccgaggtctcaggctgctgcaccctgcgaagccgcagcccctcagactcagcggcctacttctgcatctacacctaccctcggggccggcgcggggcccggcgcagagccactcgcaccttccgggcagatggggccgccacctacgaagagaaccgtgccgaggcccagcgctgggccactgccctcacctgtctgctccgaggactgccactgcccggggatgggggtgaggtgctgggcagctgctctatcctggagccaccttggtgtctctgcagaatttcctccataggcagctgtgtctttatttttc

SEQ ID NO: 9311 - protein, 198 aa, Homo sapiens
MNGHLEAEEQQDQRPDQELTGSWGHGPRSTLVRAKAMAPPPPPLAASTPLLHGEFGSYPARGPRFALTLTSQALHIQRLRPKPEARPRGGLVPLAEVSGCCTLRSRSPSDSAAYFCIYTYPRGRRGARRRATRTFRADGAATYEENRAEAQRWATALTCLLRGLPLPGDGGEVLGSCSILEPPWCLCRISSIGSCVFI

SEQ ID NO: 9312 - DNA, 1544 bp, Homo sapiens
agtgttggaggtgaggaggcggggctggcagggctagtcggggcatctggaaatttccgaccccacgcttcgggcgtttccttatcaggttcaccgctccctgatctcgcgctgcacttcgtaggcgcagccgctgcttgggaagtcctacttaagagctgaaggtcaggccaggacagtgagacctgactccttgctcctaccagcccctgcccatagcctgcctcgtgccaagtcggagctgaccctaaccccagaagaacccctgcccatcctgtccctcaacggtgggggcccagagctggctggggactggggtggggctggggatgctccgctgtccccggacccactgctgtcttcacctcctggctctcccaaggcagctctacactcacccgtctccgaaggggcccccgtaattcccccatcctctgggctcccacttcccacccctgatgcccgggtaggggcctccacctgcggcccgcccgaccacctgctgcctccgctgggcaccccgctgcccccagactgggtgacgctggagggggactttgtgctcatgttggccatctcgcccagccacctaggcgctgacctggtggcagctccgcatgcgcgcttcgacgacggcctggtgcacctgtgctgggtgcgtagcggcatctcgcgggctgcgctgctgcgccttttcttggccatggagcgtggtagccacttcagcctgggctgtccgcagctgggctacgccgcggcccgtgccttccgcctagagccgctcacaccacgcggcgtgctcacagtggacggggagcaggtggagtatgggccgctacaggcacagatgcaccctggcatcggtacactgctcactgggcctcctggctgcccggggcgggagccctgaaactaaacaagcttggtacccgccgggggcggggcctacattccaatggggcggagcctgagctagggggtgtggcctggctgctagagttgtggtggcaggggccctggccccgtctcaggattgcgctcgctttcatgggaccagacgtgatgctggaaggtgggcgtcgtcacggttaaagagaaatgggctcgtcccgagggtagtgcctgatcaatgagggcggggcctggcgtctgatctggggccgcccttacggggcagggctcagtcctgacgcttgccacctgctcctacccggccaggatggctgagggcggagtctattttacgcgtcgcccaatgacaggacctggaatgtactggctggggtaggcctcagtgagtcggccggtcagggcccgcagcctcgccccatccactccggtgcctccatttagctggccaatcagcccaggaggggcaggttccccggggccggcgctaggatttgcactaatgttcctctccccgcgggtgggggcggggaaattcatatcccctgttcgtctcatgcgcgtcctccgtccccaatctaaaaagcaattgaaaaggtctatgcaataaaggcagtcgcttcattcctctcaga

SEQ ID NO: 9313 - protein, 114 aa, Homo sapiens [sequence omitted]

SEQ ID NO: 9314 - DNA, 2868 bp, Homo sapiens
agtgttggaggtgaggaggcggggctggcagggctagtcggggcatctggaaatttccgaccccacgcttcgggcgtttccttatcaggttcaccgctccctgatctcgcgctgcacttcgtaggcgcagccgctgcttgggaagtcctacttaagagctgaaggtcaggccaggacagtgagacctgactccttgctcctaccagcctactatggcttaagacccagggccagggtcccgttgatgtaacagagcagaggaccagcagatgaatggacaccttgaagcagaggagcagcaggaccagaggccagaccaggagctgaccgggagctggggccacgggcctaggagcaccctggtcagggctaaggccatggccccgcccccaccgccactggctgccagcaccccgctcctccatggcgagtttggctcctacccagcccgaggcccacgctttgccctcacccttacatcgcaggccctgcacatacagcggctgcgccccaaacctgaagccaggccccggggtggcctggtcccgttggccgaggtctcaggctgctgcaccctgcgaagccgcagcccctcagactcagcggcctacttctgcatctacacctaccctcggggccggcgcggggcccggcgcagagccactcgcaccttccgggcagatggggccgccacctacgaagagaaccgtgccgaggcccagcgctgggccactgccctcacctgtctgctccgaggactgccactgcccggggatggggagatcacccctgacctgctacctcggccgccccggttgcttctattggtcaatccctttgggggtcggggcctggcctggcagtggtgtaagaaccacgtgcttcccatgatctctgaagctgggctgtccttcaacctcatccagacagaacgacagaaccacgcccgggagctggtccaggggctgagcctgagtgagtgggatggcatcgtcacggtctcgggagacgggctgctccatgaggtgctgaacgggctcctagatcgccctgactgggaggaagctgtgaagatgcctgtgggcatcctcccctgcggctcgggcaacgcgctggccggagcagtgaaccagcacgggggatttgagccagccctgggcctcgacctgttgctcaactgctcactgttgctgtgccggggtggtggccacccactggacctgctctccgtgacgctggcctcgggctcccgctgtttctccttcctgtctgtggcctggggcttcgtgtcagatgtggatatccagagcgagcgcttcagggccttgggcagtgcccgcttcacactgggcacggtgctgggcctcgccacactgcacacctaccgcggacgcctctcctacctccccgccactgtggaacctgcctcgcccacccctgcccatagcctgcctcgtgccaagtcggagctgaccctaaccccagacccagccccgcccatggcccactcacccctgcatcgttctgtgtctgacctgcctcttcccctgccccagcctgccctggcctctcctggctcgccagaacccctgcccatcctgtccctcaacggtgggggcccagagctggctggggactggggtggggctggggatgctccgctgtccccggacccactgctgtcttcacctcctggctctcccaaggcagctctacactcacccgtctccgaaggggcccccgtaattcccccatcctctgggctcccacttcccacccctgatgcccgggtaggggcctccacctgcggcccgcccgaccacctgctgcctccgctgggcaccccgctgcccccagactgggtgacgctggagggggactttgtgctcatgttggccatctcgcccagccacctaggcgctgacctggtggcagctccgcatgcgcgcttcgacgacggcctggtgcacctgtgctgggtgcgtagcggcatctcgcgggctgcgctgctgcgccttttcttggccatggagcgtggtagccacttcagcctgggctgtccgcagctgggctacgccgcggcccgtgccttccgcctagagccgctcacaccacgcggcgtgctcacagtggacggggagcaggtggagtatgggccgctacaggcacagatgcaccctggcatcggtacactgctcactgggcctcctggctgcccggggcgggagccctgaaactaaacaagcttggtacccgccgggggcggggcctacattccaatggggcggagcctgagctagggggtgtggcctggctgctagagttgtggtggcaggggccctggccccgtctcaggattgcgctcgctttcatgggaccagacgtgatgctggaaggtgggcgtcgtcacggttaaagagaaatgggctcgtcccgagggtagtgcctgatcaatgagggcggggcctggcgtctgatctggggccgcccttacggggcagggctcagtcctgacgcttgccacctgctcctacccggccaggatggctgagggcggagtctattttacgcgtcgcccaatgacaggacctggaatgtactggctggggtaggcctcagtgagtcggccggtcagggcccgcagcctcgccccatccactccggtgcctccatttagctggccaatcagcccaggaggggcaggttccccggggccggcgctaggatttgcactaatgttcctctccccgcgggtgggggcggggaaattcatatcccctgttcgtctcatgcgcgtcctccgtccccaatctaaaaagcaattgaaaaggtctatgcaataaaggcagtcgcttcattcctctcaga

SEQ ID NO: 9315 - protein, 654 aa, Homo sapiens; identical to SEQ ID NO: 1177

SEQ ID NO: 9316 - DNA, 1638 bp, Homo sapiens
atcaggttcaccgctccctgatctcgcgctgcacttcgtaggcgcagccgctgcttgggaagtcctacttaagagctgaaggtcaggccaggacagtgagacctgactccttgctcctaccagcctactatggcttaagacccagggccagggtcccgttgatgtaacagagcagaggaccagcagatgaatggacaccttgaagcagaggagcagcaggaccagaggccagaccaggagctgaccgggagctggggccacgggcctaggagcaccctggtcagggctaaggccatggccccgcccccaccgccactggctgccagcaccccgctcctccatggcgagtttggctcctacccagcccgaggcccacgctttgccctcacccttacatcgcaggccctgcacatacagcggctgcgccccaaacctgaagccaggccccggggtggcctggtcccgttggccgaggtctcaggctgctgcaccctgcgaagccgcagcccctcagactcagcggcctacttctgcatctacacctaccccctgatgcccgggtaggggcctccacctgcggcccgcccgaccacctgctgcctccgctgggcaccccgctgcccccagactgggtgacgctggagggggactttgtgctcatgttggccatctcgcccagccacctaggcgctgacctggtggcagctccgcatgcgcgcttcgacgacggcctggtgcacctgtgctgggtgcgtagcggcatctcgcgggctgcgctgctgcgccttttcttggccatggagcgtggtagccacttcagcctgggctgtccgcagctgggctacgccgcggcccgtgccttccgcctagagccgctcacaccacgcggcgtgctcacagtggacggggagcaggtggagtatgggccgctacaggcacagatgcaccctggcatcggtacactgctcactgggcctcctggctgcccggggcgggagccctgaaactaaacaagcttggtacccgccgggggcggggcctacattccaatggggcggagcctgagctagggggtgtggcctggctgctagagttgtggtggcaggggccctggccccgtctcaggattgcgctcgctttcatgggaccagacgtgatgctggaaggtgggcgtcgtcacggttaaagagaaatgggctcgtcccgagggtagtgcctgatcaatgagggcggggcctggcgtctgatctggggccgcccttacggggcagggctcagtcctgacgcttgccacctgctcctacccggccaggatggctgagggcggagtctattttacgcgtcgcccaatgacaggacctggaatgtactggctggggtaggcctcagtgagtcggccggtcagggcccgcagcctcgccccatccactccggtgcctccatttagctggccaatcagcccaggaggggcaggttccccggggccggcgctaggatttgcactaatgttcctctccccgcgggtgggggcggggaaattcatatcccctgttcgtctcatgcgcgtcctccgtccccaatctaaaaagcaattgaaaaggtctatgcaataaaggcagtcgcttcattcctctcaga

SEQ ID NO: 9317 - protein, 125 aa, Homo sapiens
MNGHLEAEEQQDQRPDQELTGSWGHGPRSTLVRAKAMAPPPPPLAASTPLLHGEFGSYPARGPRFALTLTSQALHIQRLRPKPEARPRGGLVPLAEVSGCCTLRSRSPSDSAAYFCIYTYPLMPG

SEQ ID NO: 9318 - DNA, 856 bp, Homo sapiens
gatggcccttccctgacctagaaagagggagacagagtttcataggggaggcaaaatggagactccgtggcttgggggtggggggaatggaggcccaaagggtaggaaggagacctagaaagaggggtgagatggagacccagggagaagtagtggcaaagaaagatgagctgaaggtcaggccaggacagtgagacctgactccttgctcctaccagcctactatggcttaagacccagggccagggtcccgttgatgtaacagagcagaggaccagcagatgaatggacaccttgaagcagaggagcagcaggaccagaggccagaccaggagctgaccgggagctggggccacgggcctaggagcaccctggtcagggctaaggccatggccccgcccccaccgccactggctgccagcaccccgctcctccatggcgagtttggctcctacccagcccgaggcccacgctttgccctcacccttacatcgcaggccctgcacatacagcggctgcgccccaaacctgaagccaggccccggggtggcctggtcccgttggccgaggtctcaggctgctgcaccctgcgaagccgcagcccctcagactcagcggcctacttctgcatctacacctaccctcggggccggcgcggggcccggcgcagagccactcgcaccttccgggcagatggggccgccacctacgaagagaaccgtgccgaggcccagcgctgggccactgccctcacctgtctgctccgaggactgccactgcccggggatgggggtgaggtgctgggcagctgctctatcctggagccaccttggtgtctctgcagaatttcctccat

SEQ ID NO: 9319 - protein, 190 aa, Homo sapiens; identical to SEQ ID NO: 9299

SEQ ID NO: 9320 - DNA, 961 bp, Homo sapiens
atctctgggcctttgttacgcgtgttagagtctctgtctttgcagctaaagacctcctccctcacgccccttttcttttgtgaattcaatggatgagacaggcccactctcccttaacaaagatggcgacaacggcgctgtctatggggccgcgacgtcgtctccgctgcgcgtcggccctcacccacgatggcggccagtctcccgaagcgcgaggccccgcccagctctcggcctctcccgcggccggtccctgcaccaagctcgcgagctgactggctccaccccccgcgccctcgtattggtgcggcccaggccggctgcacggccattggctgagcggatgcacaccctccccccacccctaggtctgatgggggctgttggtgctgacttgcgggaccgcctggaggaggacccggcgtaggccagaccaggagctgaccgggagctggggccacgggcctaggagcaccctggtcagggctaaggccatggccccgcccccaccgccactggctgccagcaccccgctcctccatggcgagtttggctcctacccagcccgaggcccacgctttgccctcacccttacatcgcaggccctgcacatacagcggctgcgccccaaacctgaagccaggccccggggtggcctggtcccgttggccgaggtctcaggctgctgcaccctgcgaagccgcagcccctcagactcagcggcctacttctgcatctacacctaccctcggggccggcgcggggcccggcgcagagccactcgcaccttccgggcagatggggccgccacctacgaagagaaccgtgccgaggcccagcgctgggccactgccctcacctgtctgctccgaggactgccactgcccggggatgggggtgaggtgctgggcagctgctctatcctggagccaccttggtgtctctgcagaatttcctccat

SEQ ID NO: 9321 - protein, 154 aa, Homo sapiens
MAPPPPPLAASTPLLHGEFGSYPARGPRFALTLTSQALHIQRLRPKPEARPRGGLVPLAEVSGCCTLRSRSPSDSAAYFCIYTYPRGRRGARRRATRTFRADGAATYEENRAEAQRWATALTCLLRGLPLPGDGGEVLGSCSILEPPWCLCRIS

SEQ ID NO: 9322 - DNA, 1211 bp, Homo sapiens
attggctgagcggatgcacaccctccccccacccctaggtctgatgggggctgttggtgctgacttgcgggaccgcctggaggaggacccggcgtaggccagaccaggagctgaccgggagctggggccacgggcctaggagcaccctggtcagggctaaggccatggccccgcccccaccgccactggctgccagcaccccgctcctccatggcgagtttggctcctacccagcccgaggcccacgctttgccctcacccttacatcgcaggccctgcacatacagcggctgcgccccaaacctgaagccaggccccggggtggcctggtcccgttggccgaggtctcaggctgctgcaccctgcgaagccgcagcccctcagactcagcggcctacttctgcatctacacctaccctcggggccggcgcggggcccggcgcagagccactcgcaccttccgggcagatggggccgccacctacgaagagaaccgtgccgaggcccagcgctgggccactgccctcacctgtctgctccgaggactgccactgcccggggatggggagatcacccctgacctgctacctcggccgccccggttgcttctattggtcaatccctttgggggtcggggcctggcctggcagtggtgtaagaaccacgtgcttcccatgatctctgaagctgggctgtccttcaacctcatccagacagaacgacagaaccacgcccgggagctggtccaggggctgagcctgagtgagtgggatggcatcgtcacggtctcgggagacgggctgctccatgaggtgctgaacgggctcctagatcgccctgactgggaggaagctgtgaagatgcctgtgggcatcctcccctgcggctcgggcaacgcgctggccggagcagtgaaccagcacgggggcccgcgggaggactcagactccagcacttccagcagcgcctgccctctatggacgacagcccggagctgcccacgggctgcagccagtatgccagggagctgccctcttcttccacaacagctggctctggggttctcaagatttattcaggatcgtgttaacggaggcggtgggaggatagggtccctgacgtgccggggacacacacagagaaccctccccgcccccgcaagggaggggggaggctcgctttttcttaaaaatataaatgtatttatctgc

SEQ ID NO: 9323 - protein, 348 aa, Homo sapiens
MAPPPPPLAASTPLLHGEFGSYPARGPRFALTLTSQALHIQRLRPKPEARPRGGLVPLAEVSGCCTLRSRSPSDSAAYFCIYTYPRGRRGARRRATRTFRADGAATYEENRAEAQRWATALTCLLRGLPLPGDGEITPDLLPRPPRLLLLVNPFGGRGLAWQWCKNHVLPMISEAGLSFNLIQTERQNHARELVQGLSLSEWDGIVTVSGDGLLHEVLNGLLDRPDWEEAVKMPVGILPCGSGNALAGAVNQHGGPREDSDSSTSSSACPLWTTARSCPRAAASMPGSCPLLPQQLALGFSRFIQDRVNGGGGRIGSLTCRGHTQRTLPAPAREGGGSLFLKNINVFI

SEQ ID NO: 9324 - DNA, 1022 bp, Homo sapiens
ctaggtctgatgggggctgttggtgctgacttgcgggaccgcctggaggaggacccggcgtgtgaggagggtgcgggggtcggggcagggaccggagtctaggggactgagggaccaagaggaacagagactcaggcccgggactggggcaccggggtgggagatggaaatggaaaacctgggccaggactgaacccagccaggcctgggactgggttctggaaataagagtgcggatggcggtttgggggcccagggccagacacgcaggcctatggattggggaccaatggatggagacccaggtccaggtctcggggacccagggacagagacccaggcccaagactggaggacatctagggctctgtgcttgaacctgatttgaggttcccataatggggccagggcaggtttgggggtgaagcagacgtcctggacccgagagagccgctggggataggggggcagatgtagttcctaaggaggccagaccaggagctgaccgggagctggggccacgggcctaggagcaccctggtcagggctaaggccatggccccgcccccaccgccactggctgccagcaccccgctcctccatggcgagtttggctcctacccagcccgaggcccacgctttgccctcacccttacatcgcaggccctgcacatacagcggctgcgccccaaacctgaagccaggccccggggtggcctggtcccgttggccgaggtctcaggctgctgcaccctgcgaagccgcagcccctcagactcagcggcctacttctgcatctacacctaccctcggggccggcgcggggcccggcgcagagccactcgcaccttccgggcagatggggccgccacctacgaagagaaccgtgccgaggcccagcgctgggccactgccctcacctgtctgctccgaggactgccactgcccggggatgggggtgaggtgctgggcagctgctctatcctggagccaccttggtgtctctgcagaatttcctccat

SEQ ID NO: 9325 - protein, 154 aa, Homo sapiens; identical to SEQ ID NO: 9321

SEQ ID NO: 9326 - DNA, 2685 bp, Homo sapiens
ggggaacaaaggtgagcgaaaggaggaggcagaatccgggcagagggcagggagagggcctgtggggaagggacctcagtcctgctcccacccgctccctggagagcaggcggccagacacccagaggccagaccaggagctgaccgggagctggggccacgggcctaggagcaccctggtcagggctaaggccatggccccgcccccaccgccactggctgccagcaccccgctcctccatggcgagtttggctcctacccagcccgaggcccacgctttgccctcacccttacatcgcaggccctgcacatacagcggctgcgccccaaacctgaagccaggccccggggtggcctggtcccgttggccgaggtctcaggctgctgcaccctgcgaagccgcagcccctcagactcagcggcctacttctgcatctacacctaccctcggggccggcgcggggcccggcgcagagccactcgcaccttccgggcagatggggccgccacctacgaagagaaccgtgccgaggcccagcgctgggccactgccctcacctgtctgctccgaggactgccactgcccggggatggggagatcacccctgacctgctacctcggccgccccggttgcttctattggtcaatccctttgggggtcggggcctggcctggcagtggtgtaagaaccacgtgcttcccatgatctctgaagctgggctgtccttcaacctcatccagacagaacgacagaaccacgcccgggagctggtccaggggctgagcctgagtgagtgggatggcatcgtcacggtctcgggagacgggctgctccatgaggtgctgaacgggctcctagatcgccctgactgggaggaagctgtgaagatgcctgtgggcatcctcccctgcggctcgggcaacgcgctggccggagcagtgaaccagcacgggggatttgagccagccctgggcctcgacctgttgctcaactgctcactgttgctgtgccggggtggtggccacccactggacctgctctccgtgacgctggcctcgggctcccgctgtttctccttcctgtctgtggcctggggcttcgtgtcagatgtggatatccagagcgagcgcttcagggccttgggcagtgcccgcttcacactgggcacggtgctgggcctcgccacactgcacacctaccgcggacgcctctcctacctccccgccactgtggaacctgcctcgcccacccctgcccatagcctgcctcgtgccaagtcggagctgaccctaaccccagacccagccccgcccatggcccactcacccctgcatcgttctgtgtctgacctgcctcttcccctgccccagcctgccctggcctctcctggctcgccagaacccctgcccatcctgtccctcaacggtgggggcccagagctggctggggactggggtggggctggggatgctccgctgtccccggacccactgctgtcttcacctcctggctctcccaaggcagctctacactcacccgtctccgaaggggcccccgtaattcccccatcctctgggctcccacttcccacccctgatgcccgggtaggggcctccacctgcggcccgcccgaccacctgctgcctccgctgggcaccccgctgcccccagactgggtgacgctggagggggactttgtgctcatgttggccatctcgcccagccacctaggcgctgacctggtggcagctccgcatgcgcgcttcgacgacggcctggtgcacctgtgctgggtgcgtagcggcatctcgcgggctgcgctgctgcgccttttcttggccatggagcgtggtagccacttcagcctgggctgtccgcagctgggctacgccgcggcccgtgccttccgcctagagccgctcacaccacgcggcgtgctcacagtggacggggagcaggtggagtatgggccgctacaggcacagatgcaccctggcatcggtacactgctcactgggcctcctggctgcccggggcgggagccctgaaactaaacaagcttggtacccgccgggggcggggcctacattccaatggggcggagcctgagctagggggtgtggcctggctgctagagttgtggtggcaggggccctggccccgtctcaggattgcgctcgctttcatgggaccagacgtgatgctggaaggtgggcgtcgtcacggttaaagagaaatgggctcgtcccgagggtagtgcctgatcaatgagggcggggcctggcgtctgatctggggccgcccttacggggcagggctcagtcctgacgcttgccacctgctcctacccggccaggatggctgagggcggagtctattttacgcgtcgcccaatgacaggacctggaatgtactggctggggtaggcctcagtgagtcggccggtcagggcccgcagcctcgccccatccactccggtgcctccatttagctggccaatcagcccaggaggggcaggttccccggggccggcgctaggatttgcactaatgttcctctccccgcgggtgggggcggggaaattcatatcccctgttcgtctcatgcgcgtcctccgtccccaatctaaaaagcaattgaaaaggtctatgcaataaaggcagtcgcttcattcctctcaga

SEQ ID NO: 9327 - protein, 618 aa, Homo sapiens
MAPPPPPLAASTPLLHGEFGSYPARGPRFALTLTSQALHIQRLRPKPEARPRGGLVPLAEVSGCCTLRSRSPSDSAAYFCIYTYPRGRRGARRRATRTFRADGAATYEENRAEAQRWATALTCLLRGLPLPGDGEITPDLLPRPPRLLLLVNPFGGRGLAWQWCKNHVLPMISEAGLSFNLIQTERQNHARELVQGLSLSEWDGIVTVSGDGLLHEVLNGLLDRPDWEEAVKMPVGILPCGSGNALAGAVNQHGGFEPALGLDLLLNCSLLLCRGGGHPLDLLSVTLASGSRCFSFLSVAWGFVSDVDIQSERFRALGSARFTLGTVLGLATLHTYRGRLSYLPATVEPASPTPAHSLPRAKSELTLTPDPAPPMAHSPLHRSVSDLPLPLPQPALASPGSPEPLPILSLNGGGPELAGDWGGAGDAPLSPDPLLSSPPGSPKAALHSPVSEGAPVIPPSSGLPLPTPDARVGASTCGPPDHLLPPLGTPLPPDWVTLEGDFVLMLAISPSHLGADLVAAPHARFDDGLVHLCWVRSGISRAALLRLFLAMERGSHFSLGCPQLGYAAARAFRLEPLTPRGVLTVDGEQVEYGPLQAQMHPGIGTLLTGPPGCPGREP

SEQ ID NO: 9328 - DNA, 2576 bp, Homo sapiens
tatgtttctgtctcctatcctcttcccctttgcatgggtcttgaccacaggtgagtcacccagggtggtgagagcagcagcctgagacaggaccaggtaccacccagagtgatgggtgccaacagaggtctagggcttccctggagttcagaggtggcatctaatcctgcctggggcccctaagggctggaagtaacctaatcctgggtaataggtgtttggggtgaggaaagtgggaaccacagctctgaactacagctcctcccacacatggggacaaagggcatttggtttcacacctaagccctgcctttgtctcagcagctaggagttggggcagggctgcatacctaggcctggccacatgagagccagcaggtcccaggggccagccctccaccaattccgttgggggctgatgaagggactgtttccaaggtggggggcctgggtcactggcctctgcagaccctaacctctctccacagagatcacccctgacctgctacctcggccgccccggttgcttctattggtcaatccctttgggggtcggggcctggcctggcagtggtgtaagaaccacgtgcttcccatgatctctgaagctgggctgtccttcaacctcatccagacagaacgacagaaccacgcccgggagctggtccaggggctgagcctgagtgagtgggatggcatcgtcacggtctcgggagacgggctgctccatgaggtgctgaacgggctcctagatcgccctgactgggaggaagctgtgaagatgcctgtgggcatcctcccctgcggctcgggcaacgcgctggccggagcagtgaaccagcacgggggatttgagccagccctgggcctcgacctgttgctcaactgctcactgttgctgtgccggggtggtggccacccactggacctgctctccgtgacgctggcctcgggctcccgctgtttctccttcctgtctgtggcctggggcttcgtgtcagatgtggatatccagagcgagcgcttcagggccttgggcagtgcccgcttcacactgggcacggtgctgggcctcgccacactgcacacctaccgcggacgcctctcctacctccccgccactgtggaacctgcctcgcccacccctgcccatagcctgcctcgtgccaagtcggagctgaccctaaccccagacccagccccgcccatggcccactcacccctgcatcgttctgtgtctgacctgcctcttcccctgccccagcctgccctggcctctcctggctcgccagaacccctgcccatcctgtccctcaacggtgggggcccagagctggctggggactggggtggggctggggatgctccgctgtccccggacccactgctgtcttcacctcctggctctcccaaggcagctctacactcacccgtctccgaaggggcccccgtaattcccccatcctctgggctcccacttcccacccctgatgcccgggtaggggcctccacctgcggcccgcccgaccacctgctgcctccgctgggcaccccgctgcccccagactgggtgacgctggagggggactttgtgctcatgttggccatctcgcccagccacctaggcgctgacctggtggcagctccgcatgcgcgcttcgacgacggcctggtgcacctgtgctgggtgcgtagcggcatctcgcgggctgcgctgctgcgccttttcttggccatggagcgtggtagccacttcagcctgggctgtccgcagctgggctacgccgcggcccgtgccttccgcctagagccgctcacaccacgcggcgtgctcacagtggacggggagcaggtggagtatgggccgctacaggcacagatgcaccctggcatcggtacactgctcactgggcctcctggctgcccggggcgggagccctgaaactaaacaagcttggtacccgccgggggcggggcctacattccaatggggcggagcctgagctagggggtgtggcctggctgctagagttgtggtggcaggggccctggccccgtctcaggattgcgctcgctttcatgggaccagacgtgatgctggaaggtgggcgtcgtcacggttaaagagaaatgggctcgtcccgagggtagtgcctgatcaatgagggcggggcctggcgtctgatctggggccgcccttacggggcagggctcagtcctgacgcttgccacctgctcctacccggccaggatggctgagggcggagtctattttacgcgtcgcccaatgacaggacctggaatgtactggctggggtaggcctcagtgagtcggccggtcagggcccgcagcctcgccccatccactccggtgcctccatttagctggccaatcagcccaggaggggcaggttccccggggccggcgctaggatttgcactaatgttcctctccccgcgggtgggggcggggaaattcatatcccctgttcgtctcatgcgcgtcctccgtccccaatctaaaaagcaattgaaaaggtctatgcaataaaggcagtcgcttcattcctctcaga

SEQ ID NO: 9329 - protein, 448 aa, Homo sapiens
MISEAGLSFNLIQTERQNHARELVQGLSLSEWDGIVTVSGDGLLHEVLNGLLDRPDWEEAVKMPVGILPCGSGNALAGAVNQHGGFEPALGLDLLLNCSLLLCRGGGHPLDLLSVTLASGSRCFSFLSVAWGFVSDVDIQSERFRALGSARFTLGTVLGLATLHTYRGRLSYLPATVEPASPTPAHSLPRAKSELTLTPDPAPPMAHSPLHRSVSDLPLPLPQPALASPGSPEPLPILSLNGGGPELAGDWGGAGDAPLSPDPLLSSPPGSPKAALHSPVSEGAPVIPPSSGLPLPTPDARVGASTCGPPDHLLPPLGTPLPPDWVTLEGDFVLMLAISPSHLGADLVAAPHARFDDGLVHLCWVRSGISRAALLRLFLAMERGSHFSLGCPQLGYAAARAFRLEPLTPRGVLTVDGEQVEYGPLQAQMHPGIGTLLTGPPGCPGREP

SEQ ID NO: 9330 - DNA, 437 bp, Homo sapiens
gctctccgtgacgctggcctcgggctcccgctgtttctccttcctatctggggccgcccttacggggcagggctcagtcctgacgcttgccacctgctcctacccggccaggatggctgagggcggagtctattttacgcgtcgcccaatgacaggacctggaatgtactggctggggtaggcctcagtgagtcggccggtcagggcccgcagcctcgccccatccactccggtgcctccatttagctggccaatcagcccaggaggggcaggttccccggggccggcgctaggatttgcactaatgttcctctccccgcgggtgggggcggggaaattcatatcccctgttcgtctcatgcgcgtcctccgtccccaatctaaaaagcaattgaaaaggtctatgcaataaaggcagtcgcttcattcctctcaga

SEQ ID NO: 9331 - protein, 35 aa, Homo sapiens
MFLSPRVGAGKFISPVRLMRVLRPQSKKQLKRSMQ

SEQ ID NO: 9332 - DNA, 1508 bp, Homo sapiens
tgacgctggcctcgggctcccgctgtttctccttcctgtctgtggcctggggcttcgtgtcagatgtggatatccagagcgagcgcttcagggccttgggcagtgcccgcttcacactgggcacggtgctgggcctcgccacactgcacacctaccgcggacgcctctcctacctccccgccactgtggaacctgcctcgcccacccctgcccatagcctgcctcgtgccaagtcggagctgaccctaaccccagacccagccccgcccatggcccactcacccctgcatcgttctgtgtctgacctgcctcttcccctgccccagcctgccctggcctctcctggctcgccagaacccctgcccatcctgtccctcaacggtgggggcccagagctggctggggactggggtggggctggggatgctccgctgtccccggacccactgctgtcttcacctcctggctctcccaaggcagctctacactcacccgtctccgaaggggcccccgtaattcccccatcctctgggctcccacttcccacccctgatgcccgggtaggggcctccacctgcggcccgcccgaccacctgctgcctccgctgggcaccccgctgcccccagactgggtgacgctggagggggactttgtgctcatgttggccatctcgcccagccacctaggcgctgacctggtggcagctccgcatgcgcgcttcgacgacggcctggtgcacctgtgctgggtgcgtagcggcatctcgcgggctgcgctgctgcgccttttcttggccatggagcgtggtagccacttcagcctgggctgtccgcagctgggctacgccgcggcccgtgccttccgcctagagccgctcacaccacgcggcgtgctcacagtggacggggagcaggtggagtatgggccgctacaggcacagatgcaccctggcatcggtacactgctcactgggcctcctggctgcccggggcgggattgcgctcgctttcatgggaccagacgtgatgctggaaggtgggcgtcgtcacggttaaagagaaatgggctcgtcccgagggtagtgcctgatcaatgagggcggggcctggcgtctgatctggggccgcccttacggggcagggctcagtcctgacgcttgccacctgctcctacccggccaggatggctgagggcggagtctattttacgcgtcgcccaatgacaggacctggaatgtactggctggggtaggcctcagtgagtcggccggtcagggcccgcagcctcgccccatccactccggtgcctccatttagctggccaatcagcccaggaggggcaggttccccggggccggcgctaggatttgcactaatgttcctctccccgcgggtgggggcggggaaattcatatcccctgttcgtctcatgcgcgtcctccgtccccaatctaaaaagcaattgaaaaggtctatgcaataaaggcagtcgcttcattcctctcaga

SEQ ID NO: 9333 - protein, 275 aa, Homo sapiens
MAHSPLHRSVSDLPLPLPQPALASPGSPEPLPILSLNGGGPELAGDWGGAGDAPLSPDPLLSSPPGSPKAALHSPVSEGAPVIPPSSGLPLPTPDARVGASTCGPPDHLLPPLGTPLPPDWVTLEGDFVLMLAISPSHLGADLVAAPHARFDDGLVHLCWVRSGISRAALLRLFLAMERGSHFSLGCPQLGYAAARAFRLEPLTPRGVLTVDGEQVEYGPLQAQMHPGIGTLLTGPPGCPGRDCARFHGTRRDAGRWASSRLKRNGLVPRVVPDQ

SEQ ID NO: 9334 - DNA, 1196 bp, Homo sapiens
agctgaccctaaccccagacccagccccgcccatggcccactcacccctgcatcgttctgtgtctgacctgcctcttcccctgccccagcctgccctggcctctcctggctcgccagaacccctgcccatcctgtccctcaacggtgggggcccagagctggctggggactggggtggggctggggatgctccgctgtccccggacccactgctgtcttcacctcctggctctcccaaggcagctctacactcacccgtctccgaaggggcccccgtaattcccccatcctctgggctcccacttcccacccctgatgcccgggtaggggcctccacctgcggcccgcccgaccacctgctgcctccgctgggcaccccgctgcccccagactgggtgacgctggagggggactttgtgctcatgttggccatctcgcccagccacctaggcgctgacctggtggcagctccgcatgcgcgcttcgacgacggcctggtgcacctgtgctgggtgcgtagcggcatctcgcgggctgcgctgctgcgccttttcttggccatggagcgtggtagccacttcagcctgggctgtccgcagctgggctacgccgcggcccgtgccttccgcctagagccgctcacaccacgcggcgtgctcacagtggacggggagcaggtggagtatgggccgctacaggcacagatgcaccctggcatcggtacactgctcactgggcctcctggctgcccggggcgggagccctgaaactaaacaagcttggtacccgccgggggcggggcctacattccaatggggcggagcctgagctagggggtgtggcctggctgctagagttgtggtggcaggggccctggccccgtctcaggattgcgctcgctttcatgggaccagacgtgatgctggaaggtgggcgtcgtcacggttaaagagaaatgggctcgtcccgagggtagtgcctgatcaatgagggcggggcctggcgtctgatctggggccgcccttacggggcaggttccccggggccggcgctaggatttgcactaatgttcctctccccgcgggtgggggcggggaaattcatatcccctgttcgtctcatgcgcgtcctccgtccccaatctaaaaagcaattgaaaaggtctatgcaataaaggcagtcgcttcattcctctc

SEQ ID NO: 9335 - protein, 244 aa, Homo sapiens
MAHSPLHRSVSDLPLPLPQPALASPGSPEPLPILSLNGGGPELAGDWGGAGDAPLSPDPLLSSPPGSPKAALHSPVSEGAPVIPPSSGLPLPTPDARVGASTCGPPDHLLPPLGTPLPPDWVTLEGDFVLMLAISPSHLGADLVAAPHARFDDGLVHLCWVRSGISRAALLRLFLAMERGSHFSLGCPQLGYAAARAFRLEPLTPRGVLTVDGEQVEYGPLQAQMHPGIGTLLTGPPGCPGREP

SEQ ID NO: 9336 - DNA, 2942 bp, Homo sapiens
aggtcagtgtcccgcctcccaccgaaaggcaaggcaacttcacgcgctgagcccctcacgcgccctcctgggccctggcggacccagaggccccattggctgtgcgtctcaaggtgtcggagacgattggtccgtgtttgcagccggagggaggcacgcggctgggttgcatgcccatagaggctggcggggctggacgcgccgggcggggacccggaggaggggcgcgcgctgtggcgtcgggtgttttggtttggatttttttttccgcgaaagaagtttgctttggccacgcctcaaggcggccgcctcctcctgccccctcctccgcccctccgcgcacacctctcggtgcagattgcaaagcgccttccgttgcgagagctgcagattttgcaagagccaggctcgcccaccttgtagaaggagcgccttgagtcccctctcaccctcggttgcaaagagccgaccgcttgatctggacaccccctcgcccagattgcatgatctcccgggaccctcttgagttgcacgtttctgcaccgaggacctcaaatccccgtcgctcctaggatttgcagcgttctggatactggagggttgcaggctacactcgcccgcccctgggcagacactcgtccaaaccactggagtgtgctggtgactggcaggccagcccttcgcctctccatgaacccgtgagcctgggggcaggtgccaggcgatggcgcggcctgtgagcgacaggaccccggcccctctgctgctgggcggcccggccgggacaccccctggcgggggagcgctgcttgggttgcggagccttctgcaggggaccagcaagcccaaagagccggccagctgtctcctgaaggaaaaggagcgcaaggcggccctgcctgcagccacaacccctgggccaggcctggagactgcgggcccggcggatgccccggctggggcagtggtgggcggagggtccccgcgggggcgcccggggccggtgcccgccccgggtctgttggcgccactgctgtgggagcgcacgctgccgttcggcgatgtggagtacgtagacctggacgccttcctgctggagcacgggctcccgcccagcccgccgccccccggtggcccgtcgccggagccgtcgcccgcgcggacgcccgcaccctccccagggccgggttcgtgcggctcggcttccccccgctcctctcctgggcacgcccccgcccgggctgccctcgggaccgccagcggccaccgcgcaggcctgacctctcgggacacacccagccctgtggacccagacaccgtggaggtgttgatgacctttgaacccgacccagctgatcttgccctatcaagcattcctggccacgagacctttgaccctcgaagacatcgcttctcagaagaggaacttaagccccagccaatcatgaagaaggcaagaaaaatccaggtgccggaggagcagaaggatgagaaatactggagccggcggtacaagaacaacgaggcagccaagcggtcccgtgacgcccggcggctcaaggagaaccagatatcggtgcgggcggccttcctggagaaggagaacgccctgctgcggcaggaagttgtggccgtgcgccaggagctgtcccactaccgcgccgtgctgtcccgataccaggcccagcacggggccctgtgaggctgccccacatccccacctggcggagctctcctccgccttgctgagacttacgccctgttcccttcctgccctgtggcccacgggccggccagctgggtgccccagggacgtgataatgcagataaatacatttatatttttaagaaaaagcgagcctcccccctcccttgcgggggcggggagggttctctgtgtgtgtccccggcacgtcagggaccctatcctcccaccgcctccgttaacacgatcctgaataaatcttgagaaccccagagccagctgttgtggaagaagagggcagctccctggcatactggctgcagcccgtgggcagctccgggctgtcgtccatagagggcaggcgctgctggaagtgctggagtctgagtcctcccgcgggctgtcggatggaggaagggcagaaggtctgagaggaatgaagcgactgcctttattgcatagaccttttcaattgctttttagattggggacggaggacgcgcatgagacgaacaggggatatgaatttccccgcccccacccgcggggagaggaacattagtgcaaatcctagcgccggccccggggaacctgcccctcctgggctgattggccagctaaatggaggcaccggagtggatggggcgaggctgcgggccctgaccggccgactcactgaggcctaccccagccagtacattccaggtcctgtcattgggcgacgcgtaaaatagactccgccctcagccatcctggccgggtaggagcaggtggcaagcgtcaggactgagccctgccccgtaagggcggccccagatcagacgccaggccccgccctcattgatcaggcactaccctcgggacgagcccatttctctttaaccgtgacgacgcccaccttccagcatcacgtctggtcccatgaaagcgagcgcaatcctgagacggggccagggcccctgccaccacaactctagcagccaggccacaccccctagctcaggctccgccccattggaatgtaggccccgcccccggcgggtaccaagcttgtttagtttcagggctcccgccccgggcagccaggaggcccagtgagcagtgtaccgatgccagggtgcatctgtgcctgtagcggcccatactccacctgctccccgtccactgtgagcacgccgcgtggtgtgagcggctctaggcggaaggcacgggccgcggcgtagcccagctgcggaca

SEQ ID NO: 9337 - protein, 325 aa, Homo sapiens; identical to SEQ ID NO: 1179

SEQ ID NO: 9338 - DNA, 547 bp, Homo sapiens
gtgttgatgacctttgaacccgacccagctgatcttgccctatcaagcattcctggccacgagacctttgaccctcgaagacatcgcttctcagaagaggaacttaagccccagccaatcatgaagaaggagaaccagatatcggtgcgggcggccttcctggagaaggagaacgccctgctgcggcaggaagttgtggccgtgcgccaggagctgtcccactaccgcgccgtgctgtcccgataccaggcccagcacggggccctgtgaggctgccccacatccccacctggcggagctctcctccgccttgctgagacttacgccctgttcccttcctgccctgtggcccacgggccggccagctgggtgccccagggacgtgataatgcagataaatacatttatatttttaagaaaaagcgagcctcccccctcccttgcgggggcggggagggttctctgtgtgtgtccccggcacgtcagggaccctatcctcccaccgcctccgttaacacgatcctgaataaatcttgagaaccccaga

SEQ ID NO: 9339 - protein, 87 aa, Homo sapiens
MTFEPDPADLALSSIPGHETFDPRRHRFSEEELKPQPIMKKENQISVRAAFLEKENALLRQEVVAVRQELSHYRAVLSRYQAQHGAL

SEQ ID NO: 9340 - DNA, 883 bp, Homo sapiens
ggctggctggtgcttaaaggtacaggcgcctcctttcgaaccaatcttctggaaccttagagcagcttctcctcctctttccagcgagtagctcttagactctaacttgagagcttttcagtgcagtagattctttttctctggacagtctggggtctaagcttaggtcgtggattcggcctgacctctcgggacacacccagccctgtggacccagacaccgtggaggtgttgatgacctttgaacccgacccagctgatcttgccctatcaagcattcctggccacgagacctttgaccctcgaagacatcgcttctcagaagaggaacttaagccccagccaatcatgaagaaggcaagaaaaatccaggtgccggaggagcagaaggatgagaaatactggagccggcggtacaagaacaacgaggcagccaagcggtcccgtgacgcccggcggctcaaggagaaccagatatcggtgcgggcggccttcctggagaaggagaacgccctgctgcggcaggaagttgtggccgtgcgccaggagctgtcccactaccgcgccgtgctgtcccgataccaggcccagcacggggccctgtgaggctgccccacatccccacctggcggagctctcctccgccttgctgagacttacgccctgttcccttcctgccctgtggcccacgggccggccagctgggtgccccagggacgtgataatgcagataaatacatttatatttttaagaaaaagcgagcctcccccctcccttgcgggggcggggagggttctctgtgtgtgtccccggcacgtcagggaccctatcctcccaccgcctccgttaacacgatcctgaataaatcttgagaaccccaga

SEQ ID NO: 9341 - protein, 123 aa, Homo sapiens
MTFEPDPADLALSSIPGHETFDPRRHRFSEEELKPQPIMKKARKIQVPEEQKDEKYWSRRYKNNEAAKRSRDARRLKENQISVRAAFLEKENALLRQEVVAVRQELSHYRAVLSRYQAQHGAL

SEQ ID NO: 9342 - DNA, 834 bp, Homo sapiens
gccgggggaacgtgagggcgccgatggcgggggcctgggaggaagggaggaggagggaagcaggcgtcagcacgtgactcggccctgaacctgtgtccttagctggccccggctggctggtgcttaaaggcctgacctctcgggacacacccagccctgtggacccagacaccgtggaggtgttgatgacctttgaacccgacccagctgatcttgccctatcaagcattcctggccacgagacctttgaccctcgaagacatcgcttctcagaagaggaacttaagccccagccaatcatgaagaaggcaagaaaaatccaggtgccggaggagcagaaggatgagaaatactggagccggcggtacaagaacaacgaggcagccaagcggtcccgtgacgcccggcggctcaaggagaaccagatatcggtgcgggcggccttcctggagaaggagaacgccctgctgcggcaggaagttgtggccgtgcgccaggagctgtcccactaccgcgccgtgctgtcccgataccaggcccagcacggggccctgtgaggctgccccacatccccacctggcggagctctcctccgccttgctgagacttacgccctgttcccttcctgccctgtggcccacgggccggccagctgggtgccccagggacgtgataatgcagataaatacatttatatttttaagaaaaagcgagcctcccccctcccttgcgggggcggggagggttctctgtgtgtgtccccggcacgtcagggaccctatcctcccaccgcctccgttaacacgatcctgaataaatcttgagaaccccaga

SEQ ID NO: 9343 - protein, 123 aa, Homo sapiens; identical to SEQ ID NO: 9341

SEQ ID NO: 9344 - DNA, 1024 bp, Homo sapiens
cccgtcccctctttctctggatctccgccctgtgcctctcggactcggggtctcttctccatctctatctcccccacctcaccctcatcccaacccgtctttcccggcccgcaggtctcctgaaggaaaaggagcgcaaggcggccctgcctgcagccacaacccctgggccaggcctggagactgcgggcccggcggatgccccggctggggcagtggtgggcggagggtccccgcgggggcgcccggggccggtgcccgccccgggtctgttggcgccactgctgtgggagcgcacgctgccgttcggcgatgtggagcctgacctctcgggacacacccagccctgtggacccagacaccgtggaggtgttgatgacctttgaacccgacccagctgatcttgccctatcaagcattcctggccacgagacctttgaccctcgaagacatcgcttctcagaagaggaacttaagccccagccaatcatgaagaaggcaagaaaaatccaggtgccggaggagcagaaggatgagaaatactggagccggcggtacaagaacaacgaggcagccaagcggtcccgtgacgcccggcggctcaaggagaaccagatatcggtgcgggcggccttcctggagaaggagaacgccctgctgcggcaggaagttgtggccgtgcgccaggagctgtcccactaccgcgccgtgctgtcccgataccaggcccagcacggggccctgtgaggctgccccacatccccacctggcggagctctcctccgccttgctgagacttacgccctgttcccttcctgccctgtggcccacgggccggccagctgggtgccccagggacgtgataatgcagataaatacatttatatttttaagaaaaagcgagcctcccccctcccttgcgggggcggggagggttctctgtgtgtgtccccggcacgtcagggaccctatcctcccaccgcctccgttaacacgatcctgaataaatcttgagaaccccaga

SEQ ID NO: 9345 - protein, 182 aa, Homo sapiens
MPRLGQWWAEGPRGGARGRCPPRVCWRHCCGSARCRSAMWSLTSRDTPSPVDPDTVEVLMTFEPDPADLALSSIPGHETFDPRRHRFSEEELKPQPIMKKARKIQVPEEQKDEKYWSRRYKNNEAAKRSRDARRLKENQISVRAAFLEKENALLRQEVVAVRQELSHYRAVLSRYQAQHGAL

SEQ ID NO: 9346 - DNA, 6294 bp, Homo sapiens
aggtcagtgtcccgcctcccaccgaaaggcaaggcaacttcacgcgctgagcccctcacgcgccctcctgggccctggcggacccagaggccccattggctgtgcgtctcaaggtgtcggagacgattggtccgtgtttgcagccggagggaggcacgcggctgggttgcatgcccatagaggctggcggggctggacgcgccgggcggggacccggaggaggggcgcgcgctgtggcgtcgggtgttttggtttggatttttttttccgcgaaagaagtttgctttggccacgcctcaaggcggccgcctcctcctgccccctcctccgcccctccgcgcacacctctcggtgcagattgcaaagcgccttccgttgcgagagctgcagattttgcaagagccaggctcgcccaccttgtagaaggagcgccttgagtcccctctcaccctcggttgcaaagagccgaccgcttgatctggacaccccctcgcccagattgcatgatctcccgggaccctcttgagttgcacgtttctgcaccgaggacctcaaatccccgtcgctcctaggatttgcagcgttctggatactggagggttgcaggctacactcgcccgcccctgggcagacactcgtccaaaccactggagtgtgctggtgactggcaggccagcccttcgcctctccatgaacccgtgagcctgggggcaggtgccaggcgatggcgcggcctgtgagcgacaggaccccggcccctctgctgctgggcggcccggccgggacaccccctggcgggggagcgctgcttgggttgcggagccttctgcaggggaccagcaagcccaaagagccggccagctgtctcctgaaggaaaaggagcgcaaggcggccctgcctgcagccacaacccctgggccaggcctggagactgcgggcccggcggatgccccggctggggcagtggtgggcggagggtccccgcgggggcgcccggggccggtgcccgccccgggtctgttggcgccactgctgtgggagcgcacgctgccgttcggcgatgtggagtacgtagacctggacgccttcctgctggagcacgggctcccgcccagcccgccgccccccggtggcccgtcgccggagccgtcgcccgcgcggacgcccgcaccctccccagggccgggttcgtgcggctcggcttccccccgctcctctcctgggcacgcccccgcccgggctgccctcgggaccgccagcggccaccgcgcaggtgcggcgaagggggcggggcgggtcctgacggggcggggcttggactcagggggcggggctgtgcgacgctgggggctgggaccgtgggacctggctgcggcctcgaattctgtgtccagttgtcgagaggtgtcgtgggagggggccagattcggtgtctcttaatgggtcagggaccaatggatccatgggggaggagagacttggaaccctaaattccaggaagcctgcccaatgagattttgtgggtttttctgtgggacttggggacaaacgatgtggatactcgtgaagccagaactggaagtccggaacaccagagttatttactggggagtggactgacccccgaatctgggcccataatcgatggaactgggataggactggagcccctaggtcctttacaggggcaaaggcaaaggagaggcacagaattctgtttacccaggacataagagactggcagcccaggtccctgggtcccccagtggggcgtgctgcagccccgggtcccagagttcttcagaagggaaaacgttagggatgttgtttctggatcctccaattggggctggggccaagcttcctatattcctaggagaggcctgggatcccagaatcgtggtagcccagtggcgggggttctgggaaggtccaggaggccgatgctccccggagagcagggggttgggaatctttggaggttgagtggaactaagtgactggaagagcaagaggaaagatgtttccctttgggcacattgaggtctccagggacggactgcaggtcggggattcctgggcacacctgctccaggtccgacctccgggccgaaccagggccctacccttcccagcggcacattcctgcgccacgtgagtcctcccatccctcctccgcgcttcgcgcaggcgccttcaagcgcgaggggggcggggccgggggaacgtgagggcgccgatggcgggggcctgggaggaagggaggaggagggaagcaggcgtcagcacgtgactcggccctgaacctgtgtccttagctggccccggctggctggtgcttaaaggtacaggcgcctcctttcgaaccaatcttctggaaccttagagcagcttctcctcctctttccagcgagtagctcttagactctaacttgagagcttttcagtgcagtagattctttttctctggacagtctggggtctaagcttaggtcgtggattcggtaagtaggattcaggctagactgtgcatctgaagtcctgaggttttagaagcaatagccccatcgcttctcggccttttggctaagatcaagtgtagaagcaatagccctgattcgtgtgttacctagggcaagtcagttatgactgggactcagtttccttgtttgtaaaggtggatatggctccatgatctctaagcatctttatggcttaggggaaccttcatttttctcgttattttggagacggagtctcgctctgttgtccgggctggagtgcagtggtatgatctcagctcactgcaacctccacctccagggtccgggttcaagcaattctccagcctcagcctccctagtagctgggcttaccggcacccgccactacacctgggcaattttcgtacttttagtaaagatgaggtttctccatgttggccatgctggtcttgaactcctgactaaaggtgattcgccgcctcggcttcccaaactgctggggttacaggcgtgagccactgcgcctggccaagggaaccttcatattttatattagggagattaatccctggccgaatttatgctagatcccagaaggactttccatgtggctatgataccacagcaaaaagtagcttcaggaaaccccctccttaaaatacacactcagctgacacgtgctgtttccccaaggcctgacctctcgggacacacccagccctgtggacccagacaccgtggaggtgttgatgacctttgaacccgacccagctgatcttgccctatcaagcattcctggccacgagacctttgaccctcgaagacatcgcttctcagaagaggaacttaagccccagccaatcatgaagaaggcaagaaaaatccaggtgccggaggagcagaaggtgagcagagctggatgtgggagatagacttggctggagacatgccccacagccagggaggggccttttctcacagtcaagcctgggcttctccttgggattagtgctcagcctctcctggcctgcagccacagattagtcctccttggccacggggcacaagggggcaggggcctgaggtttataaagacagtgtcaactgggcgaggggcctcactcgtgtaatcccagcattttagggggctgaggcaggaggatctcttgagctcgggagttcaagaccagcctgggcaacatggcaaaaccccatttctacaagccacttgggaggctgaggtgggaggactgcttgtgcctgggagattgaggctgcagtgagccaagattacaccactgcactccagcctgggcaacagagggagaccttgtcttaaaacaaaagacagtgtcactgtggggtgctgactcagccagctctgctaggtctacttgtagagacttggagcttctcctattacttgggtccagagctccaccaggcacacttgcaaaggacagtcttcctttggcaatgggatatcagcctgtggcctgtctctccttactcagcaggcctttgatctctgatgtgggacttcctttggagtgattgcatttggctaggatgaagactgtgccagcccctttaggccttgtttcctgggcctggacttctcactggtgggagacttcaggcttctgttagcagccagtgccactttctgatttggggtgatttgagcagtcattgcatctttgcatgattttgttttttgccattactggagtcttccctagcaagagttgcttgggcttctgttacaagactttgtcattccgggccaggcgcgttggctcacgcctgtaatcctagcactttaggaggctgaggtgggcggatcacttgaggtcaggagtttgagaccagcctggccaacatggtgaaacctcgcctctactaaaagtacaaaaatgttccgggtgtggtgtctcacacctgtaatcacagcactttgggaggccgaggcggacagatcacgagatcaggagaccatcctggccaacatggtgaaaccccgtctctacaaaaaaatacaaaaattagctgggcatggtggcactcatctgtagtcccagctacttgggaggctaatgtaggaaaatcgcttgaacccaggagacggaggttgcagtgagccgagatcgcgccactgcactccagcctgggcgacagagtgagaactccatctcaaaaaaaaaaaaaaagaacaaaaattagccggacatggtagcgggcacctataatcccagctacttgggaggctgaggcaggagaatcgcttgaacctgggaggtggaggttgcaatgagccgagatcatgccactgcattccagcctgaacgacagagcgagactccatctcaaaaacaaacaagactttgccatacccttgcgtaacacatagctacttgaagcacctaggactggcctggaagtcagatctacaccagtggtttctccttctagagggccctgttgctagggactggatttaccctcacaagcaggaactgggctttaattaaatagtggagtagagagcatctttctgagccccgtggtccttggttactaaggaggagtcttccttaggaaccaacttccaggatgggaggactttaggtataatcctctggggaggtctcaggatagtcccctttcctaagagacagctcttctctcagtcaggtcctactggggaggaggctattctctggcctcagttcaaggccagcaggtcagaggctggccacagtcattgaaaccacttagacctcacttttgtttgccaaggatggatgaggttgccttggcaaccaggtcagaaggccccagctctgcgaggattttatgggacaccaaaccccatcaccagggcaccaagctttccttagcaaccaggatctggaaaggcaatgtgcagggcagggcagtgctcttcattgggagaagccctcagaccatgaaggccttgttgctagggaacaagcatccttagcaagcaagagctaactgcatgcaggcctttatcatgtggggagggctggggtccgctttgcagagtggagacttgaagcgagttgcttgagggtggggggtctatctcatgcctttactgttgctaggggcccaatctccttagcaaccagggccctagaaaggcagacccttgggtacctatcccagcagagacctggtgtggtttaggccccgctgctggggctcccttcctctctcgctgggacctgggtccctctggacctcagtgctctccccctcttctcctgcaggatgagaaatactggagccggcggtacaagaacaacgaggcagccaagcggtcccgtgacgcccggcggctcaaggagaaccagatatcggtgcgggcggccttcctggagaaggagaacgccctgctgcggcaggaagttgtggccgtgcgccaggagctgtcccactaccgcgccgtgctgtcccgataccaggcccagcacggggccctgtgaggctgccccacatccccacctggcggagctctcctccgccttgctgagacttacgccctgttcccttcctgccctgtggcccacgggccggccagctgggtgccccagggacgtgataatgcagataaatacatttatatttttaagaaaaagcgagcctcccccctcccttgcgggggcggggagggttctctgtgtgtgtccccggcacgtcagggaccctatcctcccaccgcctccgttaacacgatcctgaataaatcttgagaaccccaga

SEQ ID NO: 9347 - protein, 238 aa, Homo sapiens
MARPVSDRTPAPLLLGGPAGTPPGGGALLGLRSLLQGTSKPKEPASCLLKEKERKAALPAATTPGPGLETAGPADAPAGAVVGGGSPRGRPGPVPAPGLLAPLLWERTLPFGDVEYVDLDAFLLEHGLPPSPPPPGGPSPEPSPARTPAPSPGPGSCGSASPRSSPGHAPARAALGTASGHRAGAAKGAGRVLTGRGLDSGGGAVRRWGLGPWDLAAASNSVSSCREVSWEGARFGVS

SEQ ID NO: 9348 - DNA, 1978 bp, Homo sapiens
aggtcagtgtcccgcctcccaccgaaaggcaaggcaacttcacgcgctgagcccctcacgcgccctcctgggccctggcggacccagaggccccattggctgtgcgtctcaaggtgtcggagacgattggtccgtgtttgcagccggagggaggcacgcggctgggttgcatgcccatagaggctggcggggctggacgcgccgggcggggacccggaggaggggcgcgcgctgtggcgtcgggtgttttggtttggatttttttttccgcgaaagaagtttgctttggccacgcctcaaggcggccgcctcctcctgccccctcctccgcccctccgcgcacacctctcggtgcagattgcaaagcgccttccgttgcgagagctgcagattttgcaagagccaggctcgcccaccttgtagaaggagcgccttgagtcccctctcaccctcggttgcaaagagccgaccgcttgatctggacaccccctcgcccagattgcatgatctcccgggaccctcttgagttgcacgtttctgcaccgaggacctcaaatccccgtcgctcctaggatttgcagcgttctggatactggagggttgcaggctacactcgcccgcccctgggcagacactcgtccaaaccactggagtgtgctggtgactggcaggccagcccttcgcctctccatgaacccgtgagcctgggggcaggtgccaggcgatggcgcggcctgtgagcgacaggaccccggcccctctgctgctgggcggcccggccgggacaccccctggcgggggagcgctgcttgggttgcggagccttctgcaggggaccagcaagcccaaagagccggccagctgtctcctgaaggaaaaggagcgcaaggcggccctgcctgcagccacaacccctgggccaggcctggagactgcgggcccggcggatgccccggctggggcagtggtgggcggagggtccccgcgggggcgcccggggccggtgcccgccccgggtctgttggcgccactgctgtgggagcgcacgctgccgttcggcgatgtggagtacgtagacctggacgccttcctgctggagcacgggctcccgcccagcccgccgccccccggtggcccgtcgccggagccgtcgcccgcgcggacgcccgcaccctccccagggccgggttcgtgcggctcggcttccccccgctcctctcctgggcacgcccccgcccgggctgccctcgggaccgccagcggccaccgcgcaggcctgacctctcgggacacacccagccctgtggacccagacaccgtggaggtgttgatgacctttgaacccgacccagctgatcttgccctatcaagcattcctggccacgagacctttgaccctcgaagacatcgcttctcagaagaggaacttaagccccagccaatcatgaagaaggcaagaaaaatccaggtgccggaggagcagaaggatgagaaatactggagccggcggtacaagaacaacgaggcagccaagcggtcccgtgacgcccggcggctcaaggagaaccagatatcggtgcgggcggccttcctggagaaggagaacgccctgctgcggcaggaagttgtggccgtgcgccaggagctgtcccactaccgcgccgtgctgtcccgataccaggcccagcacggggccctgtgaggctgccccacatccccacctggcggagctctcctccgccttgctgagacttacgccctgttcccttcctgccctgtggcccacgggccggccagctgggtgccccagggacgtgataatgcagataaatacatttatatttttaagaaaaagcgagcctcccccctcccttgcgggggcggggagggttctctgtgtgtgtccccggcacgtcagggaccctatcctcccaccgcctccgttaacacgatcctgaataaatcttgagaaccccag

SEQ ID NO: 9349 - protein, 325 aa, Homo sapiens; identical to SEQ ID NO: 1179

SEQ ID NO: 9350 - DNA, 753 bp, Homo sapiens
ggctggctggtgcttaaaggtacaggcgcctcctttcgaaccaatcttctggaaccttagagcagcttctcctcctctttccagcgagtagctcttagactctaacttgagagcttttcagtgcagtagattctttttctctggacagtctggggtctaagcttaggtcgtggattcggcctgacctctcgggacacacccagccctgtggacccagacaccgtggaggtgttgatgacctttgaacccgacccagctgatcttgccctatcaagcattcctggccacgagacctttgaccctcgaagacatcgcttctcagaagaggaacttaagccccagccaatcatgaagaaggcaagaaaaatccaggtgccggaggagcagaaggatgagaaatactggagccggcggtacaagaacaacgaggcagccaagcggtcccgtgacgcccggcggctcaaggagaaccagatatcggtgcgggcggccttcctggagaaggagaacgccctgctgcggcaggaagttgtggccgtgcgccaggagctgtcccactaccgcgccgtgctgtcccgataccaggcccagcacggggccctgtgaggctgccccacatccccacctggcggagctctcctccgccttgctgagacttacgccctgttcccttcctgccctgtggcccacgggccggccagctgggtgccccagggacgtgataatgcagataaatacatttatatttttaag

SEQ ID NO: 9351 - protein, 123 aa, Homo sapiens; identical to SEQ ID NO: 9341

SEQ ID NO: 9352 - DNA, 894 bp, Homo sapiens
cccgtcccctctttctctggatctccgccctgtgcctctcggactcggggtctcttctccatctctatctcccccacctcaccctcatcccaacccgtctttcccggcccgcaggtctcctgaaggaaaaggagcgcaaggcggccctgcctgcagccacaacccctgggccaggcctggagactgcgggcccggcggatgccccggctggggcagtggtgggcggagggtccccgcgggggcgcccggggccggtgcccgccccgggtctgttggcgccactgctgtgggagcgcacgctgccgttcggcgatgtggagcctgacctctcgggacacacccagccctgtggacccagacaccgtggaggtgttgatgacctttgaacccgacccagctgatcttgccctatcaagcattcctggccacgagacctttgaccctcgaagacatcgcttctcagaagaggaacttaagccccagccaatcatgaagaaggcaagaaaaatccaggtgccggaggagcagaaggatgagaaatactggagccggcggtacaagaacaacgaggcagccaagcggtcccgtgacgcccggcggctcaaggagaaccagatatcggtgcgggcggccttcctggagaaggagaacgccctgctgcggcaggaagttgtggccgtgcgccaggagctgtcccactaccgcgccgtgctgtcccgataccaggcccagcacggggccctgtgaggctgccccacatccccacctggcggagctctcctccgccttgctgagacttacgccctgttcccttcctgccctgtggcccacgggccggccagctgggtgccccagggacgtgataatgcagataaatacatttatatttttaag

SEQ ID NO: 9353 - protein, 182 aa, Homo sapiens; identical to SEQ ID NO: 9345

SEQ ID NO: 9354 - DNA, 1849 bp, Homo sapiens
aggtcagtgtcccgcctcccaccgaaaggcaaggcaacttcacgcgctgagcccctcacgcgccctcctgggccctggcggacccagaggccccattggctgtgcgtctcaaggtgtcggagacgattggtccgtgtttgcagccggagggaggcacgcggctgggttgcatgcccatagaggctggcggggctggacgcgccgggcggggacccggaggaggggcgcgcgctgtggcgtcgggtgttttggtttggatttttttttccgcgaaagaagtttgctttggccacgcctcaaggcggccgcctcctcctgccccctcctccgcccctccgcgcacacctctcggtgcagattgcaaagcgccttccgttgcgagagctgcagattttgcaagagccaggctcgcccaccttgtagaaggagcgccttgagtcccctctcaccctcggttgcaaagagccgaccgcttgatctggacaccccctcgcccagattgcatgatctcccgggaccctcttgagttgcacgtttctgcaccgaggacctcaaatccccgtcgctcctaggatttgcagcgttctggatactggagggttgcaggctacactcgcccgcccctgggcagacactcgtccaaaccactggagtgtgctggtgactggcaggccagcccttcgcctctccatgaacccgtgagcctgggggcaggtgccaggcgatggcgcggcctgtgagcgacaggaccccggcccctctgctgctgggcggcccggccgggacaccccctggcgggggagcgctgcttgggttgcggagccttctgcaggggaccagcaagcccaaagagccggccagctgtctcctgaaggaaaaggagcgcaaggcggccctgcctgcagccacaacccctgggccaggcctggagactgcgggcccggcggatgccccggctggggcagtggtgggcggagggtccccgcgggggcgcccggggccggtgcccgccccgggtctgttggcgccactgctgtgggagcgcacgctgccgttcggcgatgtggagtacgtagacctggacgccttcctgctggagcacgggctcccgcccagcccgccgccccccggtggcccgtcgccggagccgtcgcccgcgcggacgcccgcaccctccccagggccgggttcgtgcggctcggcttccccccgctcctctcctgggcacgcccccgcccgggctgccctcgggaccgccagcggccaccgcgcaggcctgacctctcgggacacacccagccctgtggacccagacaccgtggaggtgttgatgacctttgaacccgacccagctgatcttgccctatcaagcattcctggccacgagacctttgaccctcgaagacatcgcttctcagaagaggaacttaagccccagccaatcatgaagaaggcaagaaaaatccaggtgccggaggagcagaaggatgagaaatactggagccggcggtacaagaacaacgaggcagccaagcggtcccgtgacgcccggcggctcaaggagaaccagatatcggtgcgggcggccttcctggagaaggagaacgccctgctgcggcaggaagttgtggccgtgcgccaggagctgtcccactaccgcgccgtgctgtcccgataccaggcccagcacggggccctgtgaggctgccccacatccccacctggcggagctctcctccgccttgctgagacttacgccctgttcccttcctgccctgtggcccacgggccggccagctgggtgccccagggacgtgataatgcagataaatacatttatatttttaag

SEQ ID NO: 9355 - protein, 325 aa, Homo sapiens; identical to SEQ ID NO: 1179

SEQ ID NO: 9356 - DNA, 6164 bp, Homo sapiens
aggtcagtgtcccgcctcccaccgaaaggcaaggcaacttcacgcgctgagcccctcacgcgccctcctgggccctggcggacccagaggccccattggctgtgcgtctcaaggtgtcggagacgattggtccgtgtttgcagccggagggaggcacgcggctgggttgcatgcccatagaggctggcggggctggacgcgccgggcggggacccggaggaggggcgcgcgctgtggcgtcgggtgttttggtttggatttttttttccgcgaaagaagtttgctttggccacgcctcaaggcggccgcctcctcctgccccctcctccgcccctccgcgcacacctctcggtgcagattgcaaagcgccttccgttgcgagagctgcagattttgcaagagccaggctcgcccaccttgtagaaggagcgccttgagtcccctctcaccctcggttgcaaagagccgaccgcttgatctggacaccccctcgcccagattgcatgatctcccgggaccctcttgagttgcacgtttctgcaccgaggacctcaaatccccgtcgctcctaggatttgcagcgttctggatactggagggttgcaggctacactcgcccgcccctgggcagacactcgtccaaaccactggagtgtgctggtgactggcaggccagcccttcgcctctccatgaacccgtgagcctgggggcaggtgccaggcgatggcgcggcctgtgagcgacaggaccccggcccctctgctgctgggcggcccggccgggacaccccctggcgggggagcgctgcttgggttgcggagccttctgcaggggaccagcaagcccaaagagccggccagctgtctcctgaaggaaaaggagcgcaaggcggccctgcctgcagccacaacccctgggccaggcctggagactgcgggcccggcggatgccccggctggggcagtggtgggcggagggtccccgcgggggcgcccggggccggtgcccgccccgggtctgttggcgccactgctgtgggagcgcacgctgccgttcggcgatgtggagtacgtagacctggacgccttcctgctggagcacgggctcccgcccagcccgccgccccccggtggcccgtcgccggagccgtcgcccgcgcggacgcccgcaccctccccagggccgggttcgtgcggctcggcttccccccgctcctctcctgggcacgcccccgcccgggctgccctcgggaccgccagcggccaccgcgcaggtgcggcgaagggggcggggcgggtcctgacggggcggggcttggactcagggggcggggctgtgcgacgctgggggctgggaccgtgggacctggctgcggcctcgaattctgtgtccagttgtcgagaggtgtcgtgggagggggccagattcggtgtctcttaatgggtcagggaccaatggatccatgggggaggagagacttggaaccctaaattccaggaagcctgcccaatgagattttgtgggtttttctgtgggacttggggacaaacgatgtggatactcgtgaagccagaactggaagtccggaacaccagagttatttactggggagtggactgacccccgaatctgggcccataatcgatggaactgggataggactggagcccctaggtcctttacaggggcaaaggcaaaggagaggcacagaattctgtttacccaggacataagagactggcagcccaggtccctgggtcccccagtggggcgtgctgcagccccgggtcccagagttcttcagaagggaaaacgttagggatgttgtttctggatcctccaattggggctggggccaagcttcctatattcctaggagaggcctgggatcccagaatcgtggtagcccagtggcgggggttctgggaaggtccaggaggccgatgctccccggagagcagggggttgggaatctttggaggttgagtggaactaagtgactggaagagcaagaggaaagatgtttccctttgggcacattgaggtctccagggacggactgcaggtcggggattcctgggcacacctgctccaggtccgacctccgggccgaaccagggccctacccttcccagcggcacattcctgcgccacgtgagtcctcccatccctcctccgcgcttcgcgcaggcgccttcaagcgcgaggggggcggggccgggggaacgtgagggcgccgatggcgggggcctgggaggaagggaggaggagggaagcaggcgtcagcacgtgactcggccctgaacctgtgtccttagctggccccggctggctggtgcttaaaggtacaggcgcctcctttcgaaccaatcttctggaaccttagagcagcttctcctcctctttccagcgagtagctcttagactctaacttgagagcttttcagtgcagtagattctttttctctggacagtctggggtctaagcttaggtcgtggattcggtaagtaggattcaggctagactgtgcatctgaagtcctgaggttttagaagcaatagccccatcgcttctcggccttttggctaagatcaagtgtagaagcaatagccctgattcgtgtgttacctagggcaagtcagttatgactgggactcagtttccttgtttgtaaaggtggatatggctccatgatctctaagcatctttatggcttaggggaaccttcatttttctcgttattttggagacggagtctcgctctgttgtccgggctggagtgcagtggtatgatctcagctcactgcaacctccacctccagggtccgggttcaagcaattctccagcctcagcctccctagtagctgggcttaccggcacccgccactacacctgggcaattttcgtacttttagtaaagatgaggtttctccatgttggccatgctggtcttgaactcctgactaaaggtgattcgccgcctcggcttcccaaactgctggggttacaggcgtgagccactgcgcctggccaagggaaccttcatattttatattagggagattaatccctggccgaatttatgctagatcccagaaggactttccatgtggctatgataccacagcaaaaagtagcttcaggaaaccccctccttaaaatacacactcagctgacacgtgctgtttccccaaggcctgacctctcgggacacacccagccctgtggacccagacaccgtggaggtgttgatgacctttgaacccgacccagctgatcttgccctatcaagcattcctggccacgagacctttgaccctcgaagacatcgcttctcagaagaggaacttaagccccagccaatcatgaagaaggcaagaaaaatccaggtgccggaggagcagaaggtgagcagagctggatgtgggagatagacttggctggagacatgccccacagccagggaggggccttttctcacagtcaagcctgggcttctccttgggattagtgctcagcctctcctggcctgcagccacagattagtcctccttggccacggggcacaagggggcaggggcctgaggtttataaagacagtgtcaactgggcgaggggcctcactcgtgtaatcccagcattttagggggctgaggcaggaggatctcttgagctcgggagttcaagaccagcctgggcaacatggcaaaaccccatttctacaagccacttgggaggctgaggtgggaggactgcttgtgcctgggagattgaggctgcagtgagccaagattacaccactgcactccagcctgggcaacagagggagaccttgtcttaaaacaaaagacagtgtcactgtggggtgctgactcagccagctctgctaggtctacttgtagagacttggagcttctcctattacttgggtccagagctccaccaggcacacttgcaaaggacagtcttcctttggcaatgggatatcagcctgtggcctgtctctccttactcagcaggcctttgatctctgatgtgggacttcctttggagtgattgcatttggctaggatgaagactgtgccagcccctttaggccttgtttcctgggcctggacttctcactggtgggagacttcaggcttctgttagcagccagtgccactttctgatttggggtgatttgagcagtcattgcatctttgcatgattttgttttttgccattactggagtcttccctagcaagagttgcttgggcttctgttacaagactttgtcattccgggccaggcgcgttggctcacgcctgtaatcctagcactttaggaggctgaggtgggcggatcacttgaggtcaggagtttgagaccagcctggccaacatggtgaaacctcgcctctactaaaagtacaaaaatgttccgggtgtggtgtctcacacctgtaatcacagcactttgggaggccgaggcggacagatcacgagatcaggagaccatcctggccaacatggtgaaaccccgtctctacaaaaaaatacaaaaattagctgggcatggtggcactcatctgtagtcccagctacttgggaggctaatgtaggaaaatcgcttgaacccaggagacggaggttgcagtgagccgagatcgcgccactgcactccagcctgggcgacagagtgagaactccatctcaaaaaaaaaaaaaaagaacaaaaattagccggacatggtagcgggcacctataatcccagctacttgggaggctgaggcaggagaatcgcttgaacctgggaggtggaggttgcaatgagccgagatcatgccactgcattccagcctgaacgacagagcgagactccatctcaaaaacaaacaagactttgccatacccttgcgtaacacatagctacttgaagcacctaggactggcctggaagtcagatctacaccagtggtttctccttctagagggccctgttgctagggactggatttaccctcacaagcaggaactgggctttaattaaatagtggagtagagagcatctttctgagccccgtggtccttggttactaaggaggagtcttccttaggaaccaacttccaggatgggaggactttaggtataatcctctggggaggtctcaggatagtcccctttcctaagagacagctcttctctcagtcaggtcctactggggaggaggctattctctggcctcagttcaaggccagcaggtcagaggctggccacagtcattgaaaccacttagacctcacttttgtttgccaaggatggatgaggttgccttggcaaccaggtcagaaggccccagctctgcgaggattttatgggacaccaaaccccatcaccagggcaccaagctttccttagcaaccaggatctggaaaggcaatgtgcagggcagggcagtgctcttcattgggagaagccctcagaccatgaaggccttgttgctagggaacaagcatccttagcaagcaagagctaactgcatgcaggcctttatcatgtggggagggctggggtccgctttgcagagtggagacttgaagcgagttgcttgagggtggggggtctatctcatgcctttactgttgctaggggcccaatctccttagcaaccagggccctagaaaggcagacccttgggtacctatcccagcagagacctggtgtggtttaggccccgctgctggggctcccttcctctctcgctgggacctgggtccctctggacctcagtgctctccccctcttctcctgcaggatgagaaatactggagccggcggtacaagaacaacgaggcagccaagcggtcccgtgacgcccggcggctcaaggagaaccagatatcggtgcgggcggccttcctggagaaggagaacgccctgctgcggcaggaagttgtggccgtgcgccaggagctgtcccactaccgcgccgtgctgtcccgataccaggcccagcacggggccctgtgaggctgccccacatccccacctggcggagctctcctccgccttgctgagacttacgccctgttcccttcctgccctgtggcccacgggccggccagctgggtgccccagggacgtgataatgcagataaatacatttatatttttaag

SEQ ID NO: 9357 - protein, 238 aa, Homo sapiens; identical to SEQ ID NO: 9347

SEQ ID NO: 9358 - DNA, 480 bp, Homo sapiens
gcacccgacacaccccctccctgggaccccaggggtccagactcccggaccaaaaggaagaggaggctggggcctacactcttgtgaactaagcggggaggacgttggggacgttggtgcctgggtccttagggtggacgggcttcagagccggcgcttttgggtcctgggcgctaagggatctaggggcctaaacacctgagtaattgagtagattaaggttgggaagatggactccccgcacgcaggtttctatgggaccccaccccacggcacctgagtccctaagggggtagggtgtccgaagtgggtgagatgggggttagaactcacagctggccggctctttgggcttgctggtcccctgcagaaggctccgcaacccaagcagcgctcccccgccagggggtgtcccggccgggccgcccagcagcagagtgtgcgcggaggggcggaggagggggcaggaggaggcggccg

SEQ ID NO: 9359 - protein, 54 aa, Homo sapiens
MGVRTHSWPALWACWSPAEGSATQAALPRQGVSRPGRPAAECARRGGGGGRRRR

SEQ ID NO: 9360 - DNA, 727 bp, Homo sapiens
gaggagatgcgggatggagacctggagttaggtggcttgggagagcttaatgaaaagagaacggagaggaggtgtgggttaggaaccaagaggtagccctgggggcagcagaaggctgagaggagtaggaagatcaggagctagagggagactggagggttccgggaaaagagcagaggaaagaggaaagacacagagagacgggagagagaagaagagtgggtttgaagggcggatctcagtccctggctgctttggcatttggggaactgggactccctgtggggaggagaggaaagctggaagtcctggagggacaggatcctcattgaccgggccctcaatatcacctcccttcagatgcactccctgagactcctgagccagaatcctccatctcagatcttccagagcctcagcggtaacagccggcccctgcagcccttggcccacagggcactgaggggcaacagggacccccggcaccccgagaggcgctgccgaggccccaactaccgcctgcatgtggatggtgtcccccatggtcgctgagactccccttcgaggattgcacccgcccgtcctaagcctccccacaaggcgaggggagttacccctaaaacaaagctattaaagggacagaatacttcctgttttctcagtggtctgattctaggcgcggtggggaaacatttgggtattaaagaacagacttcttccggaaacc

SEQ ID NO: 9361 - protein, 63 aa, Homo sapiens
MHSLRLLSQNPPSQIFQSLSGNSRPLQPLAHRALRGNRDPRHPERRCRGPNYRLHVDGVPHGR

SEQ ID NO: 9362 - DNA, 1842 bp, Homo sapiens
atcccaccccaagccaacccgaggagtgtttgccgctatgagatcacctgctcccccagcccaacaacaaaattaaataacaccacgggagaggagagagggagggggaggagggaggaagggacaagagagaagagagactgaaacagggagaagaggcaggagaggaggaggtggggagagcacgaagctggaggccgacactgagggagggcgggaggaggtgaagaaggagagaggggagaagaggcaggagctggaaaggagagagggaggaggaggaggagatgcgggatggagacctggagttaggtggcttgggagagcttaatgaaaagagaacggagaggaggtgtgggttaggaaccaagaggtagccctgggggcagcagaaggctgagaggagtaggaagatcaggagctagagggagactggagggttccgggaaaagagcagaggaaagaggaaagacacagagagacgggagagagaagaagagtgggtttgaagggcggatctcagtccctggctgctttggcatttggggaactgggactccctgtggggaggagaggaaagctggaagtcctggagggacagggtcccagaaggaggggacagaggagctgagagaggggggcagggcgttgggcaggggtccctcggaggcctcctggggatgggggctgcagctcgtctgagcgcccctcgagcgctggtactctgggctgcactgggggcagcagctcacatcggaccagcacctgaccccgaggactggtggagctacaaggataatctccagggaaacttcgtgccagggcctcctttctggggcctggtgaatgcagcgtggagtctgtgtgctgtggggaagcggcagagccccgtggatgtggagctgaagagggttctttatgacccctttctgcccccattaaggctcagcactggaggagagaagctccggggaaccttgtacaacaccggccgacatgtctccttcctgcctgcaccccgacctgtggtcaatgtgtctggaggtcccctcctttacagccaccgactcagtgaactgcggctgctgtttggagctcgcgacggagccggctcggaacatcagatcaaccaccagggcttctctgctgaggtgcagctcattcacttcaaccaggaactctacgggaatttcagcgctgcctcccgcggccccaatggcctggccattctcagcctctttgtcaacgttgccagtacctctaacccattcctcagtcgcctccttaaccgcgacaccatcactcgcatctcctacaagaatgatgcctactttcttcaagacctgagcctggagctcctgttccctgaatccttcggcttcatcacctatcagggctctctcagcaccccgccctgctccgagactgtcacctggatcctcattgaccgggccctcaatatcacctcccttcagatgcactccctgagactcctgagccagaatcctccatctcagatcttccagagcctcagcggtaacagccggcccctgcagcccttggcccacagggcactgaggggcaacagggacccccggcaccccgagaggcgctgccgaggccccaactaccgcctgcatgtggatggtgtcccccatggtcgctgagactccccttcgaggattgcacccgcccgtcctaagcctccccacaaggcgaggggagttacccctaaaacaaagctattaaagggacagaatacttcctgttttctcagtggtctgattctaggcgcggtggggaaacatttgggtattaaagaacagacttcttccggaaacc

SEQ ID NO: 9363 - protein, 328 aa, Homo sapiens; identical to SEQ ID NO: 1181

SEQ ID NO: 9364 - DNA, 446 bp, Homo sapiens
tgctcccaggggcggggtttcctgcgtgacgtcaccaagaccattcactattcactcccagtttcccaccctccttccactgcagatgcactccctgagactcctgagccagaatcctccatctcagatcttccagagcctcagcggtaacagccggcccctgcagcccttggcccacagggcactgaggggcaacagggacccccggcaccccgagaggcgctgccgaggccccaactaccgcctgcatgtggatggtgtcccccatggtcgctgagactccccttcgaggattgcacccgcccgtcctaagcctccccacaaggcgaggggagttacccctaaaacaaagctattaaagggacagaatacttcctgttttctcagtggtctgattctaggcgcggtggggaaacatttgggtattaaagaacagacttcttccg

SEQ ID NO: 9365 - protein, 63 aa, Homo sapiens; identical to SEQ ID NO: 9361

SEQ ID NO: 9366 - DNA, 598 bp, Homo sapiens
cggaagaagtctgttctttaatacccaaatgtttccccaccgcgcctagaatcagaccactgagaaaacaggaagtattctgtccctttaatagctttgttttaggggtaactcccctcgccttgtggggaggcttaggacgggcgggtgcaatcctcgaaggggagtctcagcgaccatgggggacaccatccactagatgtcaggctgaaggagatgatgaaactctgtaagccgaagaacatggggaaagaggagacacaggaagccacgctatccccacagggacccctgccagccaggccacccgcaacggtgtgggacgtgagtgccgttgcccccggcggtccagcagcaggacagccccgagcagcctggcctaggaggctcaccgcagccgtcaagggattctgggccacccgcccttccttctccaccttctacttcgtctttgccatttttgtggtgtccaccatctttcactgccaccagcacctggctctggtgcctgcgccctgggcatactcagcccgtgtggtcctggcccccagacacctgccccgggaggacctgttcactatcaactccaagggccgcc

SEQ ID NO: 9367 - protein, 126 aa, Homo sapiens
MMKLCKPKNMGKEETQEATLSPQGPLPARPPATVWDVSAVAPGGPAAGQPRAAWPRRLTAAVKGFWATRPSFSTFYFVFAIFVVSTIFHCHQHLALVPAPWAYSARVVLAPRHLPREDLFTINSKG

SEQ ID NO: 9368 - DNA, 697 bp, Homo sapiens
cggaagaagtctgttctttaatacccaaatgtttccccaccgcgcctagaatcagaccactgagaaaacaggaagtattctgtccctttaatagctttgttttaggggtaactcccctcgccttgtggggaggcttaggacgggcgggtgcaatcctcgaaggggagtctcagcgaccatgggggacaccatccactccgtcaagggattctgggccacccgcccttccttctccaccttctacttcgtctttgccatttttgtggtgtccaccatctttcactgccaccagcacctggctctggtgcctgcgccctgggcatactcagcccgtgtggtcctggcccccagacacctgccccgggaggacctgttcactatcaactccaagggccgcctggggaaccagatgggcgagtacgccacgctgtacgccctggccaagatgaacgggcggcccgccttcatcccggcccagatgcacagcaccctggcccccatcttcagaatcaccctgccggtgctgcacagcgccacggccagcaggatcccctggcagaactaccacctgaacgactggatggaggaggagtaccgccacatcccggggcgctgtgtccgcctcacgggctacccctgctcctggaccttctaccaccacctccgccaggagatcctccaggagttcaccctgcac

SEQ ID NO: 9369 - protein, 172 aa, Homo sapiens
MGDTIHSVKGFWATRPSFSTFYFVFAIFVVSTIFHCHQHLALVPAPWAYSARVVLAPRHLPREDLFTINSKGRLGNQMGEYATLYALAKMNGRPAFIPAQMHSTLAPIFRITLPVLHSATASRIPWQNYHLNDWMEEEYRHIPGRCVRLTGYPCSWTFYHHLRQEILQEFTL

SEQ ID NO: 9370 - DNA, 381 bp, Homo sapiens
tgctcccaggggcggggtttcctgcgtgacgtcaccaagaccattcactattcactcccagtttcccaccctccttccactgcagatgcactccctgagactcctgagccagaatcctccatctcagatcttccagagcctcagcggtaacagccggcccctgcagcccttggcccacagggcactgaggggcaacagggacccccggcaccccgagaggcgctgccgaggccccaactaccgcctgcatgtggatggtgtcccccatggtcgctgagactccccttcgaggattgcacccgcccgtcctaagcctccccacaaggcgaggggagttacccctaaaacaaagctattaaagggacagaatacttcctgttt

SEQ ID NO: 9371 - protein, 63 aa, Homo sapiens; identical to SEQ ID NO: 9361

SEQ ID NO: 9372 - DNA, 656 bp, Homo sapiens
gaggagatgcgggatggagacctggagttaggtggcttgggagagcttaatgaaaagagaacggagaggaggtgtgggttaggaaccaagaggtagccctgggggcagcagaaggctgagaggagtaggaagatcaggagctagagggagactggagggttccgggaaaagagcagaggaaagaggaaagacacagagagacgggagagagaagaagagtgggtttgaagggcggatctcagtccctggctgctttggcatttggggaactgggactccctgtggggaggagaggaaagctggaagtcctggagggacaggatcctcattgaccgggccctcaatatcacctcccttcagatgcactccctgagactcctgagccagaatcctccatctcagatcttccagagcctcagcggtaacagccggcccctgcagcccttggcccacagggcactgaggggcaacagggacccccggcaccccgagaggcgctgccgaggccccaactaccgcctgcatgtggatggtgtcccccatggtcgctgagactccccttcgaggattgcacccgcccgtcctaagcctccccacaaggcgaggggagttacccctaaaacaaagctattaaagggacagaatacttcctgttt

SEQ ID NO: 9373 - protein, 63 aa, Homo sapiens; identical to SEQ ID NO: 9361

SEQ ID NO: 9374 - DNA, 1771 bp, Homo sapiens
atcccaccccaagccaacccgaggagtgtttgccgctatgagatcacctgctcccccagcccaacaacaaaattaaataacaccacgggagaggagagagggagggggaggagggaggaagggacaagagagaagagagactgaaacagggagaagaggcaggagaggaggaggtggggagagcacgaagctggaggccgacactgagggagggcgggaggaggtgaagaaggagagaggggagaagaggcaggagctggaaaggagagagggaggaggaggaggagatgcgggatggagacctggagttaggtggcttgggagagcttaatgaaaagagaacggagaggaggtgtgggttaggaaccaagaggtagccctgggggcagcagaaggctgagaggagtaggaagatcaggagctagagggagactggagggttccgggaaaagagcagaggaaagaggaaagacacagagagacgggagagagaagaagagtgggtttgaagggcggatctcagtccctggctgctttggcatttggggaactgggactccctgtggggaggagaggaaagctggaagtcctggagggacagggtcccagaaggaggggacagaggagctgagagaggggggcagggcgttgggcaggggtccctcggaggcctcctggggatgggggctgcagctcgtctgagcgcccctcgagcgctggtactctgggctgcactgggggcagcagctcacatcggaccagcacctgaccccgaggactggtggagctacaaggataatctccagggaaacttcgtgccagggcctcctttctggggcctggtgaatgcagcgtggagtctgtgtgctgtggggaagcggcagagccccgtggatgtggagctgaagagggttctttatgacccctttctgcccccattaaggctcagcactggaggagagaagctccggggaaccttgtacaacaccggccgacatgtctccttcctgcctgcaccccgacctgtggtcaatgtgtctggaggtcccctcctttacagccaccgactcagtgaactgcggctgctgtttggagctcgcgacggagccggctcggaacatcagatcaaccaccagggcttctctgctgaggtgcagctcattcacttcaaccaggaactctacgggaatttcagcgctgcctcccgcggccccaatggcctggccattctcagcctctttgtcaacgttgccagtacctctaacccattcctcagtcgcctccttaaccgcgacaccatcactcgcatctcctacaagaatgatgcctactttcttcaagacctgagcctggagctcctgttccctgaatccttcggcttcatcacctatcagggctctctcagcaccccgccctgctccgagactgtcacctggatcctcattgaccgggccctcaatatcacctcccttcagatgcactccctgagactcctgagccagaatcctccatctcagatcttccagagcctcagcggtaacagccggcccctgcagcccttggcccacagggcactgaggggcaacagggacccccggcaccccgagaggcgctgccgaggccccaactaccgcctgcatgtggatggtgtcccccatggtcgctgagactccccttcgaggattgcacccgcccgtcctaagcctccccacaaggcgaggggagttacccctaaaacaaagctattaaagggacagaatacttcctgttt

SEQ ID NO: 9375 - protein, 328 aa, Homo sapiens; identical to SEQ ID NO: 1181

SEQ ID NO: 9376 - DNA, 275 bp, Homo sapiens
cccccccccccatgaagaccttcaagtagttcagcctactgctgaatctggacgtcccgattcccccctcctattggcttcttgtggttcagcccagtgcttctcgacctagtacattctggttccccgctcgcagacttccgacgtggatggtgtcccccatggtcgctgagactccccttcgaggattgcacccgcccgtcctaagcctccccacaaggcgaggggagttacccctaaaacaaagctattaaagggacagaatacttcctgtt

SEQ ID NO: 9377 - protein, 34 aa, Homo sapiens
MVSPMVAETPLRGLHPPVLSLPTRRGELPLKQSY

SEQ ID NO: 9378 - DNA, 383 bp, Homo sapiens
gaggagatgcgggatggagacctggagttaggtggcttgggagagcttaatgaaaagagaacggagaggaggtgtgggttaggaaccaagaggtagccctgggggcagcagaaggctgagaggagtaggaagatcaggagctagagggagactggagggttccgggaaaagagcagaggaaagaggaaagacacagagagacgggagagagaagaagagtgggtttgaagggcggatctcagtccctggctgctttggcatttggggaactgggactccctgtggggaggagaggattgcacccgcccgtcctaagcctccccacaaggcgaggggagttacccctaaaacaaagctattaaagggacagaatacttcctgtt

SEQ ID NO: 9379 - protein, 99 aa, Homo sapiens
EPRGSPGGSRRLRGVGRSGARGRLEGSGKRAEERGKTQRDGREKKSGFEGRISVPGCFGIWGTGTPCGEERIAPARPKPPHKARGVTPKTKLLKGQNTS

SEQ ID NO: 9380 - DNA, 181 bp, Homo sapiens
agagactgaaacagggagaagaggcaggagaggaggaggtggggagagcacgaagctggtgaatgcagcgtggagtctgtgtgctgtggggaagcggcagagccccgtggatgtggagctgaagagggttctttatgacccctttctgcccccattaaggctcagcactggaggagagaag

SEQ ID NO: 9381 - protein, 59 aa, Homo sapiens
ETETGRRGRRGGGGESTKLVNAAWSLCAVGKRQSPVDVELKRVLYDPFLPPLRLSTGGE

SEQ ID NO: 9382 - DNA, 1117 bp, Homo sapiens
gggacaagagagaagagagactgaaacagggagaagaggcaggagaggaggaggtggggagagcacgaagctggaggccgacactgagggagggcgggaggaggtgaagaaggagagaggggagaagaggcaggagctggaaaggagagagggaggaggaggaggagatgcgggatggagacctggagttaggtggcttgggagagcttaatgaaaagagaacggagaggaggtgtgggttaggaaccaagaggtagccctgggggcagcagaaggctgagaggagtaggaagatcaggagctagagggagactggagggttccgggaaaagagcagaggaaagaggaaagacacagagagacgggagagagaagaagagtgggtttgaagggcggatctcagtccctggctgctttggcatttggggaactgggactccctgtggggaggagaggaaagctggaagtcctggagggacagggtcccagaaggaggggacagaggagctgagagaggggggcagggcgttgggcaggggtccctcggaggcctcctggggatgggggctgcagctcgtctgagcgcccctcgagcgctggtactctgggctgcactgggggcagcagctcacatcggaccagcacctgaccccgaggactggtggagctacaaggataatctccagggaaacttcgtgccaggtgccgccaaggcggggacccaggagtccggccctcccggcgcctccttcttcagactcaggaacctgggttcccagctccctcctcccccccaggaccaggagtcccagccccctcctctgtccctcaggagtcgggccagcttctgaaccccaggggctcaccatgggacattatacatgcgcatttcaagtagtgagtgggagtgagtggaaggaaagtgtgggggtggagattatgtgtgtgtttgccgggagaggaaggtcctggctcctgctaggaaccagaggctgggtggccccgtcccccaccttgtccagccttctcttgcagctcctctccccaacacattaataataatccagctgtgggataagagcgattaaaaaaaagaactacaactcccacggggctc

SEQ ID NO: 9383 - protein, 96 aa, Homo sapiens
MGAAARLSAPRALVLWAALGAAAHIGPAPDPEDWWSYKDNLQGNFVPGAAKAGTQESGPPGASFFRLRNLGSQLPPPPQDQESQPPPLSLRSRASF

SEQ ID NO: 9384 - DNA, 1854 bp, Homo sapiens
cagccacgccactccctcctgagagcccaccgcgccacagcttggaggaagagcctgcggggaactggctgcaggacgctctcttcttgagtgcaggtgctggctctgctgtgaccatgcccgtgacctttgccctcctgctcctcctgggccaggccactgcggacccatgctacgatccacagggccgcccccaattctgcctcccgccagtgacacagctggctgccgtggcggcctcctgccctcaggcctgtgccctgtccccaggaaaccaccttggcgccagggaaacctgcaatggcagcctgactttggccctgggtggccccttcctcctgacatctgtcagcttgcgcttctgtaccccaggacccccagccctcatcctgtctgctgcctgggcctcagggggtccctggaggctgctgtggcacaggcccgcctggcctggggccttagggggccctgaaagggtgaccttccactccacaccaggtcctaaggccactgtggcggccagccacctccgtgtggagtttgggggccaggccgggctagcggcagctgggctgagaggccgctgccagtgtcatggccacgctgcccgctgtgccgcccgtgcccggcccccccgctgccactgccgccaccataccactggcccggggtgcgagagctgccgcccgtcccatcgagactggccctggcggcctgccacgccccggcacccccacccttgcctaccctgctcctgcaaccagcacgcccgacgctgccggttcaactctgagctgttcagactgtcgggcggccggagtgggggtgtttgtgagcggtgccgccaccacacagctgggcggcactgccactactgccaacctgggttctggagggaccctagccagcctatcttcagccgcagggcctgcagagcctgccagtgccaccctattggggcaacaggaggaacctgcaaccagaccagtgggcagtgcacctgcaagttaggggtcacaggcctgacctgcaaccgctgtggccctggctaccagcagagccgctcccccaggatgccctgccagcgaattccagaggcaacaaccacccttgccactactcctggtgcttatagctctgaccctcagtgtcaaaactactgcaatatgtcggacaccagggtacacatgagccttcggaggtactgccagcaggaccatgttctccgcgcgcaggtgctagcgtccgaggcggcgggcccggcatggcagcggctggccgtgcgcgtgctggccgtttacaagcagcgggcgcagcccgtgcgacgcggcgaccaggacgcctgggtgccccgcgccgacctgacctgcggctgcctgcgcctgcagccaggcaccgactacctgctgctgggcagcgccgtgggcgaccccgaccccacgcgcctcatcctcgaccgccacggcctcgcgctgccatggaggccgcgctgggcccggcccctgaagcggctgcagcaggaggagcgcgccggaggctgccgcggcgtgcgggcacccacacccagtcccaggccggagcactagacgtgagatggggctgcctcgagcaccaacaaagtaatttgggagcgactaggagctgagccttctacctcgacggtgcactgcagagagccaatcagacgtcgcagagccccgacgacactatgcttgcgcccacgccgagcaggcgtgcggaacttttagcaaaaggcggcaagcgggacttctggtcccaacatttcctcctttggcctgtggcttattccccgccagtgatctgtttcccccaataaagtctcaaatctttggg

SEQ ID NO: 9385 - protein, 489 aa, Homo sapiens; identical to SEQ ID NO: 1183

SEQ ID NO: 9386 - DNA, 1257 bp, Homo sapiens
tctgctctgagcccccgcccagcccagaaaccccactagcctggggcctgagaacagccacgccactccctcctgagagcccaccgcgccacagcttggaggaagagcctgcggggaactggctgcaggacgctctcttcttgagtgcagcctgctcctgcaaccagcacgcccgacgctgccggttcaactctgagctgttcagactgtcgggcggccggagtgggggtgtttgtgagcggtgccgccaccacacagctgggcggcactgccactactgccaacctgggttctggagggaccctagccagcctatcttcagccgcagggcctgcagagcctgccagtgccaccctattggggcaacaggaggaacctgcaaccagaccagtgggcagtgcacctgcaagttaggggtcacaggcctgacctgcaaccgctgtggccctggctaccagcagagccgctcccccaggatgccctgccagcgaattccagaggcaacaaccacccttgccactactcctggtgcttatagctctgaccctcagtgtcaaaactactgcaatatgtcggacaccagggtacacatgagccttcggaggtactgccagcaggaccatgttctccgcgcgcaggtgctagcgtccgaggcggcgggcccggcatggcagcggctggccgtgcgcgtgctggccgtttacaagcagcgggcgcagcccgtgcgacgcggcgaccaggacgcctgggtgccccgcgccgacctgacctgcggctgcctgcgcctgcagccaggcaccgactacctgctgctgggcagcgccgtgggcgaccccgaccccacgcgcctcatcctcgaccgccacggcctcgcgctgccatggaggccgcgctgggcccggcccctgaagcggctgcagcaggaggagcgcgccggaggctgccgcggcgtgcgggcacccacacccagtcccaggccggagcactagacgtgagatggggctgcctcgagcaccaacaaagtaatttgggagcgactaggagctgagccttctacctcgacggtgcactgcagagagccaatcagacgtcgcagagccccgacgacactatgcttgcgcccacgccgagcaggcgtgcggaacttttagcaaaaggcggcaagcgggacttctggtcccaacatttcctcctttggcctgtggcttattccccgccagtgatctgtttcccccaataaagtctcaaatctttggg

SEQ ID NO: 9387 - protein, 170 aa, Homo sapiens
MPCQRIPEATTTLATTPGAYSSDPQCQNYCNMSDTRVHMSLRRYCQQDHVLRAQVLASEAAGPAWQRLAVRVLAVYKQRAQPVRRGDQDAWVPRADLTCGCLRLQPGTDYLLLGSAVGDPDPTRLILDRHGLALPWRPRWARPLKRLQQEERAGGCRGVRAPTPSPRPEH

SEQ ID NO: 9388 - DNA, 1490 bp, Homo sapiens
ggggaactggctgcaggacgctctcttcttgagtgcagcctgctcctgcaaccagcacgcccgacgctgccggttcaactctgagctgttcagactgtcgggcggccggagtgggggtgtttgtgagcggtgccgccaccacacagctgggcggcactgccactactgccaacctgggttctggagggaccctagccagcctatcttcagccgcagggcctgcagagcctgccagtgccaccctattggggcaacaggaggaacctgcaaccagaccagtgggcagtgcacctgcaagttaggggtcacaggcctgacctgcaaccgctgtggccctggctaccagcagagccgctcccccaggatgccctgccagcgaattccagaggcaacaaccacccttgccactactcctggtgcttatagctctgaccctcagtgtcaaaactactgcaatatgtcggacaccagggtacacatgagccttcggaggtactgccagcaggaccatggtgagtgctggggagacagacagctgaaggctacacagctggttctgatgactgcttctaagccaccccctttctggccttccactttctcatcttaaatgggaaggagtgttggattccaaaccccttcctgatctagaaattgatggggcagaagacaaatggggaggggagtggggagggggcattcactaccttcctgtgtctcctctttccccatgttcttcggcttacagagtttcatcatctccttcagcctgacatctctgagggatggaagagataggggaactggttgagtggaatgaactcttgccctgtcctccctatctcagagaccctttctgcttcccttcatggtcccagatatttgagccttagccccacttcccataaagacttgtcccacggttccctaatccccagtccacacctgctccatgaccttggggtctatgacctcaggctattcagctctcttaagacactcaggagttcggcccagccaacaaatctagaccaacgccagctatttctctcaatgtataggaccgcagacttctccctcaggaacctcatctggtcactagtgttctaggccttcacaggtggaaagattttccccaccttccacagggatctcctgccccgcagacccagctggctagtcagagtcccacccagcctctcagaaagtgcatttttctggccgggcgcggtggctcatgctaataatcccagcactttgtgggggccgaggtgggcggatcacttgaggtcaggagttcgagaccagcctggccaacatggtgaaactccatctctactaaaaatacaaaaattagccaggcgtggtggcaggatcctgtaaacccagctgaggcacaagaatcacttcaacctgggaggcagaggctgcagtgagttgagatcacaccactgcactccagactgggcaatagagtaagattccgtctc

SEQ ID NO: 9389 - protein, 81 aa, Homo sapiens
MPCQRIPEATTTLATTPGAYSSDPQCQNYCNMSDTRVHMSLRRYCQQDHGECWGDRQLKATQLVLMTASKPPPFWPSTFSS

SEQ ID NO: 9390 - DNA, 2416 bp, Homo sapiens
cagccacgccactccctcctgagagcccaccgcgccacagcttggaggaagagcctgcggggaactggctgcaggacgctctcttcttgagtgcaggtgctggctctgctgtgaccatgcccgtgacctttgccctcctgctcctcctgggccaggccactgcggacccatgctacgatccacagggccgcccccaattctgcctcccgccagtgacacagctggctgccgtggcggcctcctgccctcaggcctgtgccctgtccccaggaaaccaccttggcgccagggaaacctgcaatggcagcctgactttggccctgggtggccccttcctcctgacatctgtcagcttgcgcttctgtaccccaggacccccagccctcatcctgtctgctgcctgggcctcagggggtccctggaggctgctgtggcacaggcccgcctggcctggggccttagggggccctgaaagggtgaccttccactccacaccaggtcctaaggccactgtggcggccagccacctccgtgtggagtttgggggccaggccgggctagcggcagctgggctgagaggccgctgccagtgtcatggccacgctgcccgctgtgccgcccgtgcccggcccccccgctgccactgccgccaccataccactggcccggggtgcgagagctgccgcccgtcccatcgagactggccctggcggcctgccacgccccggcacccccacccttgcctaccctgctcctgcaaccagcacgcccgacgctgccggttcaactctgagctgttcagactgtcgggcggccggagtgggggtgtttgtgagcggtgccgccaccacacagctgggcggcactgccactactgccaacctgggttctggagggaccctagccagcctatcttcagccgcagggcctgcagagcctgccagtgccaccctattggggcaacaggaggaacctgcaaccagaccagtgggcagtgcacctgcaagttaggggtcacaggcctgacctgcaaccgctgtggccctggctaccagcagagccgctcccccaggatgccctgccagcgaattccagaggcaacaaccacccttgccactactcctggtgcttatagctctggtaagacagtctggcacggaggtccctgagtggcaagtgggaatgaggatgggctgactgggtccccagatggggatacatgggtcacccattgagcccagtcccaaaggtttgggtaccccagctggccatcaagatggaacggagggatgggcaggggcagaaggctgtggtctaggccccaggagcccactgcagacagcctgaccctccccagaccctcagtgtcaaaactactgcaatatgtcggacaccagggtacacatgagccttcggaggtactgccagcaggaccatggtgagtgctggggagacagacagctgaaggctacacagctggttctgatgactgcttctaagccaccccctttctggccttccactttctcatcttaaatgggaaggagtgttggattccaaaccccttcctgatctagaaattgatggggcagaagacaaatggggaggggagtggggagggggcattcactaccttcctgtgtctcctctttccccatgttcttcggcttacagagtttcatcatctccttcagcctgacatctctgagggatggaagagataggggaactggttgagtggaatgaactcttgccctgtcctccctatctcagagaccctttctgcttcccttcatggtcccagatatttgagccttagccccacttcccataaagacttgtcccacggttccctaatccccagtccacacctgctccatgaccttggggtctatgacctcaggctattcagctctcttaagacactcaggagttcggcccagccaacaaatctagaccaacgccagctatttctctcaatgtataggaccgcagacttctccctcaggaacctcatctggtcactagtgttctaggccttcacaggtggaaagattttccccaccttccacagggatctcctgccccgcagacccagctggctagtcagagtcccacccagcctctcagaaagtgcatttttctggccgggcgcggtggctcatgctaataatcccagcactttgtgggggccgaggtgggcggatcacttgaggtcaggagttcgagaccagcctggccaacatggtgaaactccatctctactaaaaatacaaaaattagccaggcgtggtggcaggatcctgtaaacccagctgaggcacaagaatcacttcaacctgggaggcagaggctgcagtgagttgagatcacaccactgcactccagactgggcaatagagtaagattccgtctc

SEQ ID NO: 9391 - protein, 350 aa, Homo sapiens
MPVTFALLLLLGQATADPCYDPQGRPQFCLPPVTQLAAVAASCPQACALSPGNHLGARETCNGSLTLALGGPFLLTSVSLRFCTPGPPALILSAAWASGGPWRLLWHRPAWPGALGGPERVTFHSTPGPKATVAASHLRVEFGGQAGLAAAGLRGRCQCHGHAARCAARARPPRCHCRHHTTGPGCESCRPSHRDWPWRPATPRHPHPCLPCSCNQHARRCRFNSELFRLSGGRSGGVCERCRHHTAGRHCHYCQPGFWRDPSQPIFSRRACRACQCHPIGATGGTCNQTSGQCTCKLGVTGLTCNRCGPGYQQSRSPRMPCQRIPEATTTLATTPGAYSSGKTVWHGGP

SEQ ID NO: 9392 - DNA, 855 bp, Homo sapiens
cccatacagggggagctcaggcagggtcagcggagggacctgcgcctgaatcccgaagttccactctgactcacacagcctgggcccccagctctgacatgccccctctgatggggggcgtctcagccccattccatcctcctgcagctgatgcacctcccagctttcggagtgactcccttctttcaaatccgatgtccctgtcctgctcctgccaaatctggccccctccaacgtggtacctaagggtccagagtcgagggtcgcctttgctgtgccctcgcaccccctgggggcgggcctggggcagtgggtcccaagcctgtcaggattgggcccacgctacaccacgataaacgctggggccaggccactgcggacccatgctacgatccacagggccgcccccaattctgcctcccgccagtgacacagctggctgccgtggcggcctcctgccctcaggcctgtgccctgtccccaggaaaccaccttggcgccagggaaacctgcaatggcagcctgactttggccctgggtggccccttcctcctgacatctgtcagcttgcgcttctgtaccccaggacccccagccctcatcctgtctgctgcctgggcctcagggggtccctggaggctgctgtggcacaggcccgcctggcctggggccttagggggccctgaaagggtgaccttccactccacaccaggtcctaaggccactgtggcggccagccacctccgtgtggagtttgggggccaggccgggctagcggcagctgggctgagaggccgctgccagtgtcatggccacgctgcccgctgtgccgcccgtgcccggcccccccgctgc

SEQ ID NO: 9393 - protein, 100 aa, Homo sapiens
MLRSTGPPPILPPASDTAGCRGGLLPSGLCPVPRKPPWRQGNLQWQPDFGPGWPLPPDICQLALLYPRTPSPHPVCCLGLRGSLEAAVAQARLAWGLRGP

SEQ ID NO: 9394 - DNA, 2418 bp, Homo sapiens
atcccactccacccctgcccactggctcagccccgccttgtggtggccgccatcgcgatcgggcaggggctgacctttgggagacaatcgctgttggaaactttgctcagcccctgcctctggctgcgtgaccccaagccagcccctcctcctcctctctggaaccttttgtcagctgtgggttcaccgagccttaagccgtcaagggattctgggccacccgcccttccttctccaccttctacttcgtctttgccatttttgtggtgtccaccatctttcactgccaccagcacctggctctggtgcctgcgccctgggcatactcagcccgtgtggtcctggcccccagacacctgccccgggaggacctgttcactatcaactccaagggccgcctggggaaccagatgggcgagtacgccacgctgtacgccctggccaagatgaacgggcggcccgccttcatcccggcccagatgcacagcaccctggcccccatcttcagaatcaccctgccggtgctgcacagcgccacggccagcaggatcccctggcagaactaccacctgaacgactggatggaggaggagtaccgccacatcccggggcgctgtgtccgcctcacgggctacccctgctcctggaccttctaccaccacctccgccaggagatcctccaggagttcaccctgcacgaccacgtgcgcgaggaggcccagaagttcctgcggggcctgcaggccaagtgggcagggcaggcgaccttcgtgggggtccacgtgcgccggggggactatgtccgtgtcatgccgcgcgtatggaagggggtgctggccgaccggctacctgcagcgggccctggactggttccgggcctgctgccgcctcccggtctttgtggtcaccagcgatgacatggcctggtgccgggagagcatcaacagctcccttggggacgtggtgttcgctggcaatggcctccagggctcacctgccaaggacttcgcactgctcacacagtgcaaccacaccatcatcaccgtgggcaccttcggggtctgggccgcgtacctcgcgggcggggacactgtctacctggccaacttcaccctgcccaactcccctttcaacgtggtctttaggccgtaagcggccttcctgccagagtgggtgggccttgcggctgaccttggacaggctggacagaacggcctctagccagccctgcatgtgcctggtcctcatcctgtgacccgaggggcagtgagtggggcgtgcggggcatggactcacggtccctcatgcagtttggatccaggcttatctacttcatagctgagtgagtttggacaactgactcaacctctgtgccttagtatgtcaaccacaaaatgcacaaaccacagaactaaacaccagtagcagctggtgggagctgagcaaattcgcttagagccagtgccttgtgaccgtgtgggaggtgtcggctgctcacatgtatgcagcacgtcaggaacactggcattgctttccaatggaaacgcagttttgccctctccttcctggcagcactggtagcacagagcccagatattttgcactcacgtcccaggacgaagccatccctgccctgaaggataggggaactcgattttctgggcaactaggaattttggctttggagttagtgggccttatcacaaaagaatgtgagggaagggccgggtgcggtggcacgcctgtaatcccagccctttgggaagccaaggctggtggatcacttgaggtcaggagttcgagaccagcctggccaacatggcgaaacccagtctctactaaaaatacaaaaagccaggcacggtggtgcgtgcccctaatcccagctactccggaggctgaagcaggaggatagcttgaattgggaagcagaggttgcagtaaaccgagatcataccactgcactccagcctgggccacagagcgagactccatcgcaaaaaaaaaaaaaaaaatagaattccagggaagacaggatttgcagggacacacctatgaggagggattcccctgcgatggacaggggaggggtttaggtgcaggtagcaccctgggcgcagggaagaaggcgtcacagtgagggcagaaaagacactcctcagatcctggaagcagcaacctgacccccaggggccactaagaccaaatcatggccatctcagcagcagcgtgtgtgacagttactggaaaaagatacctcacacctggcactgcctaacccccgagaacctaatgccactctgagaaagctcagtacgggtgcaagttggattaagtaattgcagtgcgagttttcctgtgttttattggtgtaatgctccttttggacattaaaaaaacttgacatatacaatgatc

SEQ ID NO: 9395 - protein, 168 aa, Homo sapiens
MGEYATLYALAKMNGRPAFIPAQMHSTLAPIFRITLPVLHSATASRIPWQNYHLNDWMEEEYRHIPGRCVRLTGYPCSWTFYHHLRQEILQEFTLHDHVREEAQKFLRGLQAKWAGQATFVGVHVRRGDYVRVMPRVWKGVLADRLPAAGPGLVPGLLPPPGLCGHQR

SEQ ID NO: 9396 - DNA, 796 bp, Homo sapiens
gtcgctgaatcacagggaaacaggctggagtgcaatggtgtaatctcagtttatgcagcctccgcctcccaggttcaagcgattctcctgcctcagcctcccgagtagctaggattacaggtgcgtgccaccacgcccagctaatttttatatgtttagtggaaatggagtttcaccatgttggtcaggctggtctcaaactcctgacctcatgatccgccttcctcggcctcccaaagtgctgggattacaggtgttagccactgcgcccggccctagagctcactgttttctagttagtccatctggaagtggagcctttttccagtttgcacaaatgtgccatattggcttgtagctggcatgcatccaagtccataggtcctgcctcttcaatcctggctttctagggcctgggatgatcattgctagaactgagagaccagcctggctcagtgaacttcagggcgttccgttcattctttcagtaaatgtttgcagcacatgtgttacatgtcaggcagtgaaaccccccacagcagccttccctctcagaggatacatttgtaaccattacacagtcatcaaaggaataattttttttaatcaccagtgtgcatacagtcatggagttgggtattcccagctaccagggaggctgaggtgggaggattgcttgatgccaggagttagggaatatagtgcaccgtgattggacttgcgaatagccactgcactgcggcctggacgacgtagtgataccctgactcttataaataaataaatgaataaacac

SEQ ID NO: 9397 - protein, 97 aa, Homo sapiens
MIIARTERPAWLSELQGVPFILSVNVCSTCVTCQAVKPPTAAFPLRGYICNHYTVIKGIIFFNHQCAYSHGVGYSQLPGRLRWEDCLMPGVREYSAP

SEQ ID NO: 9398 - DNA, 845 bp, Homo sapiens
gtcgctgaatcacagggaaacaggctggagtgcaatggtgtaatctcagtttatgcagcctccgcctcccaggttcaagcgattctcctgcctcagcctcccgagtagctaggattacaggtgcgtgccaccacgcccagctaatttttatatgtttagtggaaatggagtttcaccatgttggtcaggctggtctcaaactcctgacctcatgatccgccttcctcggcctcccaaagtgctgggattacaggtgttagccactgcgcccggccctagagctcactgttttctagttagtccatctggaagtggagcctttttccagtttgcacaaatgtgccatattggcttgtagctggcatgcatccaagtccataggtcctgcctcttcaatcctggctttctagggcctgggatgatcattgctagaactgagagaccagcctggctcagtgaacttcagggcgttccgttcattctttcagtaaatgtttgcagcacatgtgttacatgtcaggcagtgaaaccccccacagcagccttccctctcagaggatacatttgtaaccattacacagtcatcaaaggaataattttttttaatcaccagtgtgcatacagtcatggagttgggtattcccagctaccagggaggctgaggtgggaggattgcttgatgccaggagttagggaatatagtgcaccgtgattggacttgcgaatagccactgcactgcggcctggacgacgtagtgataccctgactcttataaataaataaatgaataaacacaattatgactttgcggatgggagaaaaggttctctgagagcgtattaca

SEQ ID NO: 9399 - protein, 97 aa, Homo sapiens; identical to SEQ ID NO: 9397

SEQ ID NO: 9400 - DNA, 1790 bp, Homo sapiens
agtcaccgatgctggaagggtttctttggccctgagtgaagagagacccagagggaacactgaggtgcctgcccaaccactctgtcccggtttccttcagcaggaccagccatgctggtcgttcagatgcctttctcctttcccatggcccacttcatcctctttgtctttacggtttccactatatttcacgttcagcagcggctagcgaagattcaagccatgtgggagttaccggtgcagataccagtgctagcctcaacatcaaaggcactgggacccagccagctcagggggatgtggacgatcaatgcaataggccgcctggggaaccagatgggcgagtacgccacactgtacgccctggccaagatgaacgggcggcccgccttcatcccggcccagatgcacagcaccctggcccccatcttcagaatcaccctgccggtgctgcacagcgccacggccagcaggatcccctggcagaactaccacctgaacgactggatggaggaggaataccgccacatcccgggggagtacgtccgcttcaccggctacccctgctcctggaccttctaccaccacctccgccaggagatcctccaggagttcaccctgcacgaccacgtgcgggaggaggcccagaagttcctgcggggcctgcaggtgaacgggagccggccgggcacctttgtaggggtccatgttcgccgaggggactatgtccatgtcatgccaaaagtgtggaagggggtggtggccgaccggcgatacctacagcaggccctggactggttccgagctcgctacagctccctcatcttcgtggtcaccagtaatggcatggcctggtgtcgggagaacattgacacctcccacggtgatgtggtgtttgctggcgatggcattgagggctcacctgccaaagattttgctctactcacacagtgtaaccacaccatcatgaccattgggacgttcgggatctgggccgcatacctcacgggcggagacaccatctacctggccaattacaccctccccgactcccctttcctcaaaatctttaagccagaggcagccttcctgccggagtggacagggattgccgcagacctgtcccccttactcaagcactaatgctggcccattctttgagaccttttctccttctctgcctccctcaagatgagtgcccgggcatgagaagcacatggttccatgagcaggacccatctctcttctgtgaagatgcgttgggctgcaagtaacagaaatctcagtgaacagtggcctggcgtggtggctcatgcctgtaatgcctcccaaagtgctgggattacaggtgttagccactgcgcccggccctagagctcactgttttctagttagtccatctggaagtggagcctttttccagtttgcacaaatgtgccatattggcttgtagctggcatgcatccaagtccataggtcctgcctcttcaatcctggctttctagggcctgggatgatcattgctagaactgagagaccagcctggctcagtgaacttcagggcgttccgttcattctttcagtaaatgtttgcagcacatgtgttacatgtcaggcagtgaaaccccccacagcagccttccctctcagaggatacatttgtaaccattacacagtcatcaaaggaataattttttttaatcaccatgattggacttgcgaatagccactgcactgcggcctggacgacgtagtgataccctgactcttataaataaataaatgaataa

SEQ ID NO: 9401 - protein, 70 aa, Homo sapiens
MIIARTERPAWLSELQGVPFILSVNVCSTCVTCQAVKPPTAAFPLRGYICNHYTVIKGIIFFNHHDWTCE

SEQ ID NO: 9402 - DNA, 3123 bp, Homo sapiens
gctggaagggtttctttggccctgagtgaagagagacccagagggaacactgaggtgcctgcccaaccactctgtcccggtttccttcagcaggaccagccatgctggtcgttcagatgcctttctcctttcccatggcccacttcatcctctttgtctttacggtttccactatatttcacgttcagcagcggctagcgaagattcaagccatgtgggagttaccggtgcagataccagtgctagcctcaacatcaaaggcactgggacccagccagctcagggggatgtggacgatcaatgcaataggccgcctggggaaccagatgggcgagtacgccacactgtacgccctggccaagatgaacgggcggcccgccttcatcccggcccagatgcacagcaccctggcccccatcttcagaatcaccctgccggtgctgcacagcgccacggccagcaggatcccctggcagaactaccacctgaacgactggatggaggaggaataccgccacatcccgggggagtacgtccgcttcaccggctacccctgctcctggaccttctaccaccacctccgccaggagatcctccaggagttcaccctgcacgaccacgtgcgggaggaggcccagaagttcctgcggggcctgcaggtgaacgggagccggccgggcacctttgtaggggtccatgttcgccgaggggactatgtccatgtcatgccaaaagtgtggaagggggtggtggccgaccggcgatacctacagcaggccctggactggttccgagctcgctacagctccctcatcttcgtggtcaccagtaatggcatggcctggtgtcgggagaacattgacacctcccacggtgatgtggtgtttgctggcgatggcattgagggctcacctgccaaagattttgctctactcacacagtgtaaccacaccatcatgaccattgggacgttcgggatctgggccgcatacctcacgggcggagacaccatctacctggccaattacaccctccccgactcccctttcctcaaaatctttaagccagaggcagccttcctgccggagtggacagggattgccgcagacctgtcccccttactcaagcactaatgctggcccattctttgagaccttttctccttctctgcctccctcaagatgagtgcccgggcatgagaagcacatggttccatgagcaggacccatctctcttctgtgaagatgcgttgggctgcaagtaacagaaatctcagtgaacagtggcctggcgtggtggctcatgcctgtaatgctcgcactttgtgaggccagggtgggtggatcacttgaggtcaggagttcaagactagcctggccaacatggtgaaaccccatctcgactaaaaatacaaaaattagccaggcgtggtggtgcacacctgtaatcccagctactcgggaggctgaggcaagagaatcacttgaacccaggaggcggaggttgcagtgagccaagatggtgccgctgcactccagtctgggtgacacagcaagactccatctcaaaaaaaaaaaaaaaaaaaagaaaagaaaaagaaatgaatgggttcaaagaccataatcatgcatatcacataagaccagaagtggcccaggtccagggtcagttaatttagcggctccacaaagtcatcagtcacctgagctccatccatcttcacatgctgtgctaccatttcttagctgtatcatcccatggtcccaaaagggctgctacacatccagccatcacatgcagataattcctttcaaaaacagcagaaagaggctcgttcttgtcttggtcccttttgaagaatgaatgaaaccttcctaagccttccagcaatttccccccaactccgatgggtaggaattgtcacatacccatgtgacccgataggaggcaaaagaaatgagacttctgggattagtttagcctcagattctgcagctgagaagttgatcagccacctctgaaggacatgcagcttgcagaaaattagggtggtgttaccaaggtgaaaaggggaaatggctttagagtagacaacagagatgccctgaggggttgtgtaggttgttcactgcaggaagtcccctggttaagaaggcaagtggggtttaaacagacccacagtctactcatcaaaccaggtgtccttggcattgtgtccacccagagagctcactgttttcttttctttttcttttctttttttttttttttttgagatggagtcttgctgcatcccccaggctggagtgcagtggcatgatcttggctcactgcagcctccgcctcccaggttcaagcgattctcctgcctcagcctcccgagtagctaggattacaggtgcgtgccaccacgcccagctaatttttatatgtttagtggaaatggagtttcaccatgttggtcaggctggtctcaaactcctgacctcatgatccgccttcctcggcctcccaaagtgctgggattacaggtgttagccactgcgcccggccctagagctcactgttttctagttagtccatctggaagtggagcctttttccagtttgcacaaatgtgccatattggcttgtagctggcatgcatccaagtccataggtcctgcctcttcaatcctggctttctagggcctgggatgatcattgctagaactgagagaccagcctggctcagtgaacttcagggcgttccgttcattctttcagtaaatgtttgcagcacatgtgttacatgtcaggcagtgaaaccccccacagcagccttccctctcagaggatacatttgtaaccattacacagtcatcaaaggaataattttttttaatcaccagtgtgcatacagtcatggagttgggtattcccagctaccagggaggctgaggtgggaggattgcttgatgccaggagttagggaatatagtgcaccgtgattggacttgcgaatagccactgcactgcggcctggacgacgtagtgataccctgactcttataaataaataaatgaataaacacaattatgactttgcggatgggagaaaaggttctctgagagcgtattaca

SEQ ID NO: 9403 - protein, 343 aa, Homo sapiens; identical to SEQ ID NO: 1186

SEQ ID NO: 9404 - DNA, 312 bp, Homo sapiens
aggtgcctgcccaaccactctgtcccggtttccttcagcaggaccaggtccttccttgtctccttcccctcagcagtttctatgaaccaccctggcagtaatggtgcagatggctcgcgcacagctggtggtgacccgactttcctgcctccaccctggggctcctcagaggcttcatggaacccaaactgctggtctcacctccgagccctgccgtcgcccagggagggcggctccgtccctcctgcactccctaatcccgctctgaatcaccgcttctgttctgggtcggagaataaaggtggggtttcc

SEQ ID NO: 9405 - protein, 76 aa, Homo sapiens
MNHPGSNGADGSRTAGGDPTFLPPPWGSSEASWNPNCWSHLRALPSPREGGSVPPALPNPALNHRFCSGSENKGGV

SEQ ID NO: 9406 - DNA, 348 bp, Homo sapiens
ctcttggctgctctaggtcaagcccagcgcagcatctcacaggccacctcttccacgtgccgcggataccccggggacggctccggctccaactcccactccggctcctgctgcagctccagccctgaccccttcctcagggccgggctcagcggctctgactctggaggaggagctgcaggaagcgatccggagggcgcagacggagtctcgcgctactggcaggctggagtgcagtggcacaatctcggctcactgcaacctccacctcccggattcaagcagttctcctgcctcagcctcccgagtagctgggactacaggtgagccctcaatgccatcgccagc

SEQ ID NO: 9407 - protein, 108 aa, Homo sapiens [sequence omitted]

SEQ ID NO: 9408 - DNA, 1122 bp, Homo sapiens
gttgcgccctgtgggcatggcttatgggcgctcgccctcttggctgctctaggtcaagcccagcgcagcatctcacaggccacctcttccacgtgccgcggataccccggggacggctccggctccaactcccactccggctcctgctgcagctccagccctgaccccttcctcagggccgggctcagcggctctgactctggaggaggagctgcaggaagcgatccggagggcgcagttgcttcctaaccggggcatcgatgacatcctggaggatcaggtggagcctgatgaccccctgccccctattcccctggacttccctggctccttcgacgtgctgtccccctccccggactctgaaggcctctcatctgttttctcctcttcactcccgtctcccacgaactcctcctccccttctcccagggaccccacggactccctggactggctggaggccctgagcgggggtcctcctctgggttctggtcccccaccccccagcatcttctccgctgacttatctgactccagcagcagccggctgtgggacctgctggaggatccatggtgatggattctaggatttacagagacagagaactgatgggggtggagagaagctccttgtgggaggagagggaactaccagcagagcccctcctaccgcagacacaggatcggagacaacctccaaccccacctgcctcctgaagtgctgctgacatgcaactgccttaactttgcctacctggcctccttatgatccccctccggcgtggtatggttggggggcttcttttgctgctggccacggcaaacaagctgcttgctgcttccttcagagacctcatggatgttcttacatgcccccgaccccggtagatggctccctgttgtttggggagcctggaaggtggttatgccttttggatgcaggagaggagcaagaaagagtggagagggagaatgggggagccggaccctgacctccctgggttctggttggagatgaaaaaattagaagcatcaggtctaagatcagcttctcttggaagcagagcctgagacaagatataaatgccagtcatttattaaagaagtgttctggctgggtgc

SEQ ID NO: 9409 - protein, 68 aa, Homo sapiens
MTSWRIRWSLMTPCPLFPWTSLAPSTCCPPPRTLKASHLFSPLHSRLPRTPPPLLPGTPRTPWTGWRP

SEQ ID NO: 9410 - DNA, 2161 bp, Homo sapiens
gggcaggtggagccgggggcagggctgcctccagcctgcacgctggctggctcgtagccccagaatggcgctggcccgcggcgctgcgctggcagggagcaggcgggaggcccgaggaagggagcctgctgcccgcccacccgcctgcacaggctgtgtaagggggctgggcacgcatatcccgccaacaactgcagctcccaccagcctgccaggccaggctcctggacactcccttcccgccttcctcctcccacctccctcctccctccacagtcctccagcttcggatccacagacggaatcaggagcagaatccagttcaggcgcccatctcccagcaatcaagtcttgctccctggcctgccctccggcaccctggagccccgctttccacacagccttgctcctcccggcctggcttgctgcctgcaggcctctcagggtccttcaccgtctctccagtctcggatccggacccgtggatctcagcctcagaccctcctctggccccggccttgccctcgggcacggcccctttcctcttcagccctggggtcctgctccccgagccagaatattgtcctccttggaggtccccaaagaaggagtctcccaagatctcccaacgttggagggagtccaagcccagggggaacttgacataccaccagtacatgcccccagagccgagacagggatccagggcggacccccaagccgaggggtccgccctgggtcctcctgggccatctctgtgggaagggacagactcgcagcagccacatcctaggatgaagccctctcccctcactccctgcccaccaggagtccctagcccctcgccccccccacacaagttggaacttcagacccttaaactggaggagctgacggtctcagagctccggcagcagctgcgcctgcggggcctcccagtgtcggggaccaagtctatgctcctggagcgcatgcgcggcggcgcgccgccccgcgagcggccgaagccgcggcgcgaggacagtcccgcgggtgctccctggccgcgcctcaagcccaaggccctggcagccgcccggcgtcagggctcggtcaagcccagcgcagcatctcacaggccacctcttccacgtgccgcggataccccggggacggctccggctccaactcccactccggctcctgctgcagctccagccctgaccccttcctcagggccgggctcagcggctctgactctggaggaggagctgcaggaagcgatccggagggcgcagttgcttcctaaccggggcatcgatgacatcctggaggatcaggtggagcctgatgaccccctgccccctattcccctggacttccctggctccttcgacgtgctgtccccctccccggactctgaaggcctctcatctgttttctcctcttcactcccgtctcccacgaactcctcctccccttctcccagggaccccacggactccctggactggctggaggccctgagcgggggtcctcctctgggttctggtcccccaccccccagcatcttctccgctgacttatctgactccagcagcagccggctgtgggacctgctggaggatccatggtgatggattctaggatttacagagacagagaactgatgggggtggagagaagctccttgtgggaggagagggaactaccagcagagcccctcctaccgcagacacaggatcggagacaacctccaaccccacctgcctcctgaagtgctgctgacatgcaactgccttaactttgcctacctggcctccttatgatccccctccggcgtggtatggttggggggcttcttttgctgctggccacggcaaacaagctgcttgctgcttccttcagagacctcatggatgttcttacatgcccccgaccccggtagatggctccctgttgtttggggagcctggaaggtggttatgccttttggatgcaggagaggagcaagaaagagtggagagggagaatgggggagccggaccctgacctccctgggttctggttggagatgaaaaaattagaagcatcaggtctaagatcagcttctcttggaagcagagcctgagacaagatataaatgccagtcatttattaaagaagtgttctggctgggtgc

SEQ ID NO: 9411 - protein, 312 aa, Homo sapiens; identical to SEQ ID NO: 1188

SEQ ID NO: 9412 - DNA, 1857 bp, Homo sapiens
agactcaacccgccccagagcacagcttcgccgagcccacctggtccccatcccggccttggcaatgaccctggcggcttcctcccagcgttcccaaatcattcgctccaagttccgatctgtcctccagcttcggatccacagacggaatcaggagcagatctcggatccggacccgtggatctcagcctcagaccctcctctggccccggccttgccctcgggcacggcccctttcctcttcagccctggggtcctgctccccgagccagaatattgtcctccttggaggtccccaaagaaggagtctcccaagatctcccaacgttggagggagtccaagcccagggggaacttgacataccaccagtacatgcccccagagccgagacagggatccagggcggacccccaagccgaggggtccgccctgggtcctcctgggccatctctgtgggaagggacagactcgcagcagccacatcctaggatgaagccctctcccctcactccctgcccaccaggagtccctagcccctcgccccccccacacaagttggaacttcagacccttaaactggaggagctgacggtctcagagctccggcagcagctgcgcctgcggggcctcccagtgtcggggaccaagtctatgctcctggagcgcatgcgcggcggcgcgccgccccgcgagcggccgaagccgcggcgcgaggacagtcccgcgggtgctccctggccgcgcctcaagcccaaggccctggcagccgcccggcgtcagggctcggtcaagcccagcgcagcatctcacaggccacctcttccacgtgccgcggataccccggggacggctccggctccaactcccactccggctcctgctgcagctccagccctgaccccttcctcagggccgggctcagcggctctgactctggaggaggagctgcaggaagcgatccggagggcgcagttgcttcctaaccggggcatcgatgacatcctggaggatcaggtggagcctgatgaccccctgccccctattcccctggacttccctggctccttcgacgtgctgtccccctccccggactctgaaggcctctcatctgttttctcctcttcactcccgtctcccacgaactcctcctccccttctcccagggaccccacggactccctggactggctggaggccctgagcgggggtcctcctctgggttctggtcccccaccccccagcatcttctccgctgacttatctgactccagcagcagccggctgtgggacctgctggaggatccatggtgatggattctaggatttacagagacagagaactgatgggggtggagagaagctccttgtgggaggagagggaactaccagcagagcccctcctaccgcagacacaggatcggagacaacctccaaccccacctgcctcctgaagtgctgctgacatgcaactgccttaactttgcctacctggcctccttatgatccccctccggcgtggtatggttggggggcttcttttgctgctggccacggcaaacaagctgcttgctgcttccttcagagacctcatggatgttcttacatgcccccgaccccggtagatggctccctgttgtttggggagcctggaaggtggttatgccttttggatgcaggagaggagcaagaaagagtggagagggagaatgggggagccggaccctgacctccctgggttctggttggagatgaaaaaattagaagcatcaggtctaagatcagcttctcttggaagcagagcctgagacaagatataaatgccagtcatttattaaagaagtgttctggctgggtgc

SEQ ID NO: 9413 - protein, 415 aa, Homo sapiens
MTLAASSQRSQIIRSKFRSVLQLRIHRRNQEQISDPDPWISASDPPLAPALPSGTAPFLFSPGVLLPEPEYCPPWRSPKKESPKISQRWRESKPRGNLTYHQYMPPEPRQGSRADPQAEGSALGPPGPSLWEGTDSQQPHPRMKPSPLTPCPPGVPSPSPPPHKLELQTLKLEELTVSELRQQLRLRGLPVSGTKSMLLERMRGGAPPRERPKPRREDSPAGAPWPRLKPKALAAARRQGSVKPSAASHRPPLPRAADTPGTAPAPTPTPAPAAAPALTPSSGPGSAALTLEEELQEAIRRAQLLPNRGIDDILEDQVEPDDPLPPIPLDFPGSFDVLSPSPDSEGLSSVFSSSLPSPTNSSSPSPRDPTDSLDWLEALSGGPPLGSGPPPPSIFSADLSDSSSSRLWDLLEDPW

SEQ ID NO: 9414 - DNA, 1692 bp, Homo sapiens
gggggcaggtggagccgggggcagggctgcctccagcctgcacgctggctggctcgtagccccagaatggcgctggcccgcggcgctgcgctggcagggagcaggcgggaggcccgaggaagggagcctgctgcccgcccacccgcctgcacaggctgtgtaagggggctgggcacgcatatcccgccaacaactgcagctcccaccagcctgccaggccaggctcctggacactcccttcccgccttcctcctcccacctccctcctccctccacagtcctccagcttcggatccacagacggaatcaggagcagaatccagttcaggcgcccatctcccagcaatcaagtcttgctccctggcctgccctccggcaccctggagccccgctttccacacagccttgctcctcccggcctggcttgctgcctgcaggcctctcagggtccttcaccgtctctccagtctcggatccggacccgtggatctcagcctcagaccctcctctggccccggccttgccctcgggcacggcccctttcctcttcagccctggggtcctgctccccgagccagaatattgtcctccttggaggtccccaaagaaggagtctcccaagatctcccaacgttggagggagtccaagcccagggggaacttgacataccaccagtacatgcccccagagccgagacagggatccagggcggacccccaagccgaggggtccgccctgggtcctcctgggccatctctgtgggaagggacagactcgcagcagccacatcctaggatgaagccctctcccctcactccctgcccaccaggagtccctagcccctcgccccccccacacaagttggaacttcagacccttaaactggaggagctgacggtcaagcccagcgcagcatctcacaggccacctcttccacgtgccgcggataccccggggacggctccggctccaactcccactccggctcctgctgcagctccagccctgaccccttcctcagggccgggctcagcggctctgactctggaggaggagctgcaggaagcgatccggagggcgcagttgcttcctaaccggggcatcgatgacatcctggaggatcaggtggagcctgatgaccccctgccccctattcccctggacttccctggctccttcgacgtgctgtccccctccccggactctgaaggcctctcatctgttttctcctcttcactcccgtctcccacgaactcctcctccccttctcccagggaccccacggactccctggactggctggaggccctgagcgggggtcctcctctgggttctggtcccccaccccccagcatcttctccgctgacttatctgactccagcagcagccggctgtgggacctgctggaggatccatggtgatggattctaggatttacagagacagagaactgatgggggtggagagaagctccttgtgggaggagagggaactaccagcagagcccctcctaccgcagacacaggatcggagacaacctccaaccccacctgcctcctgaagtgctgctgacatgcaactgccttaactttgcctacctggcctccttatgatccccctccggcgtggtatggttggggggcttcttttgctgctggccacggcaaacaagctgcttgctgcttccttc

SEQ ID NO: 9415 - protein, 247 aa, Homo sapiens
MPPEPRQGSRADPQAEGSALGPPGPSLWEGTDSQQPHPRMKPSPLTPCPPGVPSPSPPPHKLELQTLKLEELTVKPSAASHRPPLPRAADTPGTAPAPTPTPAPAAAPALTPSSGPGSAALTLEEELQEAIRRAQLLPNRGIDDILEDQVEPDDPLPPIPLDFPGSFDVLSPSPDSEGLSSVFSSSLPSPTNSSSPSPRDPTDSLDWLEALSGGPPLGSGPPPPSIFSADLSDSSSSRLWDLLEDPW

SEQ ID NO: 9416 - DNA, 1581 bp, Homo sapiens
agactcaacccgccccagagcacagcttcgccgagcccacctggtccccatcccggccttggcaatgaccctggcggcttcctcccagcgttcccaaatcattcgctccaagttccgatctgtcctccagcttcggatccacagacggaatcaggagcagatctcggatccggacccgtggatctcagcctcagaccctcctctggccccggccttgccctcgggcacggcccctttcctcttcagccctggggtcctgctccccgagccagaatattgtcctccttggaggtccccaaagaaggagtctcccaagatctcccaacgttggagggagtccaagcccagggggaacttgacataccaccagtacatgcccccagagccgagacagggatccagggcggacccccaagccgaggggtccgccctgggtcctcctgggccatctctgtgggaagggacagactcgcagcagccacatcctaggatgaagccctctcccctcactccctgcccaccaggagtccctagcccctcgccccccccacacaagttggaacttcagacccttaaactggaggagctgacggtctcagagctccggcagcagctgcgcctgcggggcctcccagtgtcggggaccaagtctatgctcctggagcgcatgcgcggcggcgcgccgccccgcgagcggccgaagccgcggcgcgaggacagtcccgcgggtgctccctggccgcgcctcaagcccaaggccctggcagccgcccggcgtcagggctcggtcaagcccagcgcagcatctcacaggccacctcttccacgtgccgcggataccccggggacggctccggctccaactcccactccggctcctgctgcagctccagccctgaccccttcctcagggccgggctcagcggctctgactctggaggaggagctgcaggaagcgatccggagggcgcagttgcttcctaaccggggcatcgatgacatcctggaggatcaggtggagcctgatgaccccctgccccctattcccctggacttccctggctccttcgacgtgctgtccccctccccggactctgaaggcctctcatctgttttctcctcttcactcccgtctcccacgaactcctcctccccttctcccagggaccccacggactccctggactggctggaggccctgagcgggggtcctcctctgggttctggtcccccaccccccagcatcttctccgctgacttatctgactccagcagcagccggctgtgggacctgctggaggatccatggtgatggattctaggatttacagagacagagaactgatgggggtggagagaagctccttgtgggaggagagggaactaccagcagagcccctcctaccgcagacacaggatcggagacaacctccaaccccacctgcctcctgaagtgctgctgacatgcaactgccttaactttgcctacctggcctccttatgatccccctccggcgtggtatggttggggggcttcttttgctgctggccacggcaaacaagctgcttgctgcttccttc

SEQ ID NO: 9417 - protein, 415 aa, Homo sapiens; identical to SEQ ID NO: 9413

SEQ ID NO: 9418 - DNA, 1869 bp, Homo sapiens
cttctgaatctcccactttctaagtctactcttcagtcactgttaagtttcatatataatagatagataaatgattgatagatagctagagatcaaatagtgccaggaactgtgatttaaactgaagatcctctttcatcaggccccacttccttcgcttgctgacctcacttcctacagctctgaattcacttccctttcagaacgacagatctttttctctgagtgcccttcctggaagggcctgctttctgccccagtttcccccccattacccttgaccttaacaccacttcttggcattctcagggtttctggcttatggtgggcttgatgccctatgtgcaagaatgagagaggatcttttgggacagctaactatcagtctctaagttcctctagcagcctggattgtgaagccctttcctccttcacttcctgtacattcctgccaagtgtgcgtttatttcttctgtttctgacctcatttcctgtccttggcctgatctcattttccactggcaaactgccatcccactcccacttcctgactctccattctttttctttcctttgggaattcaggatgaataattctttgactgaaagggaactctttgtccagtatcctttgtcctccttgagctgtctctgctgagaactacaagtcccacaatgcacaagaggtgatcttaaaatactcgagaaacttgtatacccttctatcaagtagggatttgctcacggagaccctttgggtgttgactgtagaatggactacaactcccagaagactttggtggagctccccactatcttcatgctctattaccctgaagcttcctgggagttgtagtccaatcacttgtttccacttctctattttctcagactctctattcaacgctgcctgctctcctggatagtaaccctttcacagctggtgcagagctgccggggcctggcgcggagctgggggccatgcctccaggattgagacctaccctgggcgtgttccaggcagccttggagctgaccagccagtgcgagctgcaccctgacctcgtgtctcagacttttggctacttgttcttcttctccaacgcatcccttctcaactcgctgatggaacgaggtcaaggccggcctttctatcaatggtcccgagctgttcaaatccgaaccaacctggacctcgtcttggactggctacagggagctgggctgggcgacattgccactgagttcttccggaaactctccatggctgtgaacctgctctgtgtgccccgcacttccctgctcaaggcttcatggagcagcctaagaaccgaccaccccaccttgacccccgcccagctgcaccatctgctcagccactatcagctgggccctggccgcgggccgccagccgcgtgggaccctccccctgcagagcgggaggctgtggacacaggggacatcttcgaaagcttctcctcgcacccgcccctcatcctccccctggggagctcgcgcctgcgcctcactggtccagtgacggacgatgccttgcaccgtgaactccgtaggctccgccgcctcctctgggatcttgagcagcaggagctgccagccaattatcgccatgggcctcccgtggccacgtctccttgagaaccaataccaaacgagcgcgcgaaccttgaaatgtcacgggcttctacggacaggagcccgcctgagcgcaaagctttctgggagttgtagttcttatcccgcgtggaatgttgggagattgagttttcgggaagtagcggatgggacggtgggagcatgggcttaggatgtgaatgccagggagcaataaaggtatccgtggtatcggca

SEQ ID NO: 9419 - protein, 224 aa, Homo sapiens
MPPGLRPTLGVFQAALELTSQCELHPDLVSQTFGYLFFFSNASLLNSLMERGQGRPFYQWSRAVQIRTNLDLVLDWLQGAGLGDIATEFFRKLSMAVNLLCVPRTSLLKASWSSLRTDHPTLTPAQLHHLLSHYQLGPGRGPPAAWDPPPAEREAVDTGDIFESFSSHPPLILPLGSSRLRLTGPVTDDALHRELRRLRRLLWDLEQQELPANYRHGPPVATSP

SEQ ID NO: 9420 - DNA, 3310 bp, Homo sapiens
ggcagggccaaccctacccagatctcctcccccaggcctggtctcctcacaggacgccccctccccgctcttcctgccgggtttcctcttgccttttcctgtcccccacccagtgctgggagccgtggcagaggcaagagcagtggaactgacccaggccagtggagccagggcctccgggtgtgccggacccgaagcaggggccatgctgtctggtgaacggaaggagggcggaagcccccgcttcgggaagcttcatctccccgtgggcctgtggatcaattcccccaggaagcagctggcgaagctggggcggcgctggcccagcgcagcctctgtcaagtcttcttcgtcggacacggggagccgcagcagcgagccgctacctccgcccccgccgcacgtggagctgcggcgagtgggcgctgtcaaggcggccgggggagcctccggtagccgcgccaagcgcatctcccagctcttccggggctcggggaccgggaccacggggtccagcggcgcaggaggccctgggaccccggggggcgcgcagcgctgggccagcgagaagaagctgccggagctggcggcgggcgtggcccccgagcccccgctggctacccgcgccacggcgcctccgggggtcctcaagatcttcggcgccggactggcatcgggcgccaactacaagagcgtgctggccacggcgcgctccacggcgcgcgagctcgtggccgaggcgctagagcgctacggcctagcaggcagccccggcggtggccccggcgagagcagctgcgtggacgccttcgctttgtgcgacgctctgggccggcccgcggcggcgggcgtgggaagcggcgagtggcgggcggagcacctgcgcgtgctgggcgactccgagcgcccgctgctggtgcaggagctgtggcgggcgcggcccggctgggcgcggcgcttcgagttgcgcggccgcgaggaggcgcggcgcctggagcaggaggccttcggggccgcggacagcgaaggcaccggcgccccttcgtggcggccacagaagaaccgctcccgggcggcgtcgggtggggcagcgctggccagtcctggcccggggaccggatcaggggccccagctgggtctggaggcaaggagcgctcagaaaacttgtctttgcggcgcagcgtgtcggagcttagccttcaggggcggcggcggcggcagcaggagcggagacagcaggcacttagcatggccccaggggcagccgacgcccaaatcggaactgcagaccccggggacttcgatcagttgactcagtgcctcatccaggcccccagcaaccgcccctacttcctgctgctccagggctaccaggacgcccaggactttgtggtgtatgtgatgacgcgagagcagcacgtgtttgggcgaggtgggaactcgtctggccgcggggggtccccggctccctatgtggacaccttcctcaacgccccggacatcctgccgcgtcactgcacagtgcgcgcgggccctgagcacccggccatggtgcgcccgtcccggggcgccccagtcacgcacaacgggtgcctcctgctgcgggaggctgagctgcacccgggcgacctcctggggctgggcgagcacttcctgttcatgtacaaggacccccgcactgggggctcggggcctgcgaggccgccgtggctgcccgcgcgccccggggccacgccgccaggccctggctgggccttctcctgtcgcctgtgcggccgcggcctgcaggagcgcggcgaggcactggccgcctacctggacggccgtgagccagtcctgcgcttccggccgcgcgaggaggaggcgctgctgggcgagatcgtgcgcgccgcagccgccggctcgggagacctgccgcccctcgggcccgccacgctgctggcgctgtgcgtgcagcattccgcccgtgagctggagctgggccacctgccacgactgctgggccgcctggcccggctcatcaaggaggccgtctgggaaaagattaaggaaattggagaccgtcagccagaaaaccaccctgagggggtccccgaggtgcccctgactcctgaagctgtgtctgtggagctgcggccactcatgctgtggatggccaacaccacggagctgcttagctttgtgcaggagaaggtgctggaaatggagaaggaggctgaccaagaggacccacagctctgcaatgacttggaattatgtgatgaggccatggccctcctggatgaggtcatcatgtgtaccttccagcagtctgtctactacctcaccaagactctctattcaacgctgcctgctctcctggatagtaaccctttcacagctggtgcagagctgccggggcctggcgcggagctgggggccatgcctccaggattgagacctaccctgggcgtgttccaggcagccttggagctgaccagccagtgcgagctgcaccctgacctcgtgtctcagacttttggctacttgttcttcttctccaacgcatcccttctcaactcgctgatggaacgaggtcaaggccggcctttctatcaatggtcccgagctgttcaaatccgaaccaacctggacctcgtcttggactggctacagggagctgggctgggcgacattgccactgagttcttccggaaactctccatggctgtgaacctgctctgtgtgccccgcacttccctgctcaaggcttcatggagcagcctaagaaccgaccaccccaccttgacccccgcccagctgcaccatctgctcagccactatcagctgggccctggccgcgggccgccagccgcgtgggaccctccccctgcagagcgggaggctgtggacacaggggacatcttcgaaagcttctcctcgcacccgcccctcatcctccccctggggagctcgcgcctgcgcctcactggtccagtgacggacgatgccttgcaccgtgaactccgtaggctccgccgcctcctctgggatcttgagcagcaggagctgccagccaattatcgccatgggcctcccgtggccacgtctccttgagaaccaataccaaacgagcgcgcgaaccttgaaatgtcacgggcttctacggacaggagcccgcctgagcgcaaagctttctgggagttgtagttcttatcccgcgtggaatgttgggagattgagttttcgggaagtagcggatgggacggtgggagcatgggcttaggatgtgaatgccagggagcaataaaggtatccgtggtatcggca

SEQ ID NO: 9421 - protein, 963 aa, Homo sapiens; identical to SEQ ID NO: 1190

SEQ ID NO: 9422 - DNA, 297 bp, Homo sapiens
ctgacctcgtgtctcagacttttggctacttgttcttcttctccaacgcatcccttctcaactcgctgatggaacgaggtcaaggccggcctttctatcaatggtcccgagctgttcaaatccgaaccaacctggacctcgtcttggactggctacagggagctgggctgggcgacattgccactgagttcttccggaaactctccatggctgtgaacctgctctgtgtgccccgcacttccctgctcaaggtgactcctggtcagctatacctgacccctgacctctgactcctca

SEQ ID NO: 9423 - protein, 73 aa, Homo sapiens
MERGQGRPFYQWSRAVQIRTNLDLVLDWLQGAGLGDIATEFFRKLSMAVNLLCVPRTSLLKVTPGQLYLTPDL

SEQ ID NO: 9424 - DNA, 150 bp, Homo sapiens
ctgacagctcccagccaaccttcacctcgttccatcagcgagttgagaagggatgcgttggagaagaagaacaagtagccaaaactctgtcaacttctcatccagtgggatctctcccccaccatctcccataatggtttcttcctaagg

SEQ ID NO: 9425 - protein, 31 aa, Homo sapiens
MRWRRRTSSQNSVNFSSSGISPPPSPIMVSS

SEQ ID NO: 9426 - DNA, 828 bp, Homo sapiens
ggttcaaatgattcttctgcctcagcctcccgagtagtgggattacaggtgtgagccaccacacccggtgttttggggttattaagcaaggggcccccccatagaatgctgggagatgtagatccactgcacttagagggaagcccaaactcaccttaggagagctcacctaagcacgaactcaccttaggaagaaaccattatgggagatggtgggggagagatcccactggatgagaagttgacagagatcagtgtgagaattcaccgcagcccattgggcttggagcttggatagcagtgagcgagttcattcttggaggcgaggaagcacaaatccactggacctacagatggaagttccagaaagaaaccattcagagtgggggaaacgttccatcctattgagctagggcctaaccagagaggtttaaggagtttcttgggggtaaaaattggagaagaggacctgaaggagctagatcactcataatcatagggtgtgtatgttttaaaaagtaaggagagaccattctaaagcttgtgggattagaatttgtctcaagagccaggcgtggtggctcatgcctgtaatcccggcactttgggaggccgaggcgggcagatcacctgaagtcgggagatcgagaccatcctggctaacatggtgaaaccccgtctctactaaaaatgcaaaaaattagccgggcatggtagcacatgcctgtaatcccagctacttgggaggctgaggcaggagaatcacttgaacctgggaggcagaggttgcagtgagccaaaattgagccattgcaccccagcctgggc

SEQ ID NO: 9427 - protein, 31 aa, Homo sapiens [sequence omitted]

SEQ ID NO: 9428 - DNA, 922 bp, Homo sapiens
ttggggcttaggcgggacgggggctggttgctggtggtggcttggagtggcctgaagtggctccgaattggggttagggccttctgcaggcatttcagactgccttggaggaggtggggtgtgtagcggggtctgcggagtagtagatcctgaggagcgtttgtggagtccagtggaatgggcaggagtccgcaggggcctaagggattcgccctgtgtggcaccggcgccccttcgtggcggccacagaagaaccgctcccgggcggcgtcgggtggggcagcgctggccagtcctggcccggggaccggatcaggggccccagctgggtctggaggcaaggagcgctcagaaaacttgtctttgcggcgcagcgtgtcggagcttagccttcaggggcggcggcggcggcagcaggagcggagacagcaggcacttagcatggccccaggggcagccgacgcccaaatcggaactgcagaccccggggacttcgatcagttgactcagtgcctcatccaggcccccagcaaccgcccctacttcctgctgctccagggctaccaggacgcccaggactttgtggtgtatgtgatgacgcgagagcagcacgtgtttgggcgaggtgggaactcgtctggccgcggggggtccccggctccctatgtggacaccttcctcaacgccccggacatcctgccgcgtcactgcacagtgcgcgcgggccctgagcacccggccatggtgcgcccgtcccggggcgccccagtcacgcacaacgggtgcctcctgctgcgggaggctgagctgcacccgggcgacctcctggggctgggcgagcacttcctgttcatgtacaaggacccccgcactgggggctcggggcctgcgaggccgccgtggctgcccgcgcgccccgggg

SEQ ID NO: 9429 - protein, 247 aa, Homo sapiens
MGRSPQGPKGFALCGTGAPSWRPQKNRSRAASGGAALASPGPGTGSGAPAGSGGKERSENLSLRRSVSELSLQGRRRRQQERRQQALSMAPGAADAQIGTADPGDFDQLTQCLIQAPSNRPYFLLLQGYQDAQDFVVYVMTREQHVFGRGGNSSGRGGSPAPYVDTFLNAPDILPRHCTVRAGPEHPAMVRPSRGAPVTHNGCLLLREAELHPGDLLGLGEHFLFMYKDPRTGGSGPARPPWLPARP

SEQ ID NO: 9430 - DNA, 491 bp, Homo sapiens
tgattatctctgggatggccggctactgggacgggcttgtctttgccagggcaggaactccacgccctgccaggactgctctttacgctttctctaacagtgttgcccaaaatgatcaaggaggaaaaaccttctccaaatatcgtaaccccgggggaggcgaccacggagtcgtccataagcctccagcctctgcagcccgagaaaatgctggcaagccgccttctggggctgctgatctgcggctccctagcactgataaccggccttacctttgcgtaagcaacccattgaagaagacaggcttggcttggagatatttcgtcgaaggaaggtgatcgatttcatcaaatcctcactgtttggccttggcagtggagcggccgagcaaacccaggtcccaaaagaaaaggccacagattcgaggcaacaataaagatttatcttgttgtctaagcatctgactcactccccgggacgggactgattct

SEQ ID NO: 9431 - protein, 107 aa, Homo sapiens
MAGYWDGLVFARAGTPRPARTALYAFSNSVAQNDQGGKTFSKYRNPGGGDHGVVHKPPASAARENAGKPPSGAADLRLPSTDNRPYLCVSNPLKKTGLAWRYFVEGR

SEQ ID NO: 9432 - DNA, 1006 bp, Homo sapiens
atggggccgcattttaccctcctgtgtgcggcgctggccggttgcttgcttcctgccgaggggtgtgttatatgtgacccgtctgtcgtgctggcgctaaagtccctggagaaagattacctgcctggccacctggatgcgaagcatcacaaagccatgatggaaaggatgaggccacactgcaaaaggggtcctggagtttgctgaaggatctgaaacgcatcacagacagtgatgtaaaaggcgatctcttcgtgaaggagctattttggatgttgcacttgcaaaaggaaacctttgccacctatgttgctcgattccaaaaagaggcttattgtcccaacaaatgtggtgtgatgttgcaaactctgatctggtgcaagaactgcaaaaaggaggttcacgcttgtcgaaagtcctacgattgcggggagcggaatgtggaagttcctcaaatggaagacatgatcctggactgtgagttaaactggcatcaggcttcggaaggcctcactgattacagcttttacagggtttgggggaacaatacggagaccttggtgtccaaggggaaagaggccaccctgaccaagcccatggtgggtccagaggatgcaggcagctaccgctgcgagctgggctctgtgaattccagcccagccacgatcatcaattttcacgtcacagtgttgcccaaaatgatcaaggaggaaaaaccttctccaaatatcgtaaccccgggggaggcgaccacggagtcgtccataagcctccagcctctgcagcccgagaaaatgctggcaagccgccttctggggctgctgatctgcggctccctagcactgataaccggccttacctttgcgatatttcgtcgaaggaaggtgatcgatttcatcaaatcctcactgtttggccttggcagtggagcggccgagcaaacccaggtcccaaaagaaaaggccacagattcgaggcaacaataaagatttatcttgttgtctaa

SEQ ID NO: 9433 - protein, 237 aa, Homo sapiens
MLHLQKETFATYVARFQKEAYCPNKCGVMLQTLIWCKNCKKEVHACRKSYDCGERNVEVPQMEDMILDCELNWHQASEGLTDYSFYRVWGNNTETLVSKGKEATLTKPMVGPEDAGSYRCELGSVNSSPATIINFHVTVLPKMIKEEKPSPNIVTPGEATTESSISLQPLQPEKMLASRLLGLLICGSLALITGLTFAIFRRRKVIDFIKSSLFGLGSGAAEQTQVPKEKATDSRQQ

SEQ ID NO: 9434 - DNA, 1621 bp, Homo sapiens
ggaatatctataaaggaattcgggcccctacgtgagaagctcggagggggtggtttcaggagttccttgtggagaggggatcgtccgtgactcagaccccgtcgaaaagctctcgatttcacgcaaccaaccttaccctcgtccccaacacaatccttgattttacccctgggaaaattagcgtaggtggtcatgaccccggcttcctctttaaaagccctcagaacctggaccgggctcctcaatgaaccctagtgttagaggccacaaatcgggaaccaaggtcggggagcggctgtttagggtgcatcactgttcaggatgcatcggggctcctttttctaagcggaagggtgcgccctgcaaattgggagcccgttagttttggggaagggtgaacaagggccccctaggtctagaggaccgcatggagtctcgcttaagtgttagtggggtcctcagttctaggaatctgcgttctcctgctctcggtttggggtgagagcacccttcctaacggtcttcgggaactgtgcgcgccggctgcaatggggccgcattttaccctcctgtgtgcggcgctggccggttgcttgcttcctgccgaggggtgtgttatatgtgacccgtctgtcgtgctggcgctaaagtccctggagaaagattacctgcctggccacctggatgcgaagcatcacaaagccatgatggaaagggtagagaatgccgtgaaggatttccaggaactgtcgcttaatgaggatgcctatatgggggtcgttgatgaggccacactgcaaaaggggtcctggagtttgctgaaggatctgaaacgcatcacagacagtgatgtaaaaggcgatctcttcgtgaaggagctattttggatgttgcacttgcaaaaggaaacctttgccacctatgttgctcgattccaaaaagaggcttattgtcccaacaaatgtggtgtgatgttgcaaactctgatctggtgcaagaactgcaaaaaggaggttcacgcttgtcgaaagtcctacgattgcggggagcggaatgtggaagttcctcaaatggaagacatgatcctggactgtgagttaaactggcatcaggcttcggaaggcctcactgattacagcttttacagggtttgggggaacaatacggagaccttggtgtccaaggggaaagaggccaccctgaccaagcccatggtgggtccagaggatgcaggcagctaccgctgcgagctgggctctgtgaattccagcccagccacgatcatcaattttcacgtcacagtgttgcccaaaatgatcaaggaggaaaaaccttctccaaatatcgtaaccccgggggaggcgaccacggagtcgtccataagcctccagcctctgcagcccgagaaaatgctggcaagccgccttctggggctgctgatctgcggctccctagcactgataaccggccttacctttgcgatatttcgtcgaaggaaggtgatcgatttcatcaaatcctcactgtttggccttggcagtggagcggccgagcaaacccaggtcccaaaagaaaaggccacagattcgaggcaacaataaagatttatcttgttgtctaa

SEQ ID NO: 9435 - protein, 350 aa, Homo sapiens
MGPHFTLLCAALAGCLLPAEGCVICDPSVVLALKSLEKDYLPGHLDAKHHKAMMERVENAVKDFQELSLNEDAYMGVVDEATLQKGSWSLLKDLKRITDSDVKGDLFVKELFWMLHLQKETFATYVARFQKEAYCPNKCGVMLQTLIWCKNCKKEVHACRKSYDCGERNVEVPQMEDMILDCELNWHQASEGLTDYSFYRVWGNNTETLVSKGKEATLTKPMVGPEDAGSYRCELGSVNSSPATIINFHVTVLPKMIKEEKPSPNIVTPGEATTESSISLQPLQPEKMLASRLLGLLICGSLALITGLTFAIFRRRKVIDFIKSSLFGLGSGAAEQTQVPKEKATDSRQQ

SEQ ID NO: 9436 - DNA, 2204 bp, Homo sapiens
tggggacttatgagtgattcctgtttaatagtttttctgatctctcagttgggggattcagtgagaaccctaaattttgggtcccctggattggggctcagtttcacacttcggaggcatttgatgaaggacataggtcctctttatttggagatttcctgaagatcctcttttcgaggtttgcggaccccatggataggcggcccagtgggatttcttaagatggattttggcttttctccgtttagcgttctcctgctctcggtttggggtgagagcacccttcctaacggtcttcgggaactgtgcgcgccggctgcaatggggccgcattttaccctcctgtgtgcggcgctggccggttgcttgcttcctgccgaggggtgtgttatatgtgacccgtctgtcgtgctggcgctaaagtccctggagaaagattacctgcctggccacctggatgcgaagcatcacaaagccatgatggaaagggtagagaatgccgtgaaggatttccaggaactgtcgcttaatgaggatgcctatatgggggtcgttggtgagggcaggggggaccacggacccctgggtcctgggaaaggagggagataagaccaggggaaggaagaggctgacagcagggtctccgggattcgggaatggagaaggctgagatgcagattccgaggttccccgaggctagtaaataccgttttccctatcctcggctggcaattttatgtaataaaactacaactcccagaaggcaacgggcggctgagtccttaaccaggcctatctttgcccagtggcctcatgggtattgtagtttctaagattaggcgcgccaatgagacagtaaggctggaatctggggttatatctcctctgacagatgaggccacactgcaaaaggggtcctggagtttgctgaaggatctgaaacgcatcacagacagtgatgtaaaaggcgatctcttcgtgaaggagctattttggatgttgcacttgcaaaaggaaacctttgccacctatgttgctcgattccaaaaagaggcttattgtcccaacaaatgtggtgagtctggattacagaagttaaccctcatcctgccctctgaatagtcaacctccccactcgcctttttggatcctggtggttttgtcattctctgccttggagaggttcctgggtctccagtattctttctgcaccatggatttcttggggagcaggtcatattctacttacactcttttttttgagacagtctcaccctgtcacccaggctggagtgcagtggcacgatcacggctcactgcaacctccacctcccaggttcaaactattctcctgcctcagccccctgagtagctgggattacaggtgcccgccatcacacccagctaatttttgtatttttagcagagacggggtttcaccatgttggtcaggctagtcttgaactcctgaccttgtgatccgcccgcctcggcctcccaaagtgctgggattacaggagtaagccaccgcatccggcctctacttacaatctttactgagccttgttggagcccacttactacttacctgcgtcctggtcctgtgccttcgtctgaccatctaggaatgtcatagatgatctggccccagcccttagccctgacctctccttttagccatgccccttagtgggcaaatacaagccttgaccctgcccctccaggtgtgatgttgcaaactctgatctggtgcaagaactgcaaaaaggaggttcacgcttgtcgaaagtcctacgattgcgggggtgagagaactggacccagcaggaggaattggtgcaggtggggtggggcgagaggagaggcagtctagagagagcctagatgggggtgtgggggcagtagacaagaaaaggtagggtttaggccaggtgcagtggttcacacctatagtctcgcacttcgagaggctgagacgggaggattgggaagccaggagtttgagaccagcctgggcaacatagcgagactctatctctacaaaaaaatttaaaaattagtcaggtgtggtgttgcgttcctgtagtcccagctacttggaaggctgaggcaggaggattgcttggacccaggagttggagactgcagtaagctatgatcataccactgcactccagcccaggcaaaagagtgagaccttgtct

SEQ ID NO: 9437 - protein, 102 aa, Homo sapiens
MGIVVSKIRRANETVRLESGVISPLTDEATLQKGSWSLLKDLKRITDSDVKGDLFVKELFWMLHLQKETFATYVARFQKEAYCPNKCGESGLQKLTLILPSE

SEQ ID NO: 9438 - DNA, 221 bp, Homo sapiens
tcgatttcacgcaaccaaccttaccctcgtccccaacacaatccttgattttacccctgggaaaattagcatgaggccacactgcaaaaggggtcctggagtttgctgaaggatctgaaacgcatcacagacagtgatgtaaaaggcgatctcttcgtgaaggagctattttggatgttgcacttgcaaaaggaaacctttgccacctatgttgctcgatt

SEQ ID NO: 9439 - DNA, 4246 bp, Homo sapiens
gaaagtccctgactggagttggcagccaagccaggccctggagtgggcacccagagggaagacaggttggctaatttcctggagcccctaagggtgcaagggggaagaacacccacccgcaaagccccgtagggctggaccctacgttagcctgccctgctcggggttggcgatgctggaggtgggccttggaccagagaaaatgctttaattaggtgacaagcgggcagaggcctttgtctctggcgccggcagccacggcccccgctgacggcgtgggaaacagaccctgttccactccggtctccagccttggaatggttgccttcgtgcagtgcaggaggacgcggcagagggcggacgatcgctccactcgccgggaccaggtgcgggggccctgcccagccgctggggcgtggccaggctcgaagcacccaggtgtcgggggccgactctaagccctggcaccggaagagagagggcggcggattggacctcccggctccagcattgcaactgggcgctccgtctcctggtccacgcaatgatgctgcggctgctcagaagccaggtagcctgccctgggtgaagccttcgcgcaggtcaatgacggggcggaggggcagggcgcggtcccctgcatccccgatctggggagcggtgggcccaggggccatcgccttagcccctggcgctggggctcggcgccaagtgacgggcggggctccaccttccagccatccgcccggcccgggagggcggacgctgcgagactcccggccgcgccctctccttcctctcctccccaagccctcgctgccagtccggacaggctgcgcggaggggagggctgccgggccggatagccggacgcctggcgttccaggggcggccggatgtggcctgcctttgcggagggtgcgctccggccacgaaaagcggactgtggatctgccacctgcaagcagctcggccatgtggctccggagccatcgtcagctctgcctggccttcctgctagtctgtgtcctctctgtaatcttcttcctccatatccatcaagacagctttccacatggcctaggcctgtcgatcctgtgtccagaccgccgcctggtgacacccccagtggccatcttctgcctgccgggtactgcgatgggccccaacgcctcctcttcctgtccccagcaccctgcttccctctccggcacctggactgtctaccccaatggccggtttggtaatcagatgggacagtatgccacgctgctggctctggcccagctcaacggccgccgggcctttatcctgcctgccatgcatgccgccctggccccggtattccgcatcaccctgcccgtgctggccccagaagtggacagccgcacgccgtggcgggagctgcagcttcacgactggatgtcggaggagtacgcggacttgagagatcctttcctgaagctctctggcttcccctgctcttggactttcttccaccatctccgggaacagatccgcagagagttcaccctgcacgaccaccttcgggaagaggcgcagagtgtgctgggtcagctccgcctgggccgcacaggggaccgcccgcgcacctttgtcggcgtccacgtgcgccgtggggactatctgcaggttatgcctcagcgctggaagggtgtggtgggcgacagcgcctacctccggcaggccatggactggttccgggcacggcacgaagcccccgttttcgtggtcaccagcaacggcatggagtggtgtaaagaaaacatcgacacctcccagggcgatgtgacgtttgctggcgatggacaggaggctacaccgtggaaagactttgccctgctcacacagtgcaaccacaccattatgaccattggcaccttcggcttctgggctgcctacctggctggcggagacactgtctacctggccaacttcaccctgccagactctgagttcctgaagatctttaagccggaggcggccttcctgcccgagtgggtgggcattaatgcagacttgtctccactctggacattggctaagccttgagagccagggagactttctgaagtagcctgatctttctagagccagcagtacgtggcttcagaggcctggcatcttctggagaagcttgtggtgttcctgaagcaaatgggtgcccgtatccagagtgattctagttgggagagttggagagaagggggacgtttctggaactgtctgaatattctagaactagcaaaacatcttttcctgatggctggcaggcagttctagaagccacagtgcccacctgctcttcccagcccatatctacagtacttccagatggctgcccccaggaatggggaactctccctctggtctactctagaagaggggttacttctcccctgggtcctccaaagactgaaggagcatatgattgctccagagcaagcattcaccaagtccccttctgtgtttctggagtgattctagagggagacttgttctagagaggaccaggtttgatgcctgtgaagaaccctgcagggcccttatggacaggatggggttctggaaatccagataactaaggtgaagaatctttttagttttttttttttttttttggagacagggtctcgctctgttgcccaggctggagtgcagtggcgtgatcttggctcactgcaacttccgcctcctgtgttcaagcgattctcctgtctcagcctcctgagtagatgggactacaggcacaggccattatgcctggctaatttttgtatttttagtagagacagggtttcaccatgttggccaggatggtctcgatctcctgaccttgtcatccacctgtcttggcctcccaaagtgctgggattactggcatgagccactgtgcccagcccggatattttttttttaattatttatttatttatttatttattgagacggagtcttgctctgtagcccaggccagagtgcagtggcgcgatctcagctcactgcaagctctgcctcccgggttcatgccattctgcctcagcctcctgagtagctgggactacaggcgcccgccaccacgcccggctaattttttttgtatttttagtagagacggggtttcatcgtgttaaccaggatggtctcgatctcctgacctcgtgatctgcccacctcggcctcccacagtgctgggattaccggcgtgagccaccatgcctggcccggataattttttttaatttttgtagagacgaggtcttgtgatattgcccaggctgttcttcaactcctgggctcaagcagtcctcccaccttggcctcccagaatgctgggtttatagatgtgagccagcacaccgggccaagtgaagaatctaatgaatgtgcaacctaattgtagcatctaatgaatgttccaccattgctggaaaaattgagatggaaaacaaaccatctctagttggccagcgtcttgctctgttcacagtctctggaaaagctggggtagttggtgagcagagcgggactctgtccaacaagccccacagcccctcaaagacttttttttgtttgttttgagcagacaggctaaaatgtgaacgtggggtgagggatcactgccaaaatggtacagcttctggagcagaactttccagggatccagggacacttttttttaaagctcataaactgccaagagctccatatattgggtgtgagttcaggttgcctctcacaatgaaggaagttggtctttgtctgcaggtgggctgctgagggtctgggatctgttttctggaagtgtgcaggtataaacacaccctctgtgcttgtgacaaactggcaggtaccgtgctcattgctaaccactgtctgtccctgaactcccagaaccactacatctggctttgggcaggtctgagataaaacgatctaaaggtaggcagaccctggacccagcctcagatccaggcaggagcacgaggtctggccaaggtggacggggttgtcgagatctcaggagccccttgctgttttttggagggtgaaagaagaaaccttaaacatagtcagctctgatcacatcccctgtctactcatccagaccccatgcctgtaggcttatcagggagttacagttacaattgttacagtactgttcccaactcagctgccacgggtgagagagcaggaggtatgaattaaaagtctacagcactaa

SEQ ID NO: 9440 - protein, 488 aa, Homo sapiens
MTGRRGRARSPASPIWGAVGPGAIALAPGAGARRQVTGGAPPSSHPPGPGGRTLRDSRPRPLLPLLPKPSLPVRTGCAEGRAAGPDSRTPGVPGAAGCGLPLRRVRSGHEKRTVDLPPASSSAMWLRSHRQLCLAFLLVCVLSVIFFLHIHQDSFPHGLGLSILCPDRRLVTPPVAIFCLPGTAMGPNASSSCPQHPASLSGTWTVYPNGRFGNQMGQYATLLALAQLNGRRAFILPAMHAALAPVFRITLPVLAPEVDSRTPWRELQLHDWMSEEYADLRDPFLKLSGFPCSWTFFHHLREQIRREFTLHDHLREEAQSVLGQLRLGRTGDRPRTFVGVHVRRGDYLQVMPQRWKGVVGDSAYLRQAMDWFRARHEAPVFVVTSNGMEWCKENIDTSQGDVTFAGDGQEATPWKDFALLTQCNHTIMTIGTFGFWAAYLAGGDTVYLANFTLPDSEFLKIFKPEAAFLPEWVGINADLSPLWTLAKP

SEQ ID NO: 9441 - DNA, 431 bp, Homo sapiens
tcggcttctgggctgcctacctggctggcggagacactgtctacctggccaatggcaggtaccgtgctcattgctaaccactgtctgtccctgaactcccagaaccactacatctggctttgggcaggtctgagataaaacgatctaaaggtaggcagaccctggacccagcctcagatccaggcaggagcacgaggtctggccaaggtggacggggttgtcgagatctcaggagccccttgctgttttttggagggtgaaagaagaaaccttaaacatagtcagctctgatcacatcccctgtctactcatccagaccccatgcctgtaggcttatcagggagttacagttacaattgttacagtactgttcccaactcagctgccacgggtgagagagcaggaggtatgaattaaaagtctacagcact

SEQ ID NO: 9442 - protein, 31 aa, Homo sapiens
MPVGLSGSYSYNCYSTVPNSAATGERAGGMN

SEQ ID NO: 9443 - DNA, 597 bp, Homo sapiens
ctgcgtcttgatggggaagaacacccacccgcaaagccccgtagggctggaccctacgttagcctgccctgctcggggttggcgatgctggaggtgggccttggaccagagaaaatgctttaattaggtgacaagcgggcagaggcctttgtctctggcgccggcagccacggcccccgctgacggcgtgggaaacagaccctgttccactccggtctccagccttggaatggttgccttcgtgcagtgcaggaggacgcggcagagggcggacgatcgctccactcgccgggaccaggtgcgggggccctgcccagccgctggggcgtggccaggctcgaagcacccaggtgtcgggggccgactctaagccctggcaccggaagagagagggcggcggattggacctcccggctccagcattgcaactgggcgctccgtctcctggtccacgcaatgatgctgcggctgctcagaagccagccatccgcccggcccgggagggcggacgctgcgagactcccggccgcgccctctccttcctctcctccccaagccctcgctgccagtccggacaggctgcgcggaggggagggc

SEQ ID NO: 9444 - protein, 46 aa, Homo sapiens
MMLRLLRSQPSARPGRADAARLPAAPSPSSPPQALAASPDRLRGGE

SEQ ID NO: 9445 - DNA, 681 bp, Homo sapiens
ctgcgtcttgatggtagtggtcccccgggcccagctgttttctctttatctctttgtcttgtgtctttatttcttacaatctctcctctcctcacaggggaagaacacccacccgcaaagccccgtagggctggaccctacgttagcctgccctgctcggggttggcgatgctggaggtgggccttggaccagagaaaatgctttaattaggtgacaagcgggcagaggcctttgtctctggcgccggcagccacggcccccgctgacggcgtgggaaacagaccctgttccactccggtctccagccttggaatggttgccttcgtgcagtgcaggaggacgcggcagagggcggacgatcgctccactcgccgggaccaggtgcgggggccctgcccagccgctggggcgtggccaggctcgaagcacccaggtgtcgggggccgactctaagccctggcaccggaagagagagggcggcggattggacctcccggctccagcattgcaactgggcgctccgtctcctggtccacgcaatgatgctgcggctgctcagaagccagccatccgcccggcccgggagggcggacgctgcgagactcccggccgcgccctctccttcctctcctccccaagccctcgctgccagtccggacaggctgcgcggaggggagggc

SEQ ID NO: 9446 - protein, 46 aa, Homo sapiens; identical to SEQ ID NO: 9444

SEQ ID NO: 9447 - DNA, 649 bp, Homo sapiens
gaaagtccctgactggagttggcagccaagccaggccctggagtgggcacccagagggaagacaggggaagaacacccacccgcaaagccccgtagggctggaccctacgttagcctgccctgctcggggttggcgatgctggaggtgggccttggaccagagaaaatgctttaattaggtgacaagcgggcagaggcctttgtctctggcgccggcagccacggcccccgctgacggcgtgggaaacagaccctgttccactccggtctccagccttggaatggttgccttcgtgcagtgcaggaggacgcggcagagggcggacgatcgctccactcgccgggaccaggtgcgggggccctgcccagccgctggggcgtggccaggctcgaagcacccaggtgtcgggggccgactctaagccctggcaccggaagagagagggcggcggattggacctcccggctccagcattgcaactgggcgctccgtctcctggtccacgcaatgatgctgcggctgctcagaagccagccatccgcccggcccgggagggcggacgctgcgagactcccggccgcgccctctccttcctctcctccccaagccctcgctgccagtccggacaggctgcgcggaggggagggc

SEQ ID NO: 9448 - protein, 46 aa, Homo sapiens; identical to SEQ ID NO: 9444

SEQ ID NO: 9449 - DNA, 1310 bp, Homo sapiens
gaggcttccaaggcaggatacttgtgtctcagatgcggtcgcttctttcatacagcaattgccgccttgctgaggatcaaggaacctcagtgtcagatcacgccctccccccaaacttagaaattcagatggggcgcagaaatttctcttgttctgcgtgatctgcatagatggtccaagaggtggtttttccaggagcccagcacccctcctccctccgactcagacccaggagtctggccctccattgaaaggaccccaggttacatcatccattcaggctgcccttgccacgatggaattctgtagctcctgccaaatgggtcaaatatcatggttcaggcgcagggagggtgattgggcgggcctgtctgggtataaattctggagcttctgcatctatcccaaaaaacaagggtgttctgtcagctgaggatccagccgaaagaggagccaggcactcaggccacctgagtctactcacctggacaactggaatctggcaccaattctaaaccactcagcttctccgagctcacaccccggagatcacctgaggacccgagccattgatggactcggacgagaccgggttcgagcactcaggactgtgggtttctgtgctggctggtcttctgctgggagcctgccaggcacaccccatccctgactccagtcctctcctgcaattcgggggccaagtccggcagcggtacctctacacagatgatgcccagcagacagaagcccacctggagatcagggaggatgggacggtggggggcgctgctgaccagagccccgaaagtctcctgcagctgaaagccttgaagccgggagttattcaaatcttgggagtcaagacatccaggttcctgtgccagcggccagatggggccctgtatggatcgctccactttgaccctgaggcctgcagcttccgggagctgcttcttgaggacggatacaatgtttaccagtccgaagcccacggcctcccgctgcacctgccagggaacaagtccccacaccgggaccctgcaccccgaggaccagctcgcttcctgccactaccaggcctgccccccgcactcccggagccacccggaatcctggccccccagccccccgatgtgggctcctcggaccctctgagcatggtgggaccttcccagggccgaagccccagctacgcttcctgaagccagaggctgtttactatgacatctcctctttatttattaggttatttatcttatttatttttttatttttcttacttgagataataaagagttccagaggaggat

SEQ ID NO: 9450 - protein, 209 aa, Homo sapiens; identical to SEQ ID NO: 1196

SEQ ID NO: 9451 - DNA, 2707 bp, Homo sapiens
cacagcagcccccgcgcccgccgtgccgccgccgggacgtggggcccttgggccgtcgggccgcctggggagcgccagcccggatccggctgcccagatgcgggcgccactctgcctgctcctgctcgtcgcccacgccgtggacatgctcgccctgaaccgaaggaagaagcaagtgggcactggcctggggggcaactgcacaggctgtatcatctgctcagaggagaacggctgttccacctgccagcagaggctcttcctgttcatccgccgggaaggcatccgccagtacggcaagtgcctgcacgactgtccccctgggtacttcggcatccgcggccaggaggtcaacaggtgcaaaaaatgtggggccacttgtgagagctgcttcagccaggacttctgcatccggtgcaagaggcagttttacttgtacaaggggaagtgtctgcccacctgcccgccgggcactttggcccaccagaacacacgggagtgccagggggagtgtgaactgggtccctggggcggctggagcccctgcacacacaatggaaagacctgcggctcggcttggggcctggagagccgggtacgagaggctggccgggctgggcatgaggaggcagccacctgccaggtgctttctgagtcaaggaaatgtcccatccagaggccctgcccaggagagaggagccccggccagaagaagggcaggaaggaccggcgcccacgcaaggacaggaagctggaccgcaggctggacgtgaggccgcgccagcccggcctgcagccctgaccgccggctctcccgactctctggtcctagtcctcggcccctgcacacctcctcctgctccttctcctcctctcctcttactctttctcctctgtcttctccatttgtcctctctttctttccacccttctatcatttttctgtcagtctaccttccctttctttttcttttttatttcctttatttcttccacctccattctcctctcctttctccctccctccttcccttccttcctcttctttctcacttatcttttatctttccttttctttcttcctgtgtttcttcctgtccttcaccgcatccttctctctctccctcctcttgtctccctctcacacacactttaagagggaccatgagcctgtgccctcccctgcagctttctctatctacaacttaaagaaagcaaacatcttttcccaggcctttccctgaccccatctttgcagagaaagggtttccagagggcaaagctgggacacagcacaggtgaatcctgaaggccctgcttctgctctgggggaggctccaggaccctgagctgtgagcacctggttctctggacagtccccagaggccatttccacagccttcagccaccagccaccccgaggagctggctggacaaggctccagggcttccagaggcctggcttggacacctcccccagctggccgtggagggtcacaacctggcctctgggtgggcagccagccctggagggcatcctctgcaagctgcctgccaccctcatcggcactcccccacaggcctccctctcatgggttccatgcccctttttcccaagccggatcaggtgagctgtcactgctgggggatccacctgcccagcccagaagaggccactgaaacggaaaggaaagctgagattatccagcagctctgttccccacctcagcgcttcctgcccatgtggggaaacaggtctgagaaggaaggggcttgcccagggtcacacaggaagccttcaggctctgcttctgcctgatggctctgctcagcacattcacggtggagaggagaatttgggggtcacttgaggggggaaatgtagggaattgtgggtggggagcaagggaagatccgtgcactcgtccacacccaccaccacactcgctgacacccacccccacacgctgacacccacccccacacttgcccacacccatcaccgcactcgcccacacccaccaccacactgccccacacccaccaccacactcccccacacccaccaccacactcgcccacacccaccaccagtgacttgagcatctgtgcttcgctgtgacgcccctcgccctaggcaggaacgacgctgggaggagtctccaggtcagacccagcttggaagcaagtctgtcctcactgcctatccttctgccatcataacacccccttcctgctctgctccccggaatcctcagaaacgggatttgtatttgccgtgactggttggcctgaacacgtagggctccgtgactgggacaggaatgggcaggagaagcaagagtcggagctccaaggggcccaggggtggcctggggaaggaagatggtcagcaggctgggggagaggctctaggtgatgaaatattacattcccgaccccaagagagcacccaccctcagacctgccctccacctggcagctggggagccctggcctgaacccccccctcccagcaggcccaccctctctctgacttccctgctctcacctccccgagaacagctagagccccctcctccgcctggccaggccaccagcttctcttctgcaaacgtttgtgcctctgaaatgctccgttgttattgtttcaagaccctaacttttttttaaaactttcttaataaagggaaaagaaacttgtaaa

SEQ ID NO: 9452 - protein, 234 aa, Homo sapiens; identical to SEQ ID NO: 1198

SEQ ID NO: 9453 - DNA, 722 bp, Homo sapiens
gcccacagcagcccccgcgcccgccgtgccgccgccgggacgtggggcccttgggccgtcgggccgcctggggagcgccagcccggatccggctgcccagatgcgggcgccactctgcctgctcctgctcgtcgcccacgccgtggacatgctcgccctgaaccgaaggaagaagcaagtgggcactggcctggggggcaactgcacaggctgtatcatctgctcagaggagaacggctgttccacctgccagcagaggctcttcctgttcatccgccgggaaggcatccgccagtacggcaagtgcctgcacgactgtccccctgggtacttcggcatccgcggccaggaggtcaacaggtgcaaaaaatgtggggccacttgtgagagctgcttcagccaggacttctgcatccggtgcaagaggcagttttacttgtacaaggggaagtgtctgcccacctgcccgccgggcactttggcccaccagaacacacgggagtgccaggagaggagccccggccagaagaagggcaggaaggaccggcgcccacgcaaggacaggaagctggaccgcaggctggacgtgaggccgcgccagcccggcctgcagccctgaccgccggctctcccgactctctggtcctagtcctcggcccctgcacacctcctcctgctccttctcctcctctcctcttactctttctcctctgtcttctcca

SEQ ID NO: 9454 - protein, 172 aa, Homo sapiens; identical to SEQ ID NO: 1200

SEQ ID NO: 9455 - DNA, 722 bp, Homo sapiens
ggcaaccaggaactggtggctgcagccaccagccaagttctttccatcatcctgggccctcacctctggcataggctcttggtagtgggggcccagacagggaggcacctgccacctgcttcccttctcagccacccacagccctcatagggcagaatgggactcttgctgatgtagacgccgaagtcgcgggcgctcatggcgggcctggaggtactgttcgcatcggcagcgccggccatcacctgcaggcaggacgcgctcgtctgcttcttgcattgggaagtggtgacacacggttacttcggcttgggtgtcggtgaccagccgggtcccaatgataagaagtcagaactgctgccagctgggtggaacaacaataaagacctgtatgtcctccggtatgagtataaggatgggtccagaaagctccttgtgaaagccatcaccgtggagagcagcatgatcctcaatgtgctggaatatggctcacagcaagtggcagacttgaccctgaacttggatgattatatcgatgcagaacacctgggtgacttccacaggacctacaagaacagtgaggagcttcggtctcgtattgtgtctggaatcatcacacctatccatgagcagtgggaaaaggctaatgtaagcagtccccaccgggagttcccccctgctaccgccagagaggtggacccactccggattcctccacacca

SEQ ID NO: 9456 - protein, 173 aa, Homo sapiens
MAGLEVLFASAAPAITCRQDALVCFLHWEVVTHGYFGLGVGDQPGPNDKKSELLPAGWNNNKDLYVLRYEYKDGSRKLLVKAITVESSMILNVLEYGSQQVADLTLNLDDYIDAEHLGDFHRTYKNSEELRSRIVSGIITPIHEQWEKANVSSPHREFPPATAREVDPLRIPP

SEQ ID NO: 9457 - DNA, 3262 bp, Homo sapiens
ggcaaccaggaactggtggctgcagccaccagccaagttctttccatcatcctgggccctcacctctggcataggctcttggtagtgggggcccagacagggaggcacctgccacctgcttcccttctcagccacccacagccctcatagggcagaatgggactcttgctgatgtagacgccgaagtcgcgggcgctcatggcgggcctggaggtactgttcgcatcggcagcgccggccatcacctgcaggcaggacgcgctcgtctgcttcttgcattgggaagtggtgacacacggttacttcggcttgggtgtcggtgaccagccgggtcccaatgataagaagtcagaactgctgccagctgggtggaacaacaataaagacctgtatgtcctccggtatgagtataaggatgggtccagaaagctccttgtgaaagccatcaccgtggagagcagcatgatcctcaatgtgctggaatatggctcacagcaagtggcagacttgaccctgaacttggatgattatatcgatgcagaacacctgggtgacttccacaggacctacaagaacagtgaggagcttcggtctcgtattgtgtctggaatcatcacacctatccatgagcagtgggaaaaggctaatgtaagcagtccccaccgggagttcccccctgctaccgccagagaggtggacccactccggattcctccacaccacccacacaccagtcggcagcctccctggtgtgatcccctgggcccgtttgttgtcgggggagaagacttagacccttttgggcctcggagaggtggcatgattgtggatcccctgagatctggcttcccaagagcacttattgacccttcctcaggcctcccgaaccgacttcctccaggcgctgtgcccccaggagctcgctttgacccctttggacccattgggaccagcccacccggacctaacccagaccatctccccccgccgggctacgatgacatgtacctgtgaaggcctcaagaatgtaacatcccaggcttccctccattctcctggagctgccaccgctgtccccatcagcaaccatgttcttgcaggctgggggcaagggattctgctcatgtgtttgcagaccggctgggatagcctccccaccccttatcagagccaagacacctgctgcagctctccacctagctgcagatagctcccaaagagaaatcagtgtgtctctttcaccatcagctcctcccctttcaccaccagctcctctccacttcccaagggagactccggcaaccttcagcaacatatatcctcgaccagatgcagtgctataagaacagaacgcattttggatgttattattaagaaccaaatgtcaatacagaattcatgttgccggtttcccacttttctttttacattaatgcatagctgcttccatttatgagactttagagtttgagtttctgtagggctgaatgactctttttcctgcccagggcccattcttgcttctcaggcaccttccgtttattaattgccattgctcctgacatcactaagatgggtccccttctggctgcatgaatggaaatgagtgactggaaatcccataggccacaagaatgactttcacaagggcaggaacattgtggaaagactgcatcattctgatgaggcaaaatcctccagctattcctgtctgggccagttttgtaggtccatctgtgcatgggcagcagtagtcaaaaagccaaggaaaaaacagagcagacctgaaggctaatcttatttttgccactaacttagtgaatgaccctaagcaagttccttctcctcttagggccttgtgccaagcctatgaaattggaggtggctttcctgctctaaagcattttgatgtctcattctgtgtttggtaacccctataaactggggcagaggaaaagaatgatggttcaaggccatacttcccttgaaccttgtgtggttcttgcctaactctgtggtttttggaccccatggggcccagacagagcacaggagcatgggctgcctctgagtgtggtgttgaacttcgggaggagcagggagccctgcaccttgtgtcctggcccacctgacctttggtgttctccggatccttttcagcccgaggcctgacagacgcgggcagtgatgagccctgttctggagtggaaagagcacgatagagcaccaggctaagaggcacgagatcaaggcggtagtcacttccgctctgcagctagcatttcaaccatatgtggatcctttcatttctcagctccctggattccttcccctaaattaggacctattatttacctgtaggtaagcaagctactgtagctcttctgaggtatctgccaggctgttttctgtagcctcagattgcctatctgcttagcctgagaacaggtagatgaaaactaaactgatgcctaggcccagggtcagtctcagatggaagctgggcctgggtggggaggctagcatgcgtggctccctgggtatttctgtcagtccccatggcaagcagtgatttagtaaaacaccccagagtcagggaagccaaccaccttgaaacctttagaacatctctgctttggagaaagacccagagatcaggcagaggtgcagattcaatcattactcataacctttgagagatggcaaatgggaggagtgttagtctttgttttggaattggaccattcttgcaaccaaaaggacttagagcagtttgctcataaagacatcctttattataaaaggaagtatttaaaggatgatagagaccatcagatagaagcagggaaggtagataacttttaggaccttgatgtgaggaaaagataaaatttaaacaataaatttgccacttagattttctagcagcaaagtccgaaaagatagttatatacaaaattctgttttctgaaaacaaaattgtgattcaccttcagaattggccattttttttgtgagtttccttgcatcaaggacactgagaaacacagtcattgtcttaggtgttctatgggaggaagtgaatagagcctttaggaacttcctggtcaagcttatggtgcttattttgatctgggccacttccctccttccagtcatgagtaatcatcaaggagcaagttggagtgtttcaggtgtatattttgtagaacccaaaagattggagccttaacaataaacatcagcactaagtgacctgttc

SEQ ID NO: 9458 - protein, 271 aa, Homo sapiens
MAGLEVLFASAAPAITCRQDALVCFLHWEVVTHGYFGLGVGDQPGPNDKKSELLPAGWNNNKDLYVLRYEYKDGSRKLLVKAITVESSMILNVLEYGSQQVADLTLNLDDYIDAEHLGDFHRTYKNSEELRSRIVSGIITPIHEQWEKANVSSPHREFPPATAREVDPLRIPPHHPHTSRQPPWCDPLGPFVVGGEDLDPFGPRRGGMIVDPLRSGFPRALIDPSSGLPNRLPPGAVPPGARFDPFGPIGTSPPGPNPDHLPPPGYDDMYL

SEQ ID NO: 9459 - DNA, 198 bp, Homo sapiens
cgcgggcacagcgtcctccaagaggccaccttgctgagaggcagacttcccatccacaaaatgggatgacaaaacggctcagagttgaaaccacttctccaaggagacacaactgctgcccgcagagctgaagctcctgacccactatcaaatttcaatcatttatttgcctaccccctttatgatttttaccacccg

SEQ ID NO: 9460 - protein, 42 aa, Homo sapiens
QNGSELKPLLQGDTTAARRAEAPDPLSNFNHLFAYPLYDFYH

SEQ ID NO: 9461 - DNA, 701 bp, Homo sapiens
gaggggccacgccccgctcgcactccctggcggaacctttcagtgctgcgctcgcgttgccaacccggcgcgcctcacgcagttgcgcccgctgttgggactacttccggcttccccgccccgccccgtccccgggcgtctccattttggtctcagacgccgaagtcgcgggcgctcatggcgggcctggaggtactgttcgcatcggcagcgccggccatcacctgcaggcaggacgcgctcgtctgcttcttgcattgggaagtggtgacacacggttacttcggcttgggtgtcggtgaccagccgggtcccaatgataagaagtcagaactgctgccagctgggtggaacaacaataaagacctgtatgtcctccggtatgagtataaggatgggtccagaaagctccttgtgaaagccatcaccgtggagagcagcatgatcctcaatgtgctggaatatggctcacagcaagtggcagacttgaccctgaacttggatgattatatcgatgcagaacacctgggtgacttccacaggacctacaagaacagtgaggagcttcggtctcgtattgtgtctggaatcatcacacctatccatgagcagtgggaaaaggctaatgtaagcagtccccaccgggagttcccccctgctaccgccagagaggtggacccactccggattcctccacacca

SEQ ID NO: 9462 - protein, 173 aa, Homo sapiens; identical to SEQ ID NO: 9456

SEQ ID NO: 9463 - DNA, 1396 bp, Homo sapiens
ctacttccggcttccccgccccgccccgtccccgggcgtctccattttggtctcaggtgtggactcggcaagaaccagcgcaagagggaagcagagttatagctaccccggccgcggagccggctcactgcactacccccgcccccttctttcctccagacgccgaagtcgcgggcgctcatggcgggcctggaggtactgttcgcatcggcagcgccggccatcacctgcaggcaggacgcgctcgtctgcttcttgcattgggaagtggtgacacacggttacttcggcttgggtgtcggtgaccagccgggtcccaatgataagaagtcagaactgctgccagctgggtggaacaacaataaagacctgtatgtcctccggtatgagtataaggatgggtccagaaagctccttgtgaaagccatcaccgtggagagcagcatgatcctcaatgtgctggaatatggctcacagcaagtggcagacttgaccctgaacttggatgattatatcgatgcagaacacctgggtgacttccacaggacctacaagaacagtgaggagcttcggtctcgtattgtgtctggaatcatcacacctatccatgagcagtgggaaaaggctaatgtaagcagtccccaccgggagttcccccctgctaccgccagagaggtggacccactccggattcctccacaccacccacacaccagtcggcagcctccctggtgtgatcccctgggcccgtttgttgtcgggggagaagacttagacccttttgggcctcggagaggtggcatgattgtggatcccctgagatctggcttcccaagagcacttattgacccttcctcaggcctcccgaaccgacttcctccaggcgctgtgcccccaggagctcgctttgacccctttggacccattgggaccagcccacccggacctaacccagaccatctccccccgccgggctacgatgacatgtacctgtgaaggcctcaagaatgtaacatcccaggcttccctccattctcctggagctgccaccgctgtccccatcagcaaccatgttcttgcaggctgggggcaagggattctgctcatgtgtttgcagaccggctgggatagcctccccaccccttatcagagccaagacacctgctgcagctctccacctagctgcagatagctcccaaagagaaatcagtgtgtctctttcaccatcagctcctcccctttcaccaccagctcctctccacttcccaagggagactccggcaaccttcagcaacatatatcctcgaccagatgcagtgctataagaacagaacgcattttggatgttattattaagaaccaaatgtcaatacagaattcatgttgccggtttccc

SEQ ID NO: 9464 - protein, 271 aa, Homo sapiens; identical to SEQ ID NO: 9458

SEQ ID NO: 9465 - DNA, 2046 bp, Homo sapiens
ctacttccggcttccccgccccgccccgtccccgggcgtctccattttggtctcaggtgtggactcggcaagaaccagcgcaagagggaagcagagttatagctaccccggccgcggagccggctcactgcactacccccgcccccttctttcctccagacgccgaagtcgcgggcgctcatggcgggcctggaggtactgttcgcatcggcagcgccggccatcacctgcaggcaggacgcgctcgtctgcttcttgcattgggaagtggtgacacacggttacttcggcttgggtgtcggtgaccagccgggtcccaatgataagaagtcagaactgctgccagctgggtggaacaacaataaagacctgtatgtcctccggtatgagtataaggatgggtccagaaagctccttgtgaaagccatcaccgtggagagcagcatgatcctcaatgtgctggaatatggctcacagcaagtggcagacttgaccctgaacttggatgattatatcgatgcagaacacctgggtgacttccacaggacctacaagaacagtgaggagcttcggtctcgtattgtgtctggaatcatcacacctatccatgagcagtgggaaaaggctaatgtaagcagtccccaccgggagttcccccctgctaccgccagagaggtggacccactccggattcctccacaccacccacacaccagtcggcagcctccctggtgtgatcccctgggcccgtttgttgtcgggggagaagacttagacccttttgggcctcggagaggtggcatgattgtggatcccctgagatctggcttcccaagagcacttattgacccttcctcaggcctcccgaaccgacttcctccaggcgctgtgcccccaggagctcgctttgacccctttggacccattgggaccagcccacccggcccgaggcctgacagacgcgggcagtgatgagccctgttctggagtggaaagagcacgatagagcaccaggctaagaggcacgagatcaaggcggtagtcacttccgctctgcagctagcatttcaaccatatgtggatcctttcatttctcagctccctggattccttcccctaaattaggacctattatttacctgtaggtaagcaagctactgtagctcttctgaggtatctgccaggctgttttctgtagcctcagattgcctatctgcttagcctgagaacaggtagatgaaaactaaactgatgcctaggcccagggtcagtctcagatggaagctgggcctgggtggggaggctagcatgcgtggctccctgggtatttctgtcagtccccatggcaagcagtgatttagtaaaacaccccagagtcagggaagccaaccaccttgaaacctttagaacatctctgctttggagaaagacccagagatcaggcagaggtgcagattcaatcattactcataacctttgagagatggcaaatgggaggagtgttagtctttgttttggaattggaccattcttgcaaccaaaaggacttagagcagtttgctcataaagacatcctttattataaaaggaagtatttaaaggatgatagagaccatcagatagaagcagggaaggtagataacttttaggaccttgatgtgaggaaaagataaaatttaaacaataaatttgccacttagattttctagcagcaaagtccgaaaagatagttatatacaaaattctgttttctgaaaacaaaattgtgattcaccttcagaattggccattttttttgtgagtttccttgcatcaaggacactgagaaacacagtcattgtcttaggtgttctatgggaggaagtgaatagagcctttaggaacttcctggtcaagcttatggtgcttattttgatctgggccacttccctccttccagtcatgagtaatcatcaaggagcaagttggagtgtttcaggtgtatattttgtagaacccaaaagattggagccttaacaataaacatcagcactaagtgacctgttc

SEQ ID NO: 9466 - protein, 263 aa, Homo sapiens
MAGLEVLFASAAPAITCRQDALVCFLHWEVVTHGYFGLGVGDQPGPNDKKSELLPAGWNNNKDLYVLRYEYKDGSRKLLVKAITVESSMILNVLEYGSQQVADLTLNLDDYIDAEHLGDFHRTYKNSEELRSRIVSGIITPIHEQWEKANVSSPHREFPPATAREVDPLRIPPHHPHTSRQPPWCDPLGPFVVGGEDLDPFGPRRGGMIVDPLRSGFPRALIDPSSGLPNRLPPGAVPPGARFDPFGPIGTSPPGPRPDRRGQ

SEQ ID NO: 9467 - DNA, 3244 bp, Homo sapiens
ctacttccggcttccccgccccgccccgtccccgggcgtctccattttggtctcaggtgtggactcggcaagaaccagcgcaagagggaagcagagttatagctaccccggccgcggagccggctcactgcactacccccgcccccttctttcctccagacgccgaagtcgcgggcgctcatggcgggcctggaggtactgttcgcatcggcagcgccggccatcacctgcaggcaggacgcgctcgtctgcttcttgcattgggaagtggtgacacacggttacttcggcttgggtgtcggtgaccagccgggtcccaatgataagaagtcagaactgctgccagctgggtggaacaacaataaagacctgtatgtcctccggtatgagtataaggatgggtccagaaagctccttgtgaaagccatcaccgtggagagcagcatgatcctcaatgtgctggaatatggctcacagcaagtggcagacttgaccctgaacttggatgattatatcgatgcagaacacctgggtgacttccacaggacctacaagaacagtgaggagcttcggtctcgtattgtgtctggaatcatcacacctatccatgagcagtgggaaaaggctaatgtaagcagtccccaccgggagttcccccctgctaccgccagagaggtggacccactccggattcctccacaccacccacacaccagtcggcagcctccctggtgtgatcccctgggcccgtttgttgtcgggggagaagacttagacccttttgggcctcggagaggtggcatgattgtggatcccctgagatctggcttcccaagagcacttattgacccttcctcaggcctcccgaaccgacttcctccaggcgctgtgcccccaggagctcgctttgacccctttggacccattgggaccagcccacccggacctaacccagaccatctccccccgccgggctacgatgacatgtacctgtgaaggcctcaagaatgtaacatcccaggcttccctccattctcctggagctgccaccgctgtccccatcagcaaccatgttcttgcaggctgggggcaagggattctgctcatgtgtttgcagaccggctgggatagcctccccaccccttatcagagccaagacacctgctgcagctctccacctagctgcagatagctcccaaagagaaatcagtgtgtctctttcaccatcagctcctcccctttcaccaccagctcctctccacttcccaagggagactccggcaaccttcagcaacatatatcctcgaccagatgcagtgctataagaacagaacgcattttggatgttattattaagaaccaaatgtcaatacagaattcatgttgccggtttcccacttttctttttacattaatgcatagctgcttccatttatgagactttagagtttgagtttctgtagggctgaatgactctttttcctgcccagggcccattcttgcttctcaggcaccttccgtttattaattgccattgctcctgacatcactaagatgggtccccttctggctgcatgaatggaaatgagtgactggaaatcccataggccacaagaatgactttcacaagggcaggaacattgtggaaagactgcatcattctgatgaggcaaaatcctccagctattcctgtctgggccagttttgtaggtccatctgtgcatgggcagcagtagtcaaaaagccaaggaaaaaacagagcagacctgaaggctaatcttatttttgccactaacttagtgaatgaccctaagcaagttccttctcctcttagggccttgtgccaagcctatgaaattggaggtggctttcctgctctaaagcattttgatgtctcattctgtgtttggtaacccctataaactggggcagaggaaaagaatgatggttcaaggccatacttcccttgaaccttgtgtggttcttgcctaactctgtggtttttggaccccatggggcccagacagagcacaggagcatgggctgcctctgagtgtggtgttgaacttcgggaggagcagggagccctgcaccttgtgtcctggcccacctgacctttggtgttctccggatccttttcagcccgaggcctgacagacgcgggcagtgatgagccctgttctggagtggaaagagcacgatagagcaccaggctaagaggcacgagatcaaggcggtagtcacttccgctctgcagctagcatttcaaccatatgtggatcctttcatttctcagctccctggattccttcccctaaattaggacctattatttacctgtaggtaagcaagctactgtagctcttctgaggtatctgccaggctgttttctgtagcctcagattgcctatctgcttagcctgagaacaggtagatgaaaactaaactgatgcctaggcccagggtcagtctcagatggaagctgggcctgggtggggaggctagcatgcgtggctccctgggtatttctgtcagtccccatggcaagcagtgatttagtaaaacaccccagagtcagggaagccaaccaccttgaaacctttagaacatctctgctttggagaaagacccagagatcaggcagaggtgcagattcaatcattactcataacctttgagagatggcaaatgggaggagtgttagtctttgttttggaattggaccattcttgcaaccaaaaggacttagagcagtttgctcataaagacatcctttattataaaaggaagtatttaaaggatgatagagaccatcagatagaagcagggaaggtagataacttttaggaccttgatgtgaggaaaagataaaatttaaacaataaatttgccacttagattttctagcagcaaagtccgaaaagatagttatatacaaaattctgttttctgaaaacaaaattgtgattcaccttcagaattggccattttttttgtgagtttccttgcatcaaggacactgagaaacacagtcattgtcttaggtgttctatgggaggaagtgaatagagcctttaggaacttcctggtcaagcttatggtgcttattttgatctgggccacttccctccttccagtcatgagtaatcatcaaggagcaagttggagtgtttcaggtgtatattttgtagaacccaaaagattggagccttaacaataaacatcagcactaagtgacctgttc

SEQ ID NO: 9468 - protein, 271 aa, Homo sapiens; identical to SEQ ID NO: 9458

SEQ ID NO: 9469 - DNA, 4910 bp, Homo sapiens
ctacttccggcttccccgccccgccccgtccccgggcgtctccattttggtctcaggtgtggactcggcaagaaccagcgcaagagggaagcagagttatagctaccccggccgcggagccggctcactgcactacccccgcccccttctttcctccagacgccgaagtcgcgggcgctcatggcgggcctggaggtactgttcgcatcggcagcgccggccatcacctgcaggcaggacgcgctcgtctgcttcttgcattgggaagtggtgacacacggttacttcggcttgggtgtcggtgaccagccgggtcccaatgataagaagtcagaactgctgccagctgggtggaacaacaataaagacctgtatgtcctccggtatgagtataaggatgggtccagaaagctccttgtgaaagccatcaccgtggagagcagcatgatcctcaatgtgctggaatatggctcacagcaagtggcagacttgaccctgaacttggatgattatatcgatgcagaacacctgggtgacttccacaggacctacaagaacagtgaggagcttcggtctcgtattgtgtctggaatcatcacacctatccatgagcagtgggaaaaggctaatgtaagcagtccccaccgggagttcccccctgctaccgccagagaggtggacccactccggattcctccacaccacccacacaccagtcggcagcctccctggtgtgatcccctgggcccgtttgttgtcgggggagaagacttagacccttttgggcctcggagaggtggcatgattgtggatcccctgagatctggcttcccaagagcacttattgacccttcctcaggcctcccgaaccgacttcctccaggcgctgtgcccccaggagctcgctttgacccctttggacccattgggaccagcccacccggacctaacccagaccatctccccccgccgggctacgatgacatgtacctgtgaaggcctcaagaatgtaacatcccaggcttccctccattctcctggagctgccaccgctgtccccatcagcaaccatgttcttgcaggctgggggcaagggattctgctcatgtgtttgcagaccggctgggatagcctccccaccccttatcagagccaagacacctgctgcagctctccacctagctgcagatagctcccaaagagaaatcagtgtgtctctttcaccatcagctcctcccctttcaccaccagctcctctccacttcccaagggagactccggcaaccttcagcaacatatatcctcgaccagatgcagtgctataagaacagaacgcattttggatgttattattaagaaccaaatgtcaatacagaattcatgttgccggtttcccacttttctttttacattaatgcatagctgcttccatttatgagactttagagtttgagtttctgtagggctgaatgactctttttcctgcccagggcccattcttgcttctcaggcaccttccgtttattaattgccattgctcctgacatcactaagatgggtccccttctggctgcatgaatggaaatgagtgactggaaatcccataggccacaagaatgactttcacaagggcaggaacattgtggaaagactgcatcattctgatgaggcaaaatcctccagctattcctgtctgggccagttttgtaggtccatctgtgcatgggcagcagtagtcaaaaagccaaggaaaaaacagagcagacctgaaggctaatcttatttttgccactaacttagtgaatgaccctaagcaagttccttctcctcttagggccttgtgccaagcctatgaaattggaggtggctttcctgctctaaagcattttgatgtctcattctgtgtttggtaacccctataaactggggcagaggaaaagaatgatggttcaaggccatacttcccttgaaccttgtgtggttcttgcctaactctgtggtttttggaccccatggggcccagacagagcacaggagcatgggctgcctctgagtgtggtgttgaacttcgggaggagcagggagccctgcaccttgtgtcctggcccacctgacctttggtgttctccggatccttttcagcccgaggcctgacagacgcgggcagtgatgagccctgttctggagtggaaagagcacgatagagcaccaggctaagaggcacgagatcaaggcggtagtcacttccgctctgcagctagcatttcaaccatatgtggatcctttcatttctcagctccctggattccttcccctaaattaggacctattatttacctgtaggtaagcaagctactgtagctcttctgaggtatctgccaggctgttttctgtagcctcagattgcctatctgcttagcctgagaacaggtagatgaaaactaaactgatgcctaggcccagggtcagtctcagatggaagctgggcctgggtggggaggctagcatgcgtggctccctgggtatttctgtcagtccccatggcaagcagtgatttagtaaaacaccccagagtcagggaagccaaccaccttgaaacctttagaacatctctgctttggagaaagacccagagatcaggcagaggtgcagattcaatcattactcataacctttgagagatggcaaatgggaggagtgttagtctttgttttggaattggaccattcttgcaaccaaaaggacttagagcagtttgctcataaagacatcctttattataaaaggaagtatttaaaggatgatagagaccatcagatagaagcagggaaggtagataacttttaggaccttgatgtgaggaaaagataaaatttaaacaataaatttgccacttagattttctagcagcaaagtccgaaaagatagttatatacaaaattctgttttctgaaaacaaaattgtgattcaccttcagaattggccattttttttgtgagtttccttgcatcaaggacactgagaaacacagtcattgtcttaggtgttctatgggaggaagtgaatagagcctttaggaacttcctggtcaagcttatggtgcttattttgatctgggccacttccctccttccagtcatgagtaatcatcaaggagcaagttggagtgtttcaggtgtatattttgtagaacccaaaagattggagccttaacaataaacatcagcactaagtgacctgttcctccttttttaaatagcagctttattgagatataatttacatacccataatttacatacctgtttaaagtatacaattcagtggatttagtatgttcacagtgttgcacatccaccaccatttctaattcctgaacattttcaccacctcaaaaagaaaccacacacccattggcatgactccccattcccttgctcccagccccaggcaaccactaacatctgtctctaaagattttttttttttttctggacagttctcataagtggaatcactcagtattatggccttttgtgtctggcttctttcatttcatgtgatgttttcaagattcattcatgctgtagcatgtatccatggtatggatatatcacattttgcttatccttttatcagttgatggacagttgggttgtttctacaaaaaggctattatgagtaatgcagccaagaacatttgtgtaccagtttttgagttttcagttgtttgagtttcagatgttttcagttcatttgggtatataccaaggagtggaattgctggttcacatggtagctctatattctactttgtgaggaattgtcagactgttttccacggaagctgcaccattttacatttccactggtaatttatgagggttccagtttccccacatcttcaccaactcttgttatttttcatgcttatggccatcctagttagcgtgaagtagcatctcattgtggtcttctcttccattttttaaaaaagaattttgacctacaccaagcaaggcagagaccagagtcagtcccccttggggagcaatctgtggttttgataatcaccaccttgggatgaacatggctggtgagctgcagagcagttgatttgacttttggggatggttctaggctggatgtgatacagggcaggttttgtctctagagaaagttctcatgaccttcaggtctaatgagattcagatcatcactttggtttggtttgaaatttctttgtttatccagtgaattacaagtagaataaagatctggttctaaattgtcttttggtggtgaagtgccatagaccatttcggaccatttctatgatgtaccagcagcccccacatcacacctcctcttccttggcttgtctcttccccaattcttagagttagcagtgtttcttactgcattcatctcctcagtcataagtgtctgtcaacctccgttgtgaagtcatgagtctcttgagactgaaactccaagaatgtattgtgctcacagtggcgatggtgttcctgtgctggatggtcagtggttgttgacatgtagttagaaaataggtagcaagttccacgcagcctcactctttggaacctagtttctcctatggcctccctttctactgttgttaataacattctattaatgatccatgcctctcttcacaggaggaatattagaatctatggagcagttagtattctttgtcacctaaatttgtctacttctgtacatttccaataaggcaccaccagggcaagggaagattccccacatgtatatccccagctgtttctgtcataaaacttgcatgtgtataaaccactattgactttttgcaccaaaggagatattcaaggacagacatccaagtccccagccctttattgccctt

SEQ ID NO: 9470 - protein, 271 aa, Homo sapiens; identical to SEQ ID NO: 9458

SEQ ID NO: 9471 - DNA, 3712 bp, Homo sapiens
ctacttccggcttccccgccccgccccgtccccgggcgtctccattttggtctcaggtgtggactcggcaagaaccagcgcaagagggaagcagagttatagctaccccggccgcggagccggctcactgcactacccccgcccccttctttcctccagacgccgaagtcgcgggcgctcatggcgggcctggaggtactgttcgcatcggcagcgccggccatcacctgcaggcaggacgcgctcgtctgcttcttgcattgggaagtggtgacacacggttacttcggcttgggtgtcggtgaccagccgggtcccaatgataagaagtcagaactgctgccagctgggtggaacaacaataaagacctgtatgtcctccggtatgagtataaggatgggtccagaaagctccttgtgaaagccatcaccgtggagagcagcatgatcctcaatgtgctggaatatggctcacagcaagtggcagacttgaccctgaacttggatgattatatcgatgcagaacacctgggtgacttccacaggacctacaagaacagtgaggagcttcggtctcgtattgtgtctggaatcatcacacctatccatgagcagtgggaaaaggctaatgtaagcagtccccaccgggagttcccccctgctaccgccagagaggtggacccactccggattcctccacaccacccacacaccagtcggcagcctccctggtgtgatcccctgggcccgtttgttgtcgggggagaagacttagacccttttgggcctcggagaggtggcatgattgtggatcccctgagatctggcttcccaagagcacttattgacccttcctcaggcctcccgaaccgacttcctccaggcgctgtgcccccaggagctcgctttgacccctttggacccattgggaccagcccacccggcccgaggcctgacagacgcgggcagtgatgagccctgttctggagtggaaagagcacgatagagcaccaggctaagaggcacgagatcaaggcggtagtcacttccgctctgcagctagcatttcaaccatatgtggatcctttcatttctcagctccctggattccttcccctaaattaggacctattatttacctgtaggtaagcaagctactgtagctcttctgaggtatctgccaggctgttttctgtagcctcagattgcctatctgcttagcctgagaacaggtagatgaaaactaaactgatgcctaggcccagggtcagtctcagatggaagctgggcctgggtggggaggctagcatgcgtggctccctgggtatttctgtcagtccccatggcaagcagtgatttagtaaaacaccccagagtcagggaagccaaccaccttgaaacctttagaacatctctgctttggagaaagacccagagatcaggcagaggtgcagattcaatcattactcataacctttgagagatggcaaatgggaggagtgttagtctttgttttggaattggaccattcttgcaaccaaaaggacttagagcagtttgctcataaagacatcctttattataaaaggaagtatttaaaggatgatagagaccatcagatagaagcagggaaggtagataacttttaggaccttgatgtgaggaaaagataaaatttaaacaataaatttgccacttagattttctagcagcaaagtccgaaaagatagttatatacaaaattctgttttctgaaaacaaaattgtgattcaccttcagaattggccattttttttgtgagtttccttgcatcaaggacactgagaaacacagtcattgtcttaggtgttctatgggaggaagtgaatagagcctttaggaacttcctggtcaagcttatggtgcttattttgatctgggccacttccctccttccagtcatgagtaatcatcaaggagcaagttggagtgtttcaggtgtatattttgtagaacccaaaagattggagccttaacaataaacatcagcactaagtgacctgttcctccttttttaaatagcagctttattgagatataatttacatacccataatttacatacctgtttaaagtatacaattcagtggatttagtatgttcacagtgttgcacatccaccaccatttctaattcctgaacattttcaccacctcaaaaagaaaccacacacccattggcatgactccccattcccttgctcccagccccaggcaaccactaacatctgtctctaaagattttttttttttttctggacagttctcataagtggaatcactcagtattatggccttttgtgtctggcttctttcatttcatgtgatgttttcaagattcattcatgctgtagcatgtatccatggtatggatatatcacattttgcttatccttttatcagttgatggacagttgggttgtttctacaaaaaggctattatgagtaatgcagccaagaacatttgtgtaccagtttttgagttttcagttgtttgagtttcagatgttttcagttcatttgggtatataccaaggagtggaattgctggttcacatggtagctctatattctactttgtgaggaattgtcagactgttttccacggaagctgcaccattttacatttccactggtaatttatgagggttccagtttccccacatcttcaccaactcttgttatttttcatgcttatggccatcctagttagcgtgaagtagcatctcattgtggtcttctcttccattttttaaaaaagaattttgacctacaccaagcaaggcagagaccagagtcagtcccccttggggagcaatctgtggttttgataatcaccaccttgggatgaacatggctggtgagctgcagagcagttgatttgacttttggggatggttctaggctggatgtgatacagggcaggttttgtctctagagaaagttctcatgaccttcaggtctaatgagattcagatcatcactttggtttggtttgaaatttctttgtttatccagtgaattacaagtagaataaagatctggttctaaattgtcttttggtggtgaagtgccatagaccatttcggaccatttctatgatgtaccagcagcccccacatcacacctcctcttccttggcttgtctcttccccaattcttagagttagcagtgtttcttactgcattcatctcctcagtcataagtgtctgtcaacctccgttgtgaagtcatgagtctcttgagactgaaactccaagaatgtattgtgctcacagtggcgatggtgttcctgtgctggatggtcagtggttgttgacatgtagttagaaaataggtagcaagttccacgcagcctcactctttggaacctagtttctcctatggcctccctttctactgttgttaataacattctattaatgatccatgcctctcttcacaggaggaatattagaatctatggagcagttagtattctttgtcacctaaatttgtctacttctgtacatttccaataaggcaccaccagggcaagggaagattccccacatgtatatccccagctgtttctgtcataaaacttgcatgtgtataaaccactattgactttttgcaccaaaggagatattcaaggacagacatccaagtccccagccctttattgccctt

SEQ ID NO: 9472 - protein, 263 aa, Homo sapiens; identical to SEQ ID NO: 9466

SEQ ID NO: 9473 - DNA, 1932 bp, Homo sapiens
tacttccggcttccccgccccgccccgtccccgggcgtctccattttggtctcaggtgtggactcggcaagaaccagcgcaagagggaagcagagttatagctaccccggccgcggagccggctcactgcactacccccgcccccttctttcctccagacgccgaagtcgcgggcgctcatggcgggcctggaggtactgttcgcatcggcagcgccggccatcacctgcaggcaggacgcgctcgtctgcttcttgcattgggaagtggtgacacacggttacttcggcttgggtgtcggtgaccagccgggtcccaatgataagaagtcagaactgctgccagctgggtggaacaacaataaagacctgtatgtcctccggtatgagtataaggatgggtccagaaagctccttgtgaaagccatcaccgtggagagcagcatgatcctcaatgtgctggaatatggctcacagcaagtggcagacttgaccctgaacttggatgattatatcgatgcagaacacctgggtgacttccacaggacctacaagaacagtgaggagcttcggtctcgtattgtgtctggaatcatcacacctatccatgagcagtgggaaaaggctaatgtaagcagtccccaccgggagttcccccctgctaccgccagagcctcggagaggtggcatgattgtggatcccctgagatctggcttcccaagagcacttattgacccttcctcaggcctcccgaaccgacttcctccaggcgctgtgcccccaggagctcgctttgacccctttggacccattgggaccagcccacccggcccgaggcctgacagacgcgggcagtgatgagccctgttctggagtggaaagagcacgatagagcaccaggctaagaggcacgagatcaaggcggtagtcacttccgctctgcagctagcatttcaaccatatgtggatcctttcatttctcagctccctggattccttcccctaaattaggacctattatttacctgtaggtaagcaagctactgtagctcttctgaggtatctgccaggctgttttctgtagcctcagattgcctatctgcttagcctgagaacaggtagatgaaaactaaactgatgcctaggcccagggtcagtctcagatggaagctgggcctgggtggggaggctagcatgcgtggctccctgggtatttctgtcagtccccatggcaagcagtgatttagtaaaacaccccagagtcagggaagccaaccaccttgaaacctttagaacatctctgctttggagaaagacccagagatcaggcagaggtgcagattcaatcattactcataacctttgagagatggcaaatgggaggagtgttagtctttgttttggaattggaccattcttgcaaccaaaaggacttagagcagtttgctcataaagacatcctttattataaaaggaagtatttaaaggatgatagagaccatcagatagaagcagggaaggtagataacttttaggaccttgatgtgaggaaaagataaaatttaaacaataaatttgccacttagattttctagcagcaaagtccgaaaagatagttatatacaaaattctgttttctgaaaacaaaattgtgattcaccttcagaattggccattttttttgtgagtttccttgcatcaaggacactgagaaacacagtcattgtcttaggtgttctatgggaggaagtgaatagagcctttaggaacttcctggtcaagcttatggtgcttattttgatctgggccacttccctccttccagtcatgagtaatcatcaaggagcaagttggagtgtttcaggtgtatattttgtagaacccaaaagattggagccttaacaataaacatcagcactaagtgacctgttc

SEQ ID NO: 9474 - protein, 184 aa, Homo sapiens
MAGLEVLFASAAPAITCRQDALVCFLHWEVVTHGYFGLGVGDQPGPNDKKSELLPAGWNNNKDLYVLRYEYKDGSRKLLVKAITVESSMILNVLEYGSQQVADLTLNLDDYIDAEHLGDFHRTYKNSEELRSRIVSGIITPIHEQWEKANVSSPHREFPPATARASERWHDCGSPEIWLPKSTY

SEQ ID NO: 9475 - DNA, 3598 bp, Homo sapiens
tacttccggcttccccgccccgccccgtccccgggcgtctccattttggtctcaggtgtggactcggcaagaaccagcgcaagagggaagcagagttatagctaccccggccgcggagccggctcactgcactacccccgcccccttctttcctccagacgccgaagtcgcgggcgctcatggcgggcctggaggtactgttcgcatcggcagcgccggccatcacctgcaggcaggacgcgctcgtctgcttcttgcattgggaagtggtgacacacggttacttcggcttgggtgtcggtgaccagccgggtcccaatgataagaagtcagaactgctgccagctgggtggaacaacaataaagacctgtatgtcctccggtatgagtataaggatgggtccagaaagctccttgtgaaagccatcaccgtggagagcagcatgatcctcaatgtgctggaatatggctcacagcaagtggcagacttgaccctgaacttggatgattatatcgatgcagaacacctgggtgacttccacaggacctacaagaacagtgaggagcttcggtctcgtattgtgtctggaatcatcacacctatccatgagcagtgggaaaaggctaatgtaagcagtccccaccgggagttcccccctgctaccgccagagcctcggagaggtggcatgattgtggatcccctgagatctggcttcccaagagcacttattgacccttcctcaggcctcccgaaccgacttcctccaggcgctgtgcccccaggagctcgctttgacccctttggacccattgggaccagcccacccggcccgaggcctgacagacgcgggcagtgatgagccctgttctggagtggaaagagcacgatagagcaccaggctaagaggcacgagatcaaggcggtagtcacttccgctctgcagctagcatttcaaccatatgtggatcctttcatttctcagctccctggattccttcccctaaattaggacctattatttacctgtaggtaagcaagctactgtagctcttctgaggtatctgccaggctgttttctgtagcctcagattgcctatctgcttagcctgagaacaggtagatgaaaactaaactgatgcctaggcccagggtcagtctcagatggaagctgggcctgggtggggaggctagcatgcgtggctccctgggtatttctgtcagtccccatggcaagcagtgatttagtaaaacaccccagagtcagggaagccaaccaccttgaaacctttagaacatctctgctttggagaaagacccagagatcaggcagaggtgcagattcaatcattactcataacctttgagagatggcaaatgggaggagtgttagtctttgttttggaattggaccattcttgcaaccaaaaggacttagagcagtttgctcataaagacatcctttattataaaaggaagtatttaaaggatgatagagaccatcagatagaagcagggaaggtagataacttttaggaccttgatgtgaggaaaagataaaatttaaacaataaatttgccacttagattttctagcagcaaagtccgaaaagatagttatatacaaaattctgttttctgaaaacaaaattgtgattcaccttcagaattggccattttttttgtgagtttccttgcatcaaggacactgagaaacacagtcattgtcttaggtgttctatgggaggaagtgaatagagcctttaggaacttcctggtcaagcttatggtgcttattttgatctgggccacttccctccttccagtcatgagtaatcatcaaggagcaagttggagtgtttcaggtgtatattttgtagaacccaaaagattggagccttaacaataaacatcagcactaagtgacctgttcctccttttttaaatagcagctttattgagatataatttacatacccataatttacatacctgtttaaagtatacaattcagtggatttagtatgttcacagtgttgcacatccaccaccatttctaattcctgaacattttcaccacctcaaaaagaaaccacacacccattggcatgactccccattcccttgctcccagccccaggcaaccactaacatctgtctctaaagattttttttttttttctggacagttctcataagtggaatcactcagtattatggccttttgtgtctggcttctttcatttcatgtgatgttttcaagattcattcatgctgtagcatgtatccatggtatggatatatcacattttgcttatccttttatcagttgatggacagttgggttgtttctacaaaaaggctattatgagtaatgcagccaagaacatttgtgtaccagtttttgagttttcagttgtttgagtttcagatgttttcagttcatttgggtatataccaaggagtggaattgctggttcacatggtagctctatattctactttgtgaggaattgtcagactgttttccacggaagctgcaccattttacatttccactggtaatttatgagggttccagtttccccacatcttcaccaactcttgttatttttcatgcttatggccatcctagttagcgtgaagtagcatctcattgtggtcttctcttccattttttaaaaaagaattttgacctacaccaagcaaggcagagaccagagtcagtcccccttggggagcaatctgtggttttgataatcaccaccttgggatgaacatggctggtgagctgcagagcagttgatttgacttttggggatggttctaggctggatgtgatacagggcaggttttgtctctagagaaagttctcatgaccttcaggtctaatgagattcagatcatcactttggtttggtttgaaatttctttgtttatccagtgaattacaagtagaataaagatctggttctaaattgtcttttggtggtgaagtgccatagaccatttcggaccatttctatgatgtaccagcagcccccacatcacacctcctcttccttggcttgtctcttccccaattcttagagttagcagtgtttcttactgcattcatctcctcagtcataagtgtctgtcaacctccgttgtgaagtcatgagtctcttgagactgaaactccaagaatgtattgtgctcacagtggcgatggtgttcctgtgctggatggtcagtggttgttgacatgtagttagaaaataggtagcaagttccacgcagcctcactctttggaacctagtttctcctatggcctccctttctactgttgttaataacattctattaatgatccatgcctctcttcacaggaggaatattagaatctatggagcagttagtattctttgtcacctaaatttgtctacttctgtacatttccaataaggcaccaccagggcaagggaagattccccacatgtatatccccagctgtttctgtcataaaacttgcatgtgtataaaccactattgactttttgcaccaaaggagatattcaaggacagacatccaagtccccagccctttattgccctt

SEQ ID NO: 9476 - protein, 184 aa, Homo sapiens; identical to SEQ ID NO: 9474

SEQ ID NO: 9477 - DNA, 613 bp, Homo sapiens
ggcttccccgccccgccccgtccccgggcgtctccattttggtctcaggtgtggactcggcaagaaccagcgcaagagggaagcagagttatagctaccccggccgcggagccggctcactgcactacccccgcccccttctttcctccagacgccgaagtcgcgggcgctcatggcgggcctggaggtactgttcgcatcggcagcgccggccatcacctgcaggcaggacgcgctcgtctgcttcttgcattgggaagtggtgacacacggttacttcggcttgggtgtcggtgaccagccgggtcccaatgataagaagtcagaactgctgccagctgggtggaacaacaataaagacctgtatgtcctccggtatgagtataaggatgggtccagaaagctccttgtgaaagccatcaccgtggagagcagcatgatcctcaatgtgctggacctacaagaacagtgaggagcttcggtctcgtattgtgtctggaatcatcacacctatccatgagcagtgggaaaaggctaatgtaagcagtccccaccgggagttcccccctgctaccgccagagaggtggacccactccggattcctccacacca

SEQ ID NO: 9478 - protein, 99 aa, Homo sapiens
MAGLEVLFASAAPAITCRQDALVCFLHWEVVTHGYFGLGVGDQPGPNDKKSELLPAGWNNNKDLYVLRYEYKDGSRKLLVKAITVESSMILNVLDLQEQ

SEQ ID NO: 9479 - DNA, 521 bp, Homo sapiens
ggcttccccgccccgccccgtccccgggcgtctccattttggtctcaggtgtggactcggcaagaaccagcgcaagagggaagcagagttatagctaccccggccgcggagccggctcactgcactacccccgcccccttctttcctccagacgccgaagtcgcgggcgctcatggcgggcctggaggtactgttcgcatcggcagcgccggccatcacctgcaggcaggacgcgctcgtctgcttcttgcattgggaagtggtgacacacggttacttcggcttgggtgtcggtgaccagtccacctagctgcagatagctcccaaagagaaatcagtgtgtctctttcaccatcagctcctcccctttcaccaccagctcctctccacttcccaagggagactccggcaaccttcagcaacatatatcctcgaccagatgcagtgctataagaacagaacgcattttggatgttattattaagaaccaaatgtcaatacagaattcatgttgccggttt

SEQ ID NO: 9480 - protein, 45 aa, Homo sapiens
MAGLEVLFASAAPAITCRQDALVCFLHWEVVTHGYFGLGVGDQST

SEQ ID NO: 9481 - DNA, 1274 bp, Homo sapiens
ggcttccccgccccgccccgtccccgggcgtctccattttggtctcaggtgtggactcggcaagaaccagcgcaagagggaagcagagttatagctaccccggccgcggagccggctcactgcactacccccgcccccttctttcctccagacgccgaagtcgcgggcgctcatggcgggcctggagccgggtcccaatgataagaagtcagaactgctgccagctgggtggaacaacaataaagacctgtatgtcctccggtatgagtataaggatgggtccagaaagctccttgtgaaagccatcaccgtggagagcagcatgatcctcaatgtgctggaatatggctcacagcaagtggcagacttgaccctgaacttggatgattatatcgatgcagaacacctgggtgacttccacaggacctacaagaacagtgaggagcttcggtctcgtattgtgtctggaatcatcacacctatccatgagcagtgggaaaaggctaatgtaagcagtccccaccgggagttcccccctgctaccgccagagaggtggacccactccggattcctccacaccacccacacaccagtcggcagcctccctggtgtgatcccctgggcccgtttgttgtcgggggagaagacttagacccttttgggcctcggagaggtggcatgattgtggatcccctgagatctggcttcccaagagcacttattgacccttcctcaggcctcccgaaccgacttcctccaggcgctgtgcccccaggagctcgctttgacccctttggacccattgggaccagcccacccggacctaacccagaccatctccccccgccgggctacgatgacatgtacctgtgaaggcctcaagaatgtaacatcccaggcttccctccattctcctggagctgccaccgctgtccccatcagcaaccatgttcttgcaggctgggggcaagggattctgctcatgtgtttgcagaccggctgggatagcctccccaccccttatcagagccaagacacctgctgcagctctccacctagctgcagatagctcccaaagagaaatcagtgtgtctctttcaccatcagctcctcccctttcaccaccagctcctctccacttcccaagggagactccggcaaccttcagcaacatatatcctcgaccagatgcagtgctataagaacagaacgcattttggatgttattattaagaaccaaatgtcaatacagaattcatgttgccggtttccc

SEQ ID NO: 9482 - protein, 233 aa, Homo sapiens
MAGLEPGPNDKKSELLPAGWNNNKDLYVLRYEYKDGSRKLLVKAITVESSMILNVLEYGSQQVADLTLNLDDYIDAEHLGDFHRTYKNSEELRSRIVSGIITPIHEQWEKANVSSPHREFPPATAREVDPLRIPPHHPHTSRQPPWCDPLGPFVVGGEDLDPFGPRRGGMIVDPLRSGFPRALIDPSSGLPNRLPPGAVPPGARFDPFGPIGTSPPGPNPDHLPPPGYDDMYL

SEQ ID NO: 9483 - DNA, 3122 bp, Homo sapiens
ggcttccccgccccgccccgtccccgggcgtctccattttggtctcaggtgtggactcggcaagaaccagcgcaagagggaagcagagttatagctaccccggccgcggagccggctcactgcactacccccgcccccttctttcctccagacgccgaagtcgcgggcgctcatggcgggcctggagccgggtcccaatgataagaagtcagaactgctgccagctgggtggaacaacaataaagacctgtatgtcctccggtatgagtataaggatgggtccagaaagctccttgtgaaagccatcaccgtggagagcagcatgatcctcaatgtgctggaatatggctcacagcaagtggcagacttgaccctgaacttggatgattatatcgatgcagaacacctgggtgacttccacaggacctacaagaacagtgaggagcttcggtctcgtattgtgtctggaatcatcacacctatccatgagcagtgggaaaaggctaatgtaagcagtccccaccgggagttcccccctgctaccgccagagaggtggacccactccggattcctccacaccacccacacaccagtcggcagcctccctggtgtgatcccctgggcccgtttgttgtcgggggagaagacttagacccttttgggcctcggagaggtggcatgattgtggatcccctgagatctggcttcccaagagcacttattgacccttcctcaggcctcccgaaccgacttcctccaggcgctgtgcccccaggagctcgctttgacccctttggacccattgggaccagcccacccggacctaacccagaccatctccccccgccgggctacgatgacatgtacctgtgaaggcctcaagaatgtaacatcccaggcttccctccattctcctggagctgccaccgctgtccccatcagcaaccatgttcttgcaggctgggggcaagggattctgctcatgtgtttgcagaccggctgggatagcctccccaccccttatcagagccaagacacctgctgcagctctccacctagctgcagatagctcccaaagagaaatcagtgtgtctctttcaccatcagctcctcccctttcaccaccagctcctctccacttcccaagggagactccggcaaccttcagcaacatatatcctcgaccagatgcagtgctataagaacagaacgcattttggatgttattattaagaaccaaatgtcaatacagaattcatgttgccggtttcccacttttctttttacattaatgcatagctgcttccatttatgagactttagagtttgagtttctgtagggctgaatgactctttttcctgcccagggcccattcttgcttctcaggcaccttccgtttattaattgccattgctcctgacatcactaagatgggtccccttctggctgcatgaatggaaatgagtgactggaaatcccataggccacaagaatgactttcacaagggcaggaacattgtggaaagactgcatcattctgatgaggcaaaatcctccagctattcctgtctgggccagttttgtaggtccatctgtgcatgggcagcagtagtcaaaaagccaaggaaaaaacagagcagacctgaaggctaatcttatttttgccactaacttagtgaatgaccctaagcaagttccttctcctcttagggccttgtgccaagcctatgaaattggaggtggctttcctgctctaaagcattttgatgtctcattctgtgtttggtaacccctataaactggggcagaggaaaagaatgatggttcaaggccatacttcccttgaaccttgtgtggttcttgcctaactctgtggtttttggaccccatggggcccagacagagcacaggagcatgggctgcctctgagtgtggtgttgaacttcgggaggagcagggagccctgcaccttgtgtcctggcccacctgacctttggtgttctccggatccttttcagcccgaggcctgacagacgcgggcagtgatgagccctgttctggagtggaaagagcacgatagagcaccaggctaagaggcacgagatcaaggcggtagtcacttccgctctgcagctagcatttcaaccatatgtggatcctttcatttctcagctccctggattccttcccctaaattaggacctattatttacctgtaggtaagcaagctactgtagctcttctgaggtatctgccaggctgttttctgtagcctcagattgcctatctgcttagcctgagaacaggtagatgaaaactaaactgatgcctaggcccagggtcagtctcagatggaagctgggcctgggtggggaggctagcatgcgtggctccctgggtatttctgtcagtccccatggcaagcagtgatttagtaaaacaccccagagtcagggaagccaaccaccttgaaacctttagaacatctctgctttggagaaagacccagagatcaggcagaggtgcagattcaatcattactcataacctttgagagatggcaaatgggaggagtgttagtctttgttttggaattggaccattcttgcaaccaaaaggacttagagcagtttgctcataaagacatcctttattataaaaggaagtatttaaaggatgatagagaccatcagatagaagcagggaaggtagataacttttaggaccttgatgtgaggaaaagataaaatttaaacaataaatttgccacttagattttctagcagcaaagtccgaaaagatagttatatacaaaattctgttttctgaaaacaaaattgtgattcaccttcagaattggccattttttttgtgagtttccttgcatcaaggacactgagaaacacagtcattgtcttaggtgttctatgggaggaagtgaatagagcctttaggaacttcctggtcaagcttatggtgcttattttgatctgggccacttccctccttccagtcatgagtaatcatcaaggagcaagttggagtgtttcaggtgtatattttgtagaacccaaaagattggagccttaacaataaacatcagcactaagtgacctgttc

SEQ ID NO: 9484 - protein, 233 aa, Homo sapiens; identical to SEQ ID NO: 9482

SEQ ID NO: 9485 - DNA, 3153 bp, Homo sapiens
ggcttccccgccccgccccgtccccgggcgtctccattttggtctcaggtgtggactcggcaagaaccagcgcaagagggaagcagagttatagctaccccggccgcggagccggctcactgcactacccccgcccccttctttcctccagacgccgaagtcgcgggcgctcatggcgggcctggaggtactgttcgcatcggcagcgccggccatcacctgcaggcaggacgcgctcgtctgcttcttgcattgggaagtggtgacacacggttacttcggcttgggtgtcggtgaccagccgggtcccaatgataagaagtcagaactgctgccagctgggtggaacaacaataaagacctgtatgtcctccggtatgagtataaggatgggtccagaaagctccttgtgaaagccatcaccgtggagagcagcatgatcctcaatgtgctggacctacaagaacagtgaggagcttcggtctcgtattgtgtctggaatcatcacacctatccatgagcagtgggaaaaggctaatgtaagcagtccccaccgggagttcccccctgctaccgccagagaggtggacccactccggattcctccacaccacccacacaccagtcggcagcctccctggtgtgatcccctgggcccgtttgttgtcgggggagaagacttagacccttttgggcctcggagaggtggcatgattgtggatcccctgagatctggcttcccaagagcacttattgacccttcctcaggcctcccgaaccgacttcctccaggcgctgtgcccccaggagctcgctttgacccctttggacccattgggaccagcccacccggacctaacccagaccatctccccccgccgggctacgatgacatgtacctgtgaaggcctcaagaatgtaacatcccaggcttccctccattctcctggagctgccaccgctgtccccatcagcaaccatgttcttgcaggctgggggcaagggattctgctcatgtgtttgcagaccggctgggatagcctccccaccccttatcagagccaagacacctgctgcagctctccacctagctgcagatagctcccaaagagaaatcagtgtgtctctttcaccatcagctcctcccctttcaccaccagctcctctccacttcccaagggagactccggcaaccttcagcaacatatatcctcgaccagatgcagtgctataagaacagaacgcattttggatgttattattaagaaccaaatgtcaatacagaattcatgttgccggtttcccacttttctttttacattaatgcatagctgcttccatttatgagactttagagtttgagtttctgtagggctgaatgactctttttcctgcccagggcccattcttgcttctcaggcaccttccgtttattaattgccattgctcctgacatcactaagatgggtccccttctggctgcatgaatggaaatgagtgactggaaatcccataggccacaagaatgactttcacaagggcaggaacattgtggaaagactgcatcattctgatgaggcaaaatcctccagctattcctgtctgggccagttttgtaggtccatctgtgcatgggcagcagtagtcaaaaagccaaggaaaaaacagagcagacctgaaggctaatcttatttttgccactaacttagtgaatgaccctaagcaagttccttctcctcttagggccttgtgccaagcctatgaaattggaggtggctttcctgctctaaagcattttgatgtctcattctgtgtttggtaacccctataaactggggcagaggaaaagaatgatggttcaaggccatacttcccttgaaccttgtgtggttcttgcctaactctgtggtttttggaccccatggggcccagacagagcacaggagcatgggctgcctctgagtgtggtgttgaacttcgggaggagcagggagccctgcaccttgtgtcctggcccacctgacctttggtgttctccggatccttttcagcccgaggcctgacagacgcgggcagtgatgagccctgttctggagtggaaagagcacgatagagcaccaggctaagaggcacgagatcaaggcggtagtcacttccgctctgcagctagcatttcaaccatatgtggatcctttcatttctcagctccctggattccttcccctaaattaggacctattatttacctgtaggtaagcaagctactgtagctcttctgaggtatctgccaggctgttttctgtagcctcagattgcctatctgcttagcctgagaacaggtagatgaaaactaaactgatgcctaggcccagggtcagtctcagatggaagctgggcctgggtggggaggctagcatgcgtggctccctgggtatttctgtcagtccccatggcaagcagtgatttagtaaaacaccccagagtcagggaagccaaccaccttgaaacctttagaacatctctgctttggagaaagacccagagatcaggcagaggtgcagattcaatcattactcataacctttgagagatggcaaatgggaggagtgttagtctttgttttggaattggaccattcttgcaaccaaaaggacttagagcagtttgctcataaagacatcctttattataaaaggaagtatttaaaggatgatagagaccatcagatagaagcagggaaggtagataacttttaggaccttgatgtgaggaaaagataaaatttaaacaataaatttgccacttagattttctagcagcaaagtccgaaaagatagttatatacaaaattctgttttctgaaaacaaaattgtgattcaccttcagaattggccattttttttgtgagtttccttgcatcaaggacactgagaaacacagtcattgtcttaggtgttctatgggaggaagtgaatagagcctttaggaacttcctggtcaagcttatggtgcttattttgatctgggccacttccctccttccagtcatgagtaatcatcaaggagcaagttggagtgtttcaggtgtatattttgtagaacccaaaagattggagccttaacaataaacatcagcactaagtgacctgttc

SEQ ID NO: 9486 - protein, 152 aa, Homo sapiens
MCWTYKNSEELRSRIVSGIITPIHEQWEKANVSSPHREFPPATAREVDPLRIPPHHPHTSRQPPWCDPLGPFVVGGEDLDPFGPRRGGMIVDPLRSGFPRALIDPSSGLPNRLPPGAVPPGARFDPFGPIGTSPPGPNPDHLPPPGYDDMYL

SEQ ID NO: 9487 - DNA, 4788 bp, Homo sapiens
ggcttccccgccccgccccgtccccgggcgtctccattttggtctcaggtgtggactcggcaagaaccagcgcaagagggaagcagagttatagctaccccggccgcggagccggctcactgcactacccccgcccccttctttcctccagacgccgaagtcgcgggcgctcatggcgggcctggagccgggtcccaatgataagaagtcagaactgctgccagctgggtggaacaacaataaagacctgtatgtcctccggtatgagtataaggatgggtccagaaagctccttgtgaaagccatcaccgtggagagcagcatgatcctcaatgtgctggaatatggctcacagcaagtggcagacttgaccctgaacttggatgattatatcgatgcagaacacctgggtgacttccacaggacctacaagaacagtgaggagcttcggtctcgtattgtgtctggaatcatcacacctatccatgagcagtgggaaaaggctaatgtaagcagtccccaccgggagttcccccctgctaccgccagagaggtggacccactccggattcctccacaccacccacacaccagtcggcagcctccctggtgtgatcccctgggcccgtttgttgtcgggggagaagacttagacccttttgggcctcggagaggtggcatgattgtggatcccctgagatctggcttcccaagagcacttattgacccttcctcaggcctcccgaaccgacttcctccaggcgctgtgcccccaggagctcgctttgacccctttggacccattgggaccagcccacccggacctaacccagaccatctccccccgccgggctacgatgacatgtacctgtgaaggcctcaagaatgtaacatcccaggcttccctccattctcctggagctgccaccgctgtccccatcagcaaccatgttcttgcaggctgggggcaagggattctgctcatgtgtttgcagaccggctgggatagcctccccaccccttatcagagccaagacacctgctgcagctctccacctagctgcagatagctcccaaagagaaatcagtgtgtctctttcaccatcagctcctcccctttcaccaccagctcctctccacttcccaagggagactccggcaaccttcagcaacatatatcctcgaccagatgcagtgctataagaacagaacgcattttggatgttattattaagaaccaaatgtcaatacagaattcatgttgccggtttcccacttttctttttacattaatgcatagctgcttccatttatgagactttagagtttgagtttctgtagggctgaatgactctttttcctgcccagggcccattcttgcttctcaggcaccttccgtttattaattgccattgctcctgacatcactaagatgggtccccttctggctgcatgaatggaaatgagtgactggaaatcccataggccacaagaatgactttcacaagggcaggaacattgtggaaagactgcatcattctgatgaggcaaaatcctccagctattcctgtctgggccagttttgtaggtccatctgtgcatgggcagcagtagtcaaaaagccaaggaaaaaacagagcagacctgaaggctaatcttatttttgccactaacttagtgaatgaccctaagcaagttccttctcctcttagggccttgtgccaagcctatgaaattggaggtggctttcctgctctaaagcattttgatgtctcattctgtgtttggtaacccctataaactggggcagaggaaaagaatgatggttcaaggccatacttcccttgaaccttgtgtggttcttgcctaactctgtggtttttggaccccatggggcccagacagagcacaggagcatgggctgcctctgagtgtggtgttgaacttcgggaggagcagggagccctgcaccttgtgtcctggcccacctgacctttggtgttctccggatccttttcagcccgaggcctgacagacgcgggcagtgatgagccctgttctggagtggaaagagcacgatagagcaccaggctaagaggcacgagatcaaggcggtagtcacttccgctctgcagctagcatttcaaccatatgtggatcctttcatttctcagctccctggattccttcccctaaattaggacctattatttacctgtaggtaagcaagctactgtagctcttctgaggtatctgccaggctgttttctgtagcctcagattgcctatctgcttagcctgagaacaggtagatgaaaactaaactgatgcctaggcccagggtcagtctcagatggaagctgggcctgggtggggaggctagcatgcgtggctccctgggtatttctgtcagtccccatggcaagcagtgatttagtaaaacaccccagagtcagggaagccaaccaccttgaaacctttagaacatctctgctttggagaaagacccagagatcaggcagaggtgcagattcaatcattactcataacctttgagagatggcaaatgggaggagtgttagtctttgttttggaattggaccattcttgcaaccaaaaggacttagagcagtttgctcataaagacatcctttattataaaaggaagtatttaaaggatgatagagaccatcagatagaagcagggaaggtagataacttttaggaccttgatgtgaggaaaagataaaatttaaacaataaatttgccacttagattttctagcagcaaagtccgaaaagatagttatatacaaaattctgttttctgaaaacaaaattgtgattcaccttcagaattggccattttttttgtgagtttccttgcatcaaggacactgagaaacacagtcattgtcttaggtgttctatgggaggaagtgaatagagcctttaggaacttcctggtcaagcttatggtgcttattttgatctgggccacttccctccttccagtcatgagtaatcatcaaggagcaagttggagtgtttcaggtgtatattttgtagaacccaaaagattggagccttaacaataaacatcagcactaagtgacctgttcctccttttttaaatagcagctttattgagatataatttacatacccataatttacatacctgtttaaagtatacaattcagtggatttagtatgttcacagtgttgcacatccaccaccatttctaattcctgaacattttcaccacctcaaaaagaaaccacacacccattggcatgactccccattcccttgctcccagccccaggcaaccactaacatctgtctctaaagattttttttttttttctggacagttctcataagtggaatcactcagtattatggccttttgtgtctggcttctttcatttcatgtgatgttttcaagattcattcatgctgtagcatgtatccatggtatggatatatcacattttgcttatccttttatcagttgatggacagttgggttgtttctacaaaaaggctattatgagtaatgcagccaagaacatttgtgtaccagtttttgagttttcagttgtttgagtttcagatgttttcagttcatttgggtatataccaaggagtggaattgctggttcacatggtagctctatattctactttgtgaggaattgtcagactgttttccacggaagctgcaccattttacatttccactggtaatttatgagggttccagtttccccacatcttcaccaactcttgttatttttcatgcttatggccatcctagttagcgtgaagtagcatctcattgtggtcttctcttccattttttaaaaaagaattttgacctacaccaagcaaggcagagaccagagtcagtcccccttggggagcaatctgtggttttgataatcaccaccttgggatgaacatggctggtgagctgcagagcagttgatttgacttttggggatggttctaggctggatgtgatacagggcaggttttgtctctagagaaagttctcatgaccttcaggtctaatgagattcagatcatcactttggtttggtttgaaatttctttgtttatccagtgaattacaagtagaataaagatctggttctaaattgtcttttggtggtgaagtgccatagaccatttcggaccatttctatgatgtaccagcagcccccacatcacacctcctcttccttggcttgtctcttccccaattcttagagttagcagtgtttcttactgcattcatctcctcagtcataagtgtctgtcaacctccgttgtgaagtcatgagtctcttgagactgaaactccaagaatgtattgtgctcacagtggcgatggtgttcctgtgctggatggtcagtggttgttgacatgtagttagaaaataggtagcaagttccacgcagcctcactctttggaacctagtttctcctatggcctccctttctactgttgttaataacattctattaatgatccatgcctctcttcacaggaggaatattagaatctatggagcagttagtattctttgtcacctaaatttgtctacttctgtacatttccaataaggcaccaccagggcaagggaagattccccacatgtatatccccagctgtttctgtcataaaacttgcatgtgtataaaccactattgactttttgcaccaaaggagatattcaaggacagacatccaagtccccagccctttattgccctt

SEQ ID NO: 9488 - protein, 233 aa, Homo sapiens; identical to SEQ ID NO: 9482

SEQ ID NO: 9489 - DNA, 574 bp, Homo sapiens
cgccccgccccgtccccgggcgtctccattttggtctcaggtgtggactcggcaagaaccagcgcaagagggaagcagagttatagctaccccggccgcggagccggctcactgcactacccccgcccccttctttcctccagacgccgaagtcgcgggcgctcatggcgggcctggagccgggtcccaatgataagaagtcagaactgctgccagctgggtggaacaacaataaagacctgtatgtcctccggtatgagtataaggatgggtccagaaagctccttgtgaaagccatcaccgtggagagcagcatgatcctcaatgtgctggaatatggctcacagcaagtggcagacttgaccctgaacttggatgattatatcgatgcagaacacctgggtgacttccacaggacctacaagaacagtgaggagcttcggtctcgtattgtgtctggaatcatcacacctatccatgagcagtgggaaaaggctaatgtaagcagtccccaccgggagttcccccctgctaccgccagagaggtggacccactccggattcctccacacca

SEQ ID NO: 9490 - protein, 135 aa, Homo sapiens
MAGLEPGPNDKKSELLPAGWNNNKDLYVLRYEYKDGSRKLLVKAITVESSMILNVLEYGSQQVADLTLNLDDYIDAEHLGDFHRTYKNSEELRSRIVSGIITPIHEQWEKANVSSPHREFPPATAREVDPLRIPP

SEQ ID NO: 9491 - DNA, 632 bp, Homo sapiens
cattttggtctcaggtgtggactcggcaagaaccagcgcaagagggaagcagagttatagctaccccggccgcggagccggctcactgcactacccccgcccccttcgacttcctccaggcgctgtgcccccaggagctcgctttgacccctttggacccattgggaccagcccacccggacctaacccagaccatctccccccgccgggctacgatgacatgtacctgtgaaggcctcaagaatgtaacatcccaggcttccctccattctcctggagctgccaccgctgtccccatcagcaaccatgttcttgcaggctgggggcaagggattctgctcatgtgtttgcagaccggctgggatagcctccccaccccttatcagagccaagacacctgctgcagctctccacctagctgcagatagctcccaaagagaaatcagtgtgtctctttcaccatcagctcctcccctttcaccaccagctcctctccacttcccaagggagactccggcaaccttcagcaacatatatcctcgaccagatgcagtgctataagaacagaacgcattttggatgttattattaagaaccaaatgtcaatacagaattcatgttgccggtttccc

SEQ ID NO: 9492 - protein, 84 aa, Homo sapiens
MFLQAGGKGFCSCVCRPAGIASPPLIRAKTPAAALHLAADSSQREISVSLSPSAPPLSPPAPLHFPRETPATFSNIYPRPDAVL

SEQ ID NO: 9493 - DNA, 2480 bp, Homo sapiens
cattttggtctcaggtgtggactcggcaagaaccagcgcaagagggaagcagagttatagctaccccggccgcggagccggctcactgcactacccccgcccccttcgacttcctccaggcgctgtgcccccaggagctcgctttgacccctttggacccattgggaccagcccacccggacctaacccagaccatctccccccgccgggctacgatgacatgtacctgtgaaggcctcaagaatgtaacatcccaggcttccctccattctcctggagctgccaccgctgtccccatcagcaaccatgttcttgcaggctgggggcaagggattctgctcatgtgtttgcagaccggctgggatagcctccccaccccttatcagagccaagacacctgctgcagctctccacctagctgcagatagctcccaaagagaaatcagtgtgtctctttcaccatcagctcctcccctttcaccaccagctcctctccacttcccaagggagactccggcaaccttcagcaacatatatcctcgaccagatgcagtgctataagaacagaacgcattttggatgttattattaagaaccaaatgtcaatacagaattcatgttgccggtttcccacttttctttttacattaatgcatagctgcttccatttatgagactttagagtttgagtttctgtagggctgaatgactctttttcctgcccagggcccattcttgcttctcaggcaccttccgtttattaattgccattgctcctgacatcactaagatgggtccccttctggctgcatgaatggaaatgagtgactggaaatcccataggccacaagaatgactttcacaagggcaggaacattgtggaaagactgcatcattctgatgaggcaaaatcctccagctattcctgtctgggccagttttgtaggtccatctgtgcatgggcagcagtagtcaaaaagccaaggaaaaaacagagcagacctgaaggctaatcttatttttgccactaacttagtgaatgaccctaagcaagttccttctcctcttagggccttgtgccaagcctatgaaattggaggtggctttcctgctctaaagcattttgatgtctcattctgtgtttggtaacccctataaactggggcagaggaaaagaatgatggttcaaggccatacttcccttgaaccttgtgtggttcttgcctaactctgtggtttttggaccccatggggcccagacagagcacaggagcatgggctgcctctgagtgtggtgttgaacttcgggaggagcagggagccctgcaccttgtgtcctggcccacctgacctttggtgttctccggatccttttcagcccgaggcctgacagacgcgggcagtgatgagccctgttctggagtggaaagagcacgatagagcaccaggctaagaggcacgagatcaaggcggtagtcacttccgctctgcagctagcatttcaaccatatgtggatcctttcatttctcagctccctggattccttcccctaaattaggacctattatttacctgtaggtaagcaagctactgtagctcttctgaggtatctgccaggctgttttctgtagcctcagattgcctatctgcttagcctgagaacaggtagatgaaaactaaactgatgcctaggcccagggtcagtctcagatggaagctgggcctgggtggggaggctagcatgcgtggctccctgggtatttctgtcagtccccatggcaagcagtgatttagtaaaacaccccagagtcagggaagccaaccaccttgaaacctttagaacatctctgctttggagaaagacccagagatcaggcagaggtgcagattcaatcattactcataacctttgagagatggcaaatgggaggagtgttagtctttgttttggaattggaccattcttgcaaccaaaaggacttagagcagtttgctcataaagacatcctttattataaaaggaagtatttaaaggatgatagagaccatcagatagaagcagggaaggtagataacttttaggaccttgatgtgaggaaaagataaaatttaaacaataaatttgccacttagattttctagcagcaaagtccgaaaagatagttatatacaaaattctgttttctgaaaacaaaattgtgattcaccttcagaattggccattttttttgtgagtttccttgcatcaaggacactgagaaacacagtcattgtcttaggtgttctatgggaggaagtgaatagagcctttaggaacttcctggtcaagcttatggtgcttattttgatctgggccacttccctccttccagtcatgagtaatcatcaaggagcaagttggagtgtttcaggtgtatattttgtagaacccaaaagattggagccttaacaataaacatcagcactaagtgacctgttc

SEQ ID NO: 9494 - protein, 84 aa, Homo sapiens; identical to SEQ ID NO: 9492

SEQ ID NO: 9495 - DNA, 4146 bp, Homo sapiens
cattttggtctcaggtgtggactcggcaagaaccagcgcaagagggaagcagagttatagctaccccggccgcggagccggctcactgcactacccccgcccccttcgacttcctccaggcgctgtgcccccaggagctcgctttgacccctttggacccattgggaccagcccacccggacctaacccagaccatctccccccgccgggctacgatgacatgtacctgtgaaggcctcaagaatgtaacatcccaggcttccctccattctcctggagctgccaccgctgtccccatcagcaaccatgttcttgcaggctgggggcaagggattctgctcatgtgtttgcagaccggctgggatagcctccccaccccttatcagagccaagacacctgctgcagctctccacctagctgcagatagctcccaaagagaaatcagtgtgtctctttcaccatcagctcctcccctttcaccaccagctcctctccacttcccaagggagactccggcaaccttcagcaacatatatcctcgaccagatgcagtgctataagaacagaacgcattttggatgttattattaagaaccaaatgtcaatacagaattcatgttgccggtttcccacttttctttttacattaatgcatagctgcttccatttatgagactttagagtttgagtttctgtagggctgaatgactctttttcctgcccagggcccattcttgcttctcaggcaccttccgtttattaattgccattgctcctgacatcactaagatgggtccccttctggctgcatgaatggaaatgagtgactggaaatcccataggccacaagaatgactttcacaagggcaggaacattgtggaaagactgcatcattctgatgaggcaaaatcctccagctattcctgtctgggccagttttgtaggtccatctgtgcatgggcagcagtagtcaaaaagccaaggaaaaaacagagcagacctgaaggctaatcttatttttgccactaacttagtgaatgaccctaagcaagttccttctcctcttagggccttgtgccaagcctatgaaattggaggtggctttcctgctctaaagcattttgatgtctcattctgtgtttggtaacccctataaactggggcagaggaaaagaatgatggttcaaggccatacttcccttgaaccttgtgtggttcttgcctaactctgtggtttttggaccccatggggcccagacagagcacaggagcatgggctgcctctgagtgtggtgttgaacttcgggaggagcagggagccctgcaccttgtgtcctggcccacctgacctttggtgttctccggatccttttcagcccgaggcctgacagacgcgggcagtgatgagccctgttctggagtggaaagagcacgatagagcaccaggctaagaggcacgagatcaaggcggtagtcacttccgctctgcagctagcatttcaaccatatgtggatcctttcatttctcagctccctggattccttcccctaaattaggacctattatttacctgtaggtaagcaagctactgtagctcttctgaggtatctgccaggctgttttctgtagcctcagattgcctatctgcttagcctgagaacaggtagatgaaaactaaactgatgcctaggcccagggtcagtctcagatggaagctgggcctgggtggggaggctagcatgcgtggctccctgggtatttctgtcagtccccatggcaagcagtgatttagtaaaacaccccagagtcagggaagccaaccaccttgaaacctttagaacatctctgctttggagaaagacccagagatcaggcagaggtgcagattcaatcattactcataacctttgagagatggcaaatgggaggagtgttagtctttgttttggaattggaccattcttgcaaccaaaaggacttagagcagtttgctcataaagacatcctttattataaaaggaagtatttaaaggatgatagagaccatcagatagaagcagggaaggtagataacttttaggaccttgatgtgaggaaaagataaaatttaaacaataaatttgccacttagattttctagcagcaaagtccgaaaagatagttatatacaaaattctgttttctgaaaacaaaattgtgattcaccttcagaattggccattttttttgtgagtttccttgcatcaaggacactgagaaacacagtcattgtcttaggtgttctatgggaggaagtgaatagagcctttaggaacttcctggtcaagcttatggtgcttattttgatctgggccacttccctccttccagtcatgagtaatcatcaaggagcaagttggagtgtttcaggtgtatattttgtagaacccaaaagattggagccttaacaataaacatcagcactaagtgacctgttcctccttttttaaatagcagctttattgagatataatttacatacccataatttacatacctgtttaaagtatacaattcagtggatttagtatgttcacagtgttgcacatccaccaccatttctaattcctgaacattttcaccacctcaaaaagaaaccacacacccattggcatgactccccattcccttgctcccagccccaggcaaccactaacatctgtctctaaagattttttttttttttctggacagttctcataagtggaatcactcagtattatggccttttgtgtctggcttctttcatttcatgtgatgttttcaagattcattcatgctgtagcatgtatccatggtatggatatatcacattttgcttatccttttatcagttgatggacagttgggttgtttctacaaaaaggctattatgagtaatgcagccaagaacatttgtgtaccagtttttgagttttcagttgtttgagtttcagatgttttcagttcatttgggtatataccaaggagtggaattgctggttcacatggtagctctatattctactttgtgaggaattgtcagactgttttccacggaagctgcaccattttacatttccactggtaatttatgagggttccagtttccccacatcttcaccaactcttgttatttttcatgcttatggccatcctagttagcgtgaagtagcatctcattgtggtcttctcttccattttttaaaaaagaattttgacctacaccaagcaaggcagagaccagagtcagtcccccttggggagcaatctgtggttttgataatcaccaccttgggatgaacatggctggtgagctgcagagcagttgatttgacttttggggatggttctaggctggatgtgatacagggcaggttttgtctctagagaaagttctcatgaccttcaggtctaatgagattcagatcatcactttggtttggtttgaaatttctttgtttatccagtgaattacaagtagaataaagatctggttctaaattgtcttttggtggtgaagtgccatagaccatttcggaccatttctatgatgtaccagcagcccccacatcacacctcctcttccttggcttgtctcttccccaattcttagagttagcagtgtttcttactgcattcatctcctcagtcataagtgtctgtcaacctccgttgtgaagtcatgagtctcttgagactgaaactccaagaatgtattgtgctcacagtggcgatggtgttcctgtgctggatggtcagtggttgttgacatgtagttagaaaataggtagcaagttccacgcagcctcactctttggaacctagtttctcctatggcctccctttctactgttgttaataacattctattaatgatccatgcctctcttcacaggaggaatattagaatctatggagcagttagtattctttgtcacctaaatttgtctacttctgtacatttccaataaggcaccaccagggcaagggaagattccccacatgtatatccccagctgtttctgtcataaaacttgcatgtgtataaaccactattgactttttgcaccaaaggagatattcaaggacagacatccaagtccccagccctttattgccctt

SEQ ID NO: 9496 - protein, 84 aa, Homo sapiens; identical to SEQ ID NO: 9492

SEQ ID NO: 9497 - DNA, 337 bp, Homo sapiens
acctgtatgtcctccggtatgagtataaggatgggtccagaaagctccttgtgaaagccatcaccgtggagagcagcatgatcctcaatgtgctggaatatggctcacagcaagtggcagacttgaccctgaacttggatgattatatcgatgcagaacacctgggtgacttccacaggacctacaagaacagtgaggagcttcggtctcgtattgtgtctggaatcatcacacctatccatgagcagtgggaaaaggctaatgtaagcagtccccaccgggagttcccccctgctaccgccagagaggtggacccactccggattcctccacacca

SEQ ID NO: 9498 - protein, 85 aa, Homo sapiens
MILNVLEYGSQQVADLTLNLDDYIDAEHLGDFHRTYKNSEELRSRIVSGIITPIHEQWEKANVSSPHREFPPATAREVDPLRIPP

SEQ ID NO: 9499 - DNA, 1139 bp, Homo sapiens
aatccaggccctgtgcccctacaccctcacctctttctaatggggtggtaaacaaggaggggcaactcagatgcctaagaagcttgggcccaaatctcagagacagcgtggggctgttgcccccctcacccaggtccagcaggcggcctgttcccccacttataaacaggccaagcgcaatgccaggagctatcagggccgccgccgccgccgtcgttgcagccagaataccacttccagggttcctagccaactgcaagcagttgactcttcatctgcttcctgcaggacctacaagaacagtgaggagcttcggtctcgtattgtgtctggaatcatcacacctatccatgagcagtgggaaaaggctaatgtaagcagtccccaccgggagttcccccctgctaccgccagagaggtggacccactccggattcctccacaccacccacacaccagtcggcagcctccctggtgtgatcccctgggcccgtttgttgtcgggggagaagacttagacccttttgggcctcggagaggtggcatgattgtggatcccctgagatctggcttcccaagagcacttattgacccttcctcaggcctcccgaaccgacttcctccaggcgctgtgcccccaggagctcgctttgacccctttggacccattgggaccagcccacccggacctaacccagaccatctccccccgccgggctacgatgacatgtacctgtgaaggcctcaagaatgtaacatcccaggcttccctccattctcctggagctgccaccgctgtccccatcagcaaccatgttcttgcaggctgggggcaagggattctgctcatgtgtttgcagaccggctgggatagcctccccaccccttatcagagccaagacacctgctgcagctctccacctagctgcagatagctcccaaagagaaatcagtgtgtctctttcaccatcagctcctcccctttcaccaccagctcctctccacttcccaagggagactccggcaaccttcagcaacatatatcctcgaccagatgcagtgctataagaacagaacgcattttggatgttattattaagaaccaaatgtcaatacagaattcatgttgccggtttccc

SEQ ID NO: 9500 - protein, 222 aa, Homo sapiens
MPKKLGPKSQRQRGAVAPLTQVQQAACSPTYKQAKRNARSYQGRRRRRRCSQNTTSRVPSQLQAVDSSSASCRTYKNSEELRSRIVSGIITPIHEQWEKANVSSPHREFPPATAREVDPLRIPPHHPHTSRQPPWCDPLGPFVVGGEDLDPFGPRRGGMIVDPLRSGFPRALIDPSSGLPNRLPPGAVPPGARFDPFGPIGTSPPGPNPDHLPPPGYDDMYL

SEQ ID NO: 9501 - DNA, 2987 bp, Homo sapiens
aatccaggccctgtgcccctacaccctcacctctttctaatggggtggtaaacaaggaggggcaactcagatgcctaagaagcttgggcccaaatctcagagacagcgtggggctgttgcccccctcacccaggtccagcaggcggcctgttcccccacttataaacaggccaagcgcaatgccaggagctatcagggccgccgccgccgccgtcgttgcagccagaataccacttccagggttcctagccaactgcaagcagttgactcttcatctgcttcctgcaggacctacaagaacagtgaggagcttcggtctcgtattgtgtctggaatcatcacacctatccatgagcagtgggaaaaggctaatgtaagcagtccccaccgggagttcccccctgctaccgccagagaggtggacccactccggattcctccacaccacccacacaccagtcggcagcctccctggtgtgatcccctgggcccgtttgttgtcgggggagaagacttagacccttttgggcctcggagaggtggcatgattgtggatcccctgagatctggcttcccaagagcacttattgacccttcctcaggcctcccgaaccgacttcctccaggcgctgtgcccccaggagctcgctttgacccctttggacccattgggaccagcccacccggacctaacccagaccatctccccccgccgggctacgatgacatgtacctgtgaaggcctcaagaatgtaacatcccaggcttccctccattctcctggagctgccaccgctgtccccatcagcaaccatgttcttgcaggctgggggcaagggattctgctcatgtgtttgcagaccggctgggatagcctccccaccccttatcagagccaagacacctgctgcagctctccacctagctgcagatagctcccaaagagaaatcagtgtgtctctttcaccatcagctcctcccctttcaccaccagctcctctccacttcccaagggagactccggcaaccttcagcaacatatatcctcgaccagatgcagtgctataagaacagaacgcattttggatgttattattaagaaccaaatgtcaatacagaattcatgttgccggtttcccacttttctttttacattaatgcatagctgcttccatttatgagactttagagtttgagtttctgtagggctgaatgactctttttcctgcccagggcccattcttgcttctcaggcaccttccgtttattaattgccattgctcctgacatcactaagatgggtccccttctggctgcatgaatggaaatgagtgactggaaatcccataggccacaagaatgactttcacaagggcaggaacattgtggaaagactgcatcattctgatgaggcaaaatcctccagctattcctgtctgggccagttttgtaggtccatctgtgcatgggcagcagtagtcaaaaagccaaggaaaaaacagagcagacctgaaggctaatcttatttttgccactaacttagtgaatgaccctaagcaagttccttctcctcttagggccttgtgccaagcctatgaaattggaggtggctttcctgctctaaagcattttgatgtctcattctgtgtttggtaacccctataaactggggcagaggaaaagaatgatggttcaaggccatacttcccttgaaccttgtgtggttcttgcctaactctgtggtttttggaccccatggggcccagacagagcacaggagcatgggctgcctctgagtgtggtgttgaacttcgggaggagcagggagccctgcaccttgtgtcctggcccacctgacctttggtgttctccggatccttttcagcccgaggcctgacagacgcgggcagtgatgagccctgttctggagtggaaagagcacgatagagcaccaggctaagaggcacgagatcaaggcggtagtcacttccgctctgcagctagcatttcaaccatatgtggatcctttcatttctcagctccctggattccttcccctaaattaggacctattatttacctgtaggtaagcaagctactgtagctcttctgaggtatctgccaggctgttttctgtagcctcagattgcctatctgcttagcctgagaacaggtagatgaaaactaaactgatgcctaggcccagggtcagtctcagatggaagctgggcctgggtggggaggctagcatgcgtggctccctgggtatttctgtcagtccccatggcaagcagtgatttagtaaaacaccccagagtcagggaagccaaccaccttgaaacctttagaacatctctgctttggagaaagacccagagatcaggcagaggtgcagattcaatcattactcataacctttgagagatggcaaatgggaggagtgttagtctttgttttggaattggaccattcttgcaaccaaaaggacttagagcagtttgctcataaagacatcctttattataaaaggaagtatttaaaggatgatagagaccatcagatagaagcagggaaggtagataacttttaggaccttgatgtgaggaaaagataaaatttaaacaataaatttgccacttagattttctagcagcaaagtccgaaaagatagttatatacaaaattctgttttctgaaaacaaaattgtgattcaccttcagaattggccattttttttgtgagtttccttgcatcaaggacactgagaaacacagtcattgtcttaggtgttctatgggaggaagtgaatagagcctttaggaacttcctggtcaagcttatggtgcttattttgatctgggccacttccctccttccagtcatgagtaatcatcaaggagcaagttggagtgtttcaggtgtatattttgtagaacccaaaagattggagccttaacaataaacatcagcactaagtgacctgttc

SEQ ID NO: 9502 - protein, 222 aa, Homo sapiens; identical to SEQ ID NO: 9500

SEQ ID NO: 9503 - DNA, 4653 bp, Homo sapiens
aatccaggccctgtgcccctacaccctcacctctttctaatggggtggtaaacaaggaggggcaactcagatgcctaagaagcttgggcccaaatctcagagacagcgtggggctgttgcccccctcacccaggtccagcaggcggcctgttcccccacttataaacaggccaagcgcaatgccaggagctatcagggccgccgccgccgccgtcgttgcagccagaataccacttccagggttcctagccaactgcaagcagttgactcttcatctgcttcctgcaggacctacaagaacagtgaggagcttcggtctcgtattgtgtctggaatcatcacacctatccatgagcagtgggaaaaggctaatgtaagcagtccccaccgggagttcccccctgctaccgccagagaggtggacccactccggattcctccacaccacccacacaccagtcggcagcctccctggtgtgatcccctgggcccgtttgttgtcgggggagaagacttagacccttttgggcctcggagaggtggcatgattgtggatcccctgagatctggcttcccaagagcacttattgacccttcctcaggcctcccgaaccgacttcctccaggcgctgtgcccccaggagctcgctttgacccctttggacccattgggaccagcccacccggacctaacccagaccatctccccccgccgggctacgatgacatgtacctgtgaaggcctcaagaatgtaacatcccaggcttccctccattctcctggagctgccaccgctgtccccatcagcaaccatgttcttgcaggctgggggcaagggattctgctcatgtgtttgcagaccggctgggatagcctccccaccccttatcagagccaagacacctgctgcagctctccacctagctgcagatagctcccaaagagaaatcagtgtgtctctttcaccatcagctcctcccctttcaccaccagctcctctccacttcccaagggagactccggcaaccttcagcaacatatatcctcgaccagatgcagtgctataagaacagaacgcattttggatgttattattaagaaccaaatgtcaatacagaattcatgttgccggtttcccacttttctttttacattaatgcatagctgcttccatttatgagactttagagtttgagtttctgtagggctgaatgactctttttcctgcccagggcccattcttgcttctcaggcaccttccgtttattaattgccattgctcctgacatcactaagatgggtccccttctggctgcatgaatggaaatgagtgactggaaatcccataggccacaagaatgactttcacaagggcaggaacattgtggaaagactgcatcattctgatgaggcaaaatcctccagctattcctgtctgggccagttttgtaggtccatctgtgcatgggcagcagtagtcaaaaagccaaggaaaaaacagagcagacctgaaggctaatcttatttttgccactaacttagtgaatgaccctaagcaagttccttctcctcttagggccttgtgccaagcctatgaaattggaggtggctttcctgctctaaagcattttgatgtctcattctgtgtttggtaacccctataaactggggcagaggaaaagaatgatggttcaaggccatacttcccttgaaccttgtgtggttcttgcctaactctgtggtttttggaccccatggggcccagacagagcacaggagcatgggctgcctctgagtgtggtgttgaacttcgggaggagcagggagccctgcaccttgtgtcctggcccacctgacctttggtgttctccggatccttttcagcccgaggcctgacagacgcgggcagtgatgagccctgttctggagtggaaagagcacgatagagcaccaggctaagaggcacgagatcaaggcggtagtcacttccgctctgcagctagcatttcaaccatatgtggatcctttcatttctcagctccctggattccttcccctaaattaggacctattatttacctgtaggtaagcaagctactgtagctcttctgaggtatctgccaggctgttttctgtagcctcagattgcctatctgcttagcctgagaacaggtagatgaaaactaaactgatgcctaggcccagggtcagtctcagatggaagctgggcctgggtggggaggctagcatgcgtggctccctgggtatttctgtcagtccccatggcaagcagtgatttagtaaaacaccccagagtcagggaagccaaccaccttgaaacctttagaacatctctgctttggagaaagacccagagatcaggcagaggtgcagattcaatcattactcataacctttgagagatggcaaatgggaggagtgttagtctttgttttggaattggaccattcttgcaaccaaaaggacttagagcagtttgctcataaagacatcctttattataaaaggaagtatttaaaggatgatagagaccatcagatagaagcagggaaggtagataacttttaggaccttgatgtgaggaaaagataaaatttaaacaataaatttgccacttagattttctagcagcaaagtccgaaaagatagttatatacaaaattctgttttctgaaaacaaaattgtgattcaccttcagaattggccattttttttgtgagtttccttgcatcaaggacactgagaaacacagtcattgtcttaggtgttctatgggaggaagtgaatagagcctttaggaacttcctggtcaagcttatggtgcttattttgatctgggccacttccctccttccagtcatgagtaatcatcaaggagcaagttggagtgtttcaggtgtatattttgtagaacccaaaagattggagccttaacaataaacatcagcactaagtgacctgttcctccttttttaaatagcagctttattgagatataatttacatacccataatttacatacctgtttaaagtatacaattcagtggatttagtatgttcacagtgttgcacatccaccaccatttctaattcctgaacattttcaccacctcaaaaagaaaccacacacccattggcatgactccccattcccttgctcccagccccaggcaaccactaacatctgtctctaaagattttttttttttttctggacagttctcataagtggaatcactcagtattatggccttttgtgtctggcttctttcatttcatgtgatgttttcaagattcattcatgctgtagcatgtatccatggtatggatatatcacattttgcttatccttttatcagttgatggacagttgggttgtttctacaaaaaggctattatgagtaatgcagccaagaacatttgtgtaccagtttttgagttttcagttgtttgagtttcagatgttttcagttcatttgggtatataccaaggagtggaattgctggttcacatggtagctctatattctactttgtgaggaattgtcagactgttttccacggaagctgcaccattttacatttccactggtaatttatgagggttccagtttccccacatcttcaccaactcttgttatttttcatgcttatggccatcctagttagcgtgaagtagcatctcattgtggtcttctcttccattttttaaaaaagaattttgacctacaccaagcaaggcagagaccagagtcagtcccccttggggagcaatctgtggttttgataatcaccaccttgggatgaacatggctggtgagctgcagagcagttgatttgacttttggggatggttctaggctggatgtgatacagggcaggttttgtctctagagaaagttctcatgaccttcaggtctaatgagattcagatcatcactttggtttggtttgaaatttctttgtttatccagtgaattacaagtagaataaagatctggttctaaattgtcttttggtggtgaagtgccatagaccatttcggaccatttctatgatgtaccagcagcccccacatcacacctcctcttccttggcttgtctcttccccaattcttagagttagcagtgtttcttactgcattcatctcctcagtcataagtgtctgtcaacctccgttgtgaagtcatgagtctcttgagactgaaactccaagaatgtattgtgctcacagtggcgatggtgttcctgtgctggatggtcagtggttgttgacatgtagttagaaaataggtagcaagttccacgcagcctcactctttggaacctagtttctcctatggcctccctttctactgttgttaataacattctattaatgatccatgcctctcttcacaggaggaatattagaatctatggagcagttagtattctttgtcacctaaatttgtctacttctgtacatttccaataaggcaccaccagggcaagggaagattccccacatgtatatccccagctgtttctgtcataaaacttgcatgtgtataaaccactattgactttttgcaccaaaggagatattcaaggacagacatccaagtccccagccctttattgccctt

SEQ ID NO: 9504 - protein, 222 aa, Homo sapiens; identical to SEQ ID NO: 9500

SEQ ID NO: 9505 - DNA, 2441 bp, Homo sapiens
cagatgcctaagaagcttgggcccaaatctcagagacagcgtggggctgttgcccccctcacccaggtccagcaggcggcctgttcccccacttataaacaggccaagcgcaatgccaggagctatcagggccgccgccgccgccgtcgttgcagccagaataccacttccagggttcctagccaactgcaagcagttgactcttcatctgcttcctgcaggacctacaagaacagtgaggagcttcggtctcgtattgtgtctggaatcatcacacctatccatgagcagtgggaaaaggctaatgtaagcagtccccaccgggagttcccccctgctaccgccagagaggtggacccactccggattcctccactagctgcagatagctcccaaagagaaatcagtgtgtctctttcaccatcagctcctcccctttcaccaccagctcctctccacttcccaagggagactccggcaaccttcagcaacatatatcctcgaccagatgcagtgctataagaacagaacgcattttggatgttattattaagaaccaaatgtcaatacagaattcatgttgccggtttcccacttttctttttacattaatgcatagctgcttccatttatgagactttagagtttgagtttctgtagggctgaatgactctttttcctgcccagggcccattcttgcttctcaggcaccttccgtttattaattgccattgctcctgacatcactaagatgggtccccttctggctgcatgaatggaaatgagtgactggaaatcccataggccacaagaatgactttcacaagggcaggaacattgtggaaagactgcatcattctgatgaggcaaaatcctccagctattcctgtctgggccagttttgtaggtccatctgtgcatgggcagcagtagtcaaaaagccaaggaaaaaacagagcagacctgaaggctaatcttatttttgccactaacttagtgaatgaccctaagcaagttccttctcctcttagggccttgtgccaagcctatgaaattggaggtggctttcctgctctaaagcattttgatgtctcattctgtgtttggtaacccctataaactggggcagaggaaaagaatgatggttcaaggccatacttcccttgaaccttgtgtggttcttgcctaactctgtggtttttggaccccatggggcccagacagagcacaggagcatgggctgcctctgagtgtggtgttgaacttcgggaggagcagggagccctgcaccttgtgtcctggcccacctgacctttggtgttctccggatccttttcagcccgaggcctgacagacgcgggcagtgatgagccctgttctggagtggaaagagcacgatagagcaccaggctaagaggcacgagatcaaggcggtagtcacttccgctctgcagctagcatttcaaccatatgtggatcctttcatttctcagctccctggattccttcccctaaattaggacctattatttacctgtaggtaagcaagctactgtagctcttctgaggtatctgccaggctgttttctgtagcctcagattgcctatctgcttagcctgagaacaggtagatgaaaactaaactgatgcctaggcccagggtcagtctcagatggaagctgggcctgggtggggaggctagcatgcgtggctccctgggtatttctgtcagtccccatggcaagcagtgatttagtaaaacaccccagagtcagggaagccaaccaccttgaaacctttagaacatctctgctttggagaaagacccagagatcaggcagaggtgcagattcaatcattactcataacctttgagagatggcaaatgggaggagtgttagtctttgttttggaattggaccattcttgcaaccaaaaggacttagagcagtttgctcataaagacatcctttattataaaaggaagtatttaaaggatgatagagaccatcagatagaagcagggaaggtagataacttttaggaccttgatgtgaggaaaagataaaatttaaacaataaatttgccacttagattttctagcagcaaagtccgaaaagatagttatatacaaaattctgttttctgaaaacaaaattgtgattcaccttcagaattggccattttttttgtgagtttccttgcatcaaggacactgagaaacacagtcattgtcttaggtgttctatgggaggaagtgaatagagcctttaggaacttcctggtcaagcttatggtgcttattttgatctgggccacttccctccttccagtcatgagtaatcatcaaggagcaagttggagtgtttcaggtgtatattttgtagaacccaaaagattggagccttaacaataaacatcagcactaagtgacctgttc

SEQ ID NO: 9506 - protein, 172 aa, Homo sapiens
MPKKLGPKSQRQRGAVAPLTQVQQAACSPTYKQAKRNARSYQGRRRRRRCSQNTTSRVPSQLQAVDSSSASCRTYKNSEELRSRIVSGIITPIHEQWEKANVSSPHREFPPATAREVDPLRIPPLAADSSQREISVSLSPSAPPLSPPAPLHFPRETPATFSNIYPRPDAVL

SEQ ID NO: 9507 - DNA, 4107 bp, Homo sapiens
cagatgcctaagaagcttgggcccaaatctcagagacagcgtggggctgttgcccccctcacccaggtccagcaggcggcctgttcccccacttataaacaggccaagcgcaatgccaggagctatcagggccgccgccgccgccgtcgttgcagccagaataccacttccagggttcctagccaactgcaagcagttgactcttcatctgcttcctgcaggacctacaagaacagtgaggagcttcggtctcgtattgtgtctggaatcatcacacctatccatgagcagtgggaaaaggctaatgtaagcagtccccaccgggagttcccccctgctaccgccagagaggtggacccactccggattcctccactagctgcagatagctcccaaagagaaatcagtgtgtctctttcaccatcagctcctcccctttcaccaccagctcctctccacttcccaagggagactccggcaaccttcagcaacatatatcctcgaccagatgcagtgctataagaacagaacgcattttggatgttattattaagaaccaaatgtcaatacagaattcatgttgccggtttcccacttttctttttacattaatgcatagctgcttccatttatgagactttagagtttgagtttctgtagggctgaatgactctttttcctgcccagggcccattcttgcttctcaggcaccttccgtttattaattgccattgctcctgacatcactaagatgggtccccttctggctgcatgaatggaaatgagtgactggaaatcccataggccacaagaatgactttcacaagggcaggaacattgtggaaagactgcatcattctgatgaggcaaaatcctccagctattcctgtctgggccagttttgtaggtccatctgtgcatgggcagcagtagtcaaaaagccaaggaaaaaacagagcagacctgaaggctaatcttatttttgccactaacttagtgaatgaccctaagcaagttccttctcctcttagggccttgtgccaagcctatgaaattggaggtggctttcctgctctaaagcattttgatgtctcattctgtgtttggtaacccctataaactggggcagaggaaaagaatgatggttcaaggccatacttcccttgaaccttgtgtggttcttgcctaactctgtggtttttggaccccatggggcccagacagagcacaggagcatgggctgcctctgagtgtggtgttgaacttcgggaggagcagggagccctgcaccttgtgtcctggcccacctgacctttggtgttctccggatccttttcagcccgaggcctgacagacgcgggcagtgatgagccctgttctggagtggaaagagcacgatagagcaccaggctaagaggcacgagatcaaggcggtagtcacttccgctctgcagctagcatttcaaccatatgtggatcctttcatttctcagctccctggattccttcccctaaattaggacctattatttacctgtaggtaagcaagctactgtagctcttctgaggtatctgccaggctgttttctgtagcctcagattgcctatctgcttagcctgagaacaggtagatgaaaactaaactgatgcctaggcccagggtcagtctcagatggaagctgggcctgggtggggaggctagcatgcgtggctccctgggtatttctgtcagtccccatggcaagcagtgatttagtaaaacaccccagagtcagggaagccaaccaccttgaaacctttagaacatctctgctttggagaaagacccagagatcaggcagaggtgcagattcaatcattactcataacctttgagagatggcaaatgggaggagtgttagtctttgttttggaattggaccattcttgcaaccaaaaggacttagagcagtttgctcataaagacatcctttattataaaaggaagtatttaaaggatgatagagaccatcagatagaagcagggaaggtagataacttttaggaccttgatgtgaggaaaagataaaatttaaacaataaatttgccacttagattttctagcagcaaagtccgaaaagatagttatatacaaaattctgttttctgaaaacaaaattgtgattcaccttcagaattggccattttttttgtgagtttccttgcatcaaggacactgagaaacacagtcattgtcttaggtgttctatgggaggaagtgaatagagcctttaggaacttcctggtcaagcttatggtgcttattttgatctgggccacttccctccttccagtcatgagtaatcatcaaggagcaagttggagtgtttcaggtgtatattttgtagaacccaaaagattggagccttaacaataaacatcagcactaagtgacctgttcctccttttttaaatagcagctttattgagatataatttacatacccataatttacatacctgtttaaagtatacaattcagtggatttagtatgttcacagtgttgcacatccaccaccatttctaattcctgaacattttcaccacctcaaaaagaaaccacacacccattggcatgactccccattcccttgctcccagccccaggcaaccactaacatctgtctctaaagattttttttttttttctggacagttctcataagtggaatcactcagtattatggccttttgtgtctggcttctttcatttcatgtgatgttttcaagattcattcatgctgtagcatgtatccatggtatggatatatcacattttgcttatccttttatcagttgatggacagttgggttgtttctacaaaaaggctattatgagtaatgcagccaagaacatttgtgtaccagtttttgagttttcagttgtttgagtttcagatgttttcagttcatttgggtatataccaaggagtggaattgctggttcacatggtagctctatattctactttgtgaggaattgtcagactgttttccacggaagctgcaccattttacatttccactggtaatttatgagggttccagtttccccacatcttcaccaactcttgttatttttcatgcttatggccatcctagttagcgtgaagtagcatctcattgtggtcttctcttccattttttaaaaaagaattttgacctacaccaagcaaggcagagaccagagtcagtcccccttggggagcaatctgtggttttgataatcaccaccttgggatgaacatggctggtgagctgcagagcagttgatttgacttttggggatggttctaggctggatgtgatacagggcaggttttgtctctagagaaagttctcatgaccttcaggtctaatgagattcagatcatcactttggtttggtttgaaatttctttgtttatccagtgaattacaagtagaataaagatctggttctaaattgtcttttggtggtgaagtgccatagaccatttcggaccatttctatgatgtaccagcagcccccacatcacacctcctcttccttggcttgtctcttccccaattcttagagttagcagtgtttcttactgcattcatctcctcagtcataagtgtctgtcaacctccgttgtgaagtcatgagtctcttgagactgaaactccaagaatgtattgtgctcacagtggcgatggtgttcctgtgctggatggtcagtggttgttgacatgtagttagaaaataggtagcaagttccacgcagcctcactctttggaacctagtttctcctatggcctccctttctactgttgttaataacattctattaatgatccatgcctctcttcacaggaggaatattagaatctatggagcagttagtattctttgtcacctaaatttgtctacttctgtacatttccaataaggcaccaccagggcaagggaagattccccacatgtatatccccagctgtttctgtcataaaacttgcatgtgtataaaccactattgactttttgcaccaaaggagatattcaaggacagacatccaagtccccagccctttattgccctt

SEQ ID NO: 9508 - protein, 172 aa, Homo sapiens; identical to SEQ ID NO: 9506

SEQ ID NO: 9509 - DNA, 799 bp, Homo sapiens
agttgtttcagaagaaatgagtttggcttggattgctccaagaacaaagaaatgaacttggcttggattgctccaaatactggtttgaacacagtacagcagtggagcagaaacagaggagatgacaccatggggtgtgatcccctgggcccgtttgttgtcgggggagaagacttagacccttttgggcctcggagaggtggcatgattgtggatcccctgagatctggcttcccaagagcacttattgacccttcctcaggcctcccgaaccgacttcctccaggcgctgtgcccccaggagctcgctttgacccctttggacccattgggaccagcccacccggacctaacccagaccatctccccccgccgggctacgatgacatgtacctgtgaaggcctcaagaatgtaacatcccaggcttccctccattctcctggagctgccaccgctgtccccatcagcaaccatgttcttgcaggctgggggcaagggattctgctcatgtgtttgcagaccggctgggatagcctccccaccccttatcagagccaagacacctgctgcagctctccacctagctgcagatagctcccaaagagaaatcagtgtgtctctttcaccatcagctcctcccctttcaccaccagctcctctccacttcccaagggagactccggcaaccttcagcaacatatatcctcgaccagatgcagtgctataagaacagaacgcattttggatgttattattaagaaccaaatgtcaatacagaattcatgttgccggtttccc

SEQ ID NO: 9510 - protein, 115 aa, Homo sapiens
MNLAWIAPNTGLNTVQQWSRNRGDDTMGCDPLGPFVVGGEDLDPFGPRRGGMIVDPLRSGFPRALIDPSSGLPNRLPPGAVPPGARFDPFGPIGTSPPGPNPDHLPPPGYDDMYL

SEQ ID NO: 9511 - DNA, 2647 bp, Homo sapiens
agttgtttcagaagaaatgagtttggcttggattgctccaagaacaaagaaatgaacttggcttggattgctccaaatactggtttgaacacagtacagcagtggagcagaaacagaggagatgacaccatggggtgtgatcccctgggcccgtttgttgtcgggggagaagacttagacccttttgggcctcggagaggtggcatgattgtggatcccctgagatctggcttcccaagagcacttattgacccttcctcaggcctcccgaaccgacttcctccaggcgctgtgcccccaggagctcgctttgacccctttggacccattgggaccagcccacccggacctaacccagaccatctccccccgccgggctacgatgacatgtacctgtgaaggcctcaagaatgtaacatcccaggcttccctccattctcctggagctgccaccgctgtccccatcagcaaccatgttcttgcaggctgggggcaagggattctgctcatgtgtttgcagaccggctgggatagcctccccaccccttatcagagccaagacacctgctgcagctctccacctagctgcagatagctcccaaagagaaatcagtgtgtctctttcaccatcagctcctcccctttcaccaccagctcctctccacttcccaagggagactccggcaaccttcagcaacatatatcctcgaccagatgcagtgctataagaacagaacgcattttggatgttattattaagaaccaaatgtcaatacagaattcatgttgccggtttcccacttttctttttacattaatgcatagctgcttccatttatgagactttagagtttgagtttctgtagggctgaatgactctttttcctgcccagggcccattcttgcttctcaggcaccttccgtttattaattgccattgctcctgacatcactaagatgggtccccttctggctgcatgaatggaaatgagtgactggaaatcccataggccacaagaatgactttcacaagggcaggaacattgtggaaagactgcatcattctgatgaggcaaaatcctccagctattcctgtctgggccagttttgtaggtccatctgtgcatgggcagcagtagtcaaaaagccaaggaaaaaacagagcagacctgaaggctaatcttatttttgccactaacttagtgaatgaccctaagcaagttccttctcctcttagggccttgtgccaagcctatgaaattggaggtggctttcctgctctaaagcattttgatgtctcattctgtgtttggtaacccctataaactggggcagaggaaaagaatgatggttcaaggccatacttcccttgaaccttgtgtggttcttgcctaactctgtggtttttggaccccatggggcccagacagagcacaggagcatgggctgcctctgagtgtggtgttgaacttcgggaggagcagggagccctgcaccttgtgtcctggcccacctgacctttggtgttctccggatccttttcagcccgaggcctgacagacgcgggcagtgatgagccctgttctggagtggaaagagcacgatagagcaccaggctaagaggcacgagatcaaggcggtagtcacttccgctctgcagctagcatttcaaccatatgtggatcctttcatttctcagctccctggattccttcccctaaattaggacctattatttacctgtaggtaagcaagctactgtagctcttctgaggtatctgccaggctgttttctgtagcctcagattgcctatctgcttagcctgagaacaggtagatgaaaactaaactgatgcctaggcccagggtcagtctcagatggaagctgggcctgggtggggaggctagcatgcgtggctccctgggtatttctgtcagtccccatggcaagcagtgatttagtaaaacaccccagagtcagggaagccaaccaccttgaaacctttagaacatctctgctttggagaaagacccagagatcaggcagaggtgcagattcaatcattactcataacctttgagagatggcaaatgggaggagtgttagtctttgttttggaattggaccattcttgcaaccaaaaggacttagagcagtttgctcataaagacatcctttattataaaaggaagtatttaaaggatgatagagaccatcagatagaagcagggaaggtagataacttttaggaccttgatgtgaggaaaagataaaatttaaacaataaatttgccacttagattttctagcagcaaagtccgaaaagatagttatatacaaaattctgttttctgaaaacaaaattgtgattcaccttcagaattggccattttttttgtgagtttccttgcatcaaggacactgagaaacacagtcattgtcttaggtgttctatgggaggaagtgaatagagcctttaggaacttcctggtcaagcttatggtgcttattttgatctgggccacttccctccttccagtcatgagtaatcatcaaggagcaagttggagtgtttcaggtgtatattttgtagaacccaaaagattggagccttaacaataaacatcagcactaagtgacctgttc

SEQ ID NO: 9512 - protein, 115 aa, Homo sapiens; identical to SEQ ID NO: 9510

SEQ ID NO: 9513 - DNA, 4313 bp, Homo sapiens
agttgtttcagaagaaatgagtttggcttggattgctccaagaacaaagaaatgaacttggcttggattgctccaaatactggtttgaacacagtacagcagtggagcagaaacagaggagatgacaccatggggtgtgatcccctgggcccgtttgttgtcgggggagaagacttagacccttttgggcctcggagaggtggcatgattgtggatcccctgagatctggcttcccaagagcacttattgacccttcctcaggcctcccgaaccgacttcctccaggcgctgtgcccccaggagctcgctttgacccctttggacccattgggaccagcccacccggacctaacccagaccatctccccccgccgggctacgatgacatgtacctgtgaaggcctcaagaatgtaacatcccaggcttccctccattctcctggagctgccaccgctgtccccatcagcaaccatgttcttgcaggctgggggcaagggattctgctcatgtgtttgcagaccggctgggatagcctccccaccccttatcagagccaagacacctgctgcagctctccacctagctgcagatagctcccaaagagaaatcagtgtgtctctttcaccatcagctcctcccctttcaccaccagctcctctccacttcccaagggagactccggcaaccttcagcaacatatatcctcgaccagatgcagtgctataagaacagaacgcattttggatgttattattaagaaccaaatgtcaatacagaattcatgttgccggtttcccacttttctttttacattaatgcatagctgcttccatttatgagactttagagtttgagtttctgtagggctgaatgactctttttcctgcccagggcccattcttgcttctcaggcaccttccgtttattaattgccattgctcctgacatcactaagatgggtccccttctggctgcatgaatggaaatgagtgactggaaatcccataggccacaagaatgactttcacaagggcaggaacattgtggaaagactgcatcattctgatgaggcaaaatcctccagctattcctgtctgggccagttttgtaggtccatctgtgcatgggcagcagtagtcaaaaagccaaggaaaaaacagagcagacctgaaggctaatcttatttttgccactaacttagtgaatgaccctaagcaagttccttctcctcttagggccttgtgccaagcctatgaaattggaggtggctttcctgctctaaagcattttgatgtctcattctgtgtttggtaacccctataaactggggcagaggaaaagaatgatggttcaaggccatacttcccttgaaccttgtgtggttcttgcctaactctgtggtttttggaccccatggggcccagacagagcacaggagcatgggctgcctctgagtgtggtgttgaacttcgggaggagcagggagccctgcaccttgtgtcctggcccacctgacctttggtgttctccggatccttttcagcccgaggcctgacagacgcgggcagtgatgagccctgttctggagtggaaagagcacgatagagcaccaggctaagaggcacgagatcaaggcggtagtcacttccgctctgcagctagcatttcaaccatatgtggatcctttcatttctcagctccctggattccttcccctaaattaggacctattatttacctgtaggtaagcaagctactgtagctcttctgaggtatctgccaggctgttttctgtagcctcagattgcctatctgcttagcctgagaacaggtagatgaaaactaaactgatgcctaggcccagggtcagtctcagatggaagctgggcctgggtggggaggctagcatgcgtggctccctgggtatttctgtcagtccccatggcaagcagtgatttagtaaaacaccccagagtcagggaagccaaccaccttgaaacctttagaacatctctgctttggagaaagacccagagatcaggcagaggtgcagattcaatcattactcataacctttgagagatggcaaatgggaggagtgttagtctttgttttggaattggaccattcttgcaaccaaaaggacttagagcagtttgctcataaagacatcctttattataaaaggaagtatttaaaggatgatagagaccatcagatagaagcagggaaggtagataacttttaggaccttgatgtgaggaaaagataaaatttaaacaataaatttgccacttagattttctagcagcaaagtccgaaaagatagttatatacaaaattctgttttctgaaaacaaaattgtgattcaccttcagaattggccattttttttgtgagtttccttgcatcaaggacactgagaaacacagtcattgtcttaggtgttctatgggaggaagtgaatagagcctttaggaacttcctggtcaagcttatggtgcttattttgatctgggccacttccctccttccagtcatgagtaatcatcaaggagcaagttggagtgtttcaggtgtatattttgtagaacccaaaagattggagccttaacaataaacatcagcactaagtgacctgttcctccttttttaaatagcagctttattgagatataatttacatacccataatttacatacctgtttaaagtatacaattcagtggatttagtatgttcacagtgttgcacatccaccaccatttctaattcctgaacattttcaccacctcaaaaagaaaccacacacccattggcatgactccccattcccttgctcccagccccaggcaaccactaacatctgtctctaaagattttttttttttttctggacagttctcataagtggaatcactcagtattatggccttttgtgtctggcttctttcatttcatgtgatgttttcaagattcattcatgctgtagcatgtatccatggtatggatatatcacattttgcttatccttttatcagttgatggacagttgggttgtttctacaaaaaggctattatgagtaatgcagccaagaacatttgtgtaccagtttttgagttttcagttgtttgagtttcagatgttttcagttcatttgggtatataccaaggagtggaattgctggttcacatggtagctctatattctactttgtgaggaattgtcagactgttttccacggaagctgcaccattttacatttccactggtaatttatgagggttccagtttccccacatcttcaccaactcttgttatttttcatgcttatggccatcctagttagcgtgaagtagcatctcattgtggtcttctcttccattttttaaaaaagaattttgacctacaccaagcaaggcagagaccagagtcagtcccccttggggagcaatctgtggttttgataatcaccaccttgggatgaacatggctggtgagctgcagagcagttgatttgacttttggggatggttctaggctggatgtgatacagggcaggttttgtctctagagaaagttctcatgaccttcaggtctaatgagattcagatcatcactttggtttggtttgaaatttctttgtttatccagtgaattacaagtagaataaagatctggttctaaattgtcttttggtggtgaagtgccatagaccatttcggaccatttctatgatgtaccagcagcccccacatcacacctcctcttccttggcttgtctcttccccaattcttagagttagcagtgtttcttactgcattcatctcctcagtcataagtgtctgtcaacctccgttgtgaagtcatgagtctcttgagactgaaactccaagaatgtattgtgctcacagtggcgatggtgttcctgtgctggatggtcagtggttgttgacatgtagttagaaaataggtagcaagttccacgcagcctcactctttggaacctagtttctcctatggcctccctttctactgttgttaataacattctattaatgatccatgcctctcttcacaggaggaatattagaatctatggagcagttagtattctttgtcacctaaatttgtctacttctgtacatttccaataaggcaccaccagggcaagggaagattccccacatgtatatccccagctgtttctgtcataaaacttgcatgtgtataaaccactattgactttttgcaccaaaggagatattcaaggacagacatccaagtccccagccctttattgccctt

SEQ ID NO: 9514 - protein, 115 aa, Homo sapiens; identical to SEQ ID NO: 9510

SEQ ID NO: 9515 - DNA, 2345 bp, Homo sapiens
tccctgagaagaggagctcttgggccaatcacctagtttctgcctgtgttacagtgaagagaagctgcttaagagaagatgaagcccttgtctctgttaatagagatattgataattcttggggtcacaattaaaactatcaaagcagaggaacataataaaagacaaaaggaaagaaatgtcaccacacaggtatcagtgaacgaaatcaaacaatatttatcacacatattggaacaaagaacatctagtaatgtaatcaataaaagagaaaatctcctggagaaaaagaagaatcaacgtaaaataagaataaaaggaattcaaaataaagatatcttgaagagaaataagaatcatttacaaaagcaagcagagaaaaattttacagatgaaggagaccagctatttaagatgggcatcaaggttctccagcagtctaaaagccaaaaacaaaaagaagagattctaatgcctacctggatgtttctctgtctgaggtccttcttgcctggactactctgctccagcttctgcccaagagcagcttattttagcctcagcatggatgggctgtacataaagagcctacctactttttgccaaagcagctgacatgggaaacttgaaagctatggagaaaatggctgacgctttgctatttggaaattttggcgtgcaaaatataacagcagctatccaattatatgagtccttggctaaagaaggatcatgtaaagcccaaaacgcattaggatttttgtcttcttatggaataggaatggaatatgatcaagctaaggcactgatatattacacctttggaagtgctggaggaaacatgatgtcccagatgattttggggtacagatatttgtcgggaatcaatgttctacagaattgtgaagttgccctaagttattacaagaaagtggcagattatattgctgacacatttgaaaaaagtgaaggtgttccagtggaaaaagtgagactaacggaaagacctgaaaatctgagttctaacagtgagattttggattgggacatataccaatactataaatttttggcagaaagaggagatgttcagatacaagtctctcttggacaattacatctaattggcaggaaaggtctagatcaggattactacaaagcattacactacttcttaaaggcagcaaaggccgggagtgcaaatgccatggcatttataggaaagatgtatttagaggggaatgctgccgtgccgcaaaataacgctactgccttcaagtacttttccatggcagccagtaagggcaatgcaatcggccttcatgggcttggtcttctttactttcatggaaaaggagttcccctgaattatgccgaagcacttaaatactttcagaaagctgcggaaaaagggtggcccgacgcacagttccagttaggcttcatgtactactctggctctggaatatggaaggattataaacttgccttcaaatatttttacctggcatctcagagtgggcagccccttgccatttattatctggccaagatgtatgcaacaggaacaggagtagtaagatcatgcagaactgctgtggagctttataaaggtgtctgtgaactaggccactgggctgagaaattcctgacagcttactttgcctataaggatggtgatatagattcttctcttgttcagtatgcactgcttgcagaaatggggtatgaagtagctcaaagcaattcagcattcattttggaatctaaaaaggctaacattcttgaaaaagagaagatgtatccaatggcgcttctcctatggaatcgagctgccattcaaggcaatgcatttgctagagtaaaaattggagattaccattactatggctatgggactaagaaagactatcaaacagcagccacacactacagcattgcagccaacaaataccacaacgcgcaagccatgttcaatctggcttatatgtatgaacacggcttaggcatcacaaaggacattcacttggccagaagattgtacgacatggctgctcaaacgagtccagatgcccacatacctgtgctctttgccgtcatgaaactggaaactacgcatttgctccgggatatcctgttttttaatttcacaacgagatggaactggctgaaactggacaacaccattggaccacactgggacttatttgtgattggcctcattgttcctgggctgattttgttgcttagaaatcaccatgggtaggatgcggatcacaggaaaacctgctcacgggaatcagttcactccaaggtatccccactaaataaacagtttcccatcc

SEQ ID NO: 9516 - protein, 549 aa, Homo sapiens
MGNLKAMEKMADALLFGNFGVQNITAAIQLYESLAKEGSCKAQNALGFLSSYGIGMEYDQAKALIYYTFGSAGGNMMSQMILGYRYLSGINVLQNCEVALSYYKKVADYIADTFEKSEGVPVEKVRLTERPENLSSNSEILDWDIYQYYKFLAERGDVQIQVSLGQLHLIGRKGLDQDYYKALHYFLKAAKAGSANAMAFIGKMYLEGNAAVPQNNATAFKYFSMAASKGNAIGLHGLGLLYFHGKGVPLNYAEALKYFQKAAEKGWPDAQFQLGFMYYSGSGIWKDYKLAFKYFYLASQSGQPLAIYYLAKMYATGTGVVRSCRTAVELYKGVCELGHWAEKFLTAYFAYKDGDIDSSLVQYALLAEMGYEVAQSNSAFILESKKANILEKEKMYPMALLLWNRAAIQGNAFARVKIGDYHYYGYGTKKDYQTAATHYSIAANKYHNAQAMFNLAYMYEHGLGITKDIHLARRLYDMAAQTSPDAHIPVLFAVMKLETTHLLRDILFFNFTTRWNWLKLDNTIGPHWDLFVIGLIVPGLILLLRNHHG

SEQ ID NO: 9517 - DNA, 2117 bp, Homo sapiens
ggtggaccgcgcttaccgctggcctcttggaagacttgagggcgtggcctgtagagccaggtgcgccaagtgacaggcgagctagcggaaagccgcctcagggacttggaggatgtagaagtgggaggagaccgagggtcaacacgaattgtccgtgctcactccaactgccctgttgaggaggattttcaccagctatcaaagcagaggaacataataaaagacaaaaggaaagaaatgtcaccacacaggtatcagtgaacgaaatcaaacaatatttatcacacatattggaacaaagaacatctagtaatgtaatcaataaaagagaaaatctcctggagaaaaagaagaatcaacgtaaaataagaataaaaggaattcaaaataaagatatcttgaagagaaataagaatcatttacaaaagcaagcagagaaaaattttacagatgaaggagaccagctatttaagatgggcatcaaggttctccagcagtctaaaagccaaaaacaaaaagaagaagcctacctactttttgccaaagcagctgacatgggaaacttgaaagctatggagaaaatggctgacgctttgctatttggaaattttggcgtgcaaaatataacagcagctatccaattatatgagtccttggctaaagaaggatcatgtaaagcccaaaacgcattaggatttttgtcttcttatggaataggaatggaatatgatcaagctaaggcactgatatattacacctttggaagtgctggaggaaacatgatgtcccagatgattttggggtacagatatttgtcgggaatcaatgttctacagaattgtgaagttgccctaagttattacaagaaagtggcagattatattgctgacacatttgaaaaaagtgaaggtgttccagtggaaaaagtgagactaacggaaagacctgaaaatctgagttctaacagtgagattttggattgggacatataccaatactataaatttttggcagaaagaggagatgttcagatacaagtctctcttggacaattacatctaattggcaggaaaggtctagatcaggattactacaaagcattacactacttcttaaaggcagcaaaggccgggagtgcaaatgccatggcatttataggaaagatgtatttagaggggaatgctgccgtgccgcaaaataacgctactgccttcaagtacttttccatggcagccagtaagggcaatgcaatcggccttcatgggcttggtcttctttactttcatggaaaaggagttcccctgaattatgccgaagcacttaaatactttcagaaagctgcggaaaaagggtggcccgacgcacagttccagttaggcttcatgtactactctggctctggaatatggaaggattataaacttgccttcaaatatttttacctggcatctcagagtgggcagccccttgccatttattatctggccaagatgtatgcaacaggaacaggagtagtaagatcatgcagaactgctgtggagaaaaggctaacattcttgaaaaagagaagatgtatccaatggcgcttctcctatggaatcgagctgccattcaaggcaatgcatttgctagagtaaaaattggagattaccattactatggctatgggactaagaaagactatcaaacagcagccacacactacagcattgcagccaacaaataccacaacgcgcaagccatgttcaatctggcttatatgtatgaacacggcttaggcatcacaaaggacattcacttggccagaagattgtacgacatggctgctcaaacgagtccagatgcccacatacctgtgctctttgccgtcatgaaactggaaactacgcatttgctccgggatatcctgttttttaatttcacaacgagatggaactggctgaaactggacaacaccattggaccacactgggacttatttgtgattggcctcattgttcctgggctgattttgttgcttagaaatcaccatgggtaggatgcggatcacaggaaaacctgctcacgggaatcagttcactccaaggtatccccactaaataaacagtttcccatcc

SEQ ID NO: 9518 - protein, 387 aa, Homo sapiens
MGIKVLQQSKSQKQKEEAYLLFAKAADMGNLKAMEKMADALLFGNFGVQNITAAIQLYESLAKEGSCKAQNALGFLSSYGIGMEYDQAKALIYYTFGSAGGNMMSQMILGYRYLSGINVLQNCEVALSYYKKVADYIADTFEKSEGVPVEKVRLTERPENLSSNSEILDWDIYQYYKFLAERGDVQIQVSLGQLHLIGRKGLDQDYYKALHYFLKAAKAGSANAMAFIGKMYLEGNAAVPQNNATAFKYFSMAASKGNAIGLHGLGLLYFHGKGVPLNYAEALKYFQKAAEKGWPDAQFQLGFMYYSGSGIWKDYKLAFKYFYLASQSGQPLAIYYLAKMYATGTGVVRSCRTAVEKRLTFLKKRRCIQWRFSYGIELPFKAMHLLE

SEQ ID NO: 9519 - DNA, 764 bp, Homo sapiens
tgttacagtgaagagaagctgcttaagagaagatgaagcccttgtctctgttaatagagatattgataattcttggggtcacaattaaaactatcaaagcagaggaacataataaaagacaaaaggaaagaaatgtcaccacacaggtatcagtgaacgaaatcaaacaatatttatcacacatattggaacaaagaacatctagtaatgtaatcaataaaagagaaaatctcctggagaaaaagaagaatcaacgtaaaataagaataaaaggaattcaaaataaagatatcttgaagagaaataagaatcatttacaaaagcaagcagagaaaaattttacagatgaaggagaccagctatttaagatgggcatcaaggttctccagcagtctaaaagccaaaaacaaaaagaagaagcctacctactttttgccaaagcagctgacatgggaaacttgaaagctatggagaaaatggctgacgctttgctatttggaaattttggcgtgcaaaatataacagcagctatccaattatatgagtccttggctaaagaaggatcatgtaaagcccaaaacgcattaggatttttgtcttcttatggaataggaatggaatatgatcaagctaaggcactgatatattacacctttggaagtgctggaggaaacatgatgtcccagatgattttggggtacagatatttgtcgggaatcaatgttctacagaattgtgaagttgccctaagttattacaagaaa

SEQ ID NO: 9520 - protein, 243 aa, Homo sapiens
MKPLSLLIEILIILGVTIKTIKAEEHNKRQKERNVTTQVSVNEIKQYLSHILEQRTSSNVINKRENLLEKKKNQRKIRIKGIQNKDILKRNKNHLQKQAEKNFTDEGDQLFKMGIKVLQQSKSQKQKEEAYLLFAKAADMGNLKAMEKMADALLFGNFGVQNITAAIQLYESLAKEGSCKAQNALGFLSSYGIGMEYDQAKALIYYTFGSAGGNMMSQMILGYRYLSGINVLQNCEVALSYYK

SEQ ID NO: 9521 - DNA, 711 bp, Homo sapiens
tacaaaagcaagcagagaaaaattttacagatgaaggagaccagctatttaagatgggcatcaaggttctccagcagtctaaaagccaaaaacaaaaagaagagattctaatgcctacctggatgtttctctgtctgaggtccttcttgcctggactactctgctccagcttctgcccaagagcagcttattttagcctcagcatggatgggctgtacataaagagcctacctactttttgccaaagcagctgacatgggaaacttgaaagctatggagaaaatggctgacgctttgctatttggaaattttggcgtgcaaaatataacagcagctatccaattatatgagtccttggctaaagaaggatcatgtaaagcccaaaacgtgagttttgaaggaaaatgaaaccttaaatagctccatcctgaaataactatagacagcatgtgaaaggagttgagcaatagtattccagctctgctgcatgaacccagtctagggaggttaccataatgcactgaaacagtggtgtcagggcaggagtacagcagaagcctccgaacccccaacagctaaattttatataaaatgtattcacctatatgaagaaatatgaaactgtctattatcttagggtgacatgtttgcatgatttttacttttcaaatattttataagctaaatgtaattccttttctattttaataa

SEQ ID NO: 9522 - protein, 66 aa, Homo sapiens
MGIKVLQQSKSQKQKEEILMPTWMFLCLRSFLPGLLCSSFCPRAAYFSLSMDGLYIKSLPTFCQSS

SEQ ID NO: 9523 - DNA, 535 bp, Homo sapiens
ctctgaaggcacttatcctcacggacaacacgctcgttttagggctcccctagagttccaggtttcaaaagtcacgctgcggcagcgaaggaaggaaacctagacaaggggtaaacacccgatgctatcaaagcagaggaacataataaaagacaaaaggaaagaaatgtcaccacacaggtatcagtgaacgaaatcaaacaatatttatcacacatattggaacaaagaacatctagtaatgtaatcaataaaagagaaaatctcctggagaaaaagaagaatcaacgtaaaataagaataaaaggaattcaaaataaagatatcttgaagagaaataagaatcatttacaaaagcaagcagagaaaaattttacagatgaaggagaccagctatttaagatgggcatcaaggttctccagcagtctaaaagccaaaaacaaaaagaagaagcctacctactttttgccaaagcagctgacatgggaaacttgaaagctatggagaaaatggctgacgctttgctatttggaa

SEQ ID NO: 9524 - protein, 43 aa, Homo sapiens
MGIKVLQQSKSQKQKEEAYLLFAKAADMGNLKAMEKMADALLF

SEQ ID NO: 9525 - DNA, 408 bp, Homo sapiens
taggtatcagtgaacgaaatcaaacaatatttatcacacatattggaacaaagaacatctagtaatgtaatcaataaaagagaaaatctcctggagaaaaagaagaatcaacgtaaaataagaataaaaggaattcaaaataaagatatcttgaagagaaataagaatcattggtgagaagaaaagaacaggagaagaactatgaaaacagcagatgtgaggagcaagaaagatggtgattggctgcgctaaactgaaaagttagtgaaacttcaaagttgggggattccaactgatatttttaaatcagcaatgtctaaggtgaccattaaaaattgtttttgttcctaggataactcatcttctcttctgctctatgaaatcttagataaaatgtgtattcctcat

SEQ ID NO: 9526 - protein, 57 aa, Homo sapiens
VSVNEIKQYLSHILEQRTSSNVINKRENLLEKKKNQRKIRIKGIQNKDILKRNKNHW

SEQ ID NO: 9527 - DNA, 437 bp, Homo sapiens
gaacgaaatcaaacaatatttatcacacatattggaacaaagaacatctagtaatgtaatcaataaaagagaaaatctcctggagaaaaagaagaatcaacgtaaaataagaataaaaggaattcaaaataaagatatcttgaagagaaataagaatcattaagcctggtgtcagctgatgccaagtcttcaaggatggaaagacattgccctacagaactagggagaggaacgttgacattttgtttttgaaagggtgagaagaaaagaacaggagaagaactatgaaaacagcagatgtgaggagcaagaaagatggtgattggctgcgctaaactgaaaagttagtgaaacttcaaagttgggggattccaactgatatttttaaatcagcaatgtctaaggtgaccattaaaaattgtttttgttcctaggat

SEQ ID NO: 9528 - protein, 53 aa, Homo sapiens
NEIKQYLSHILEQRTSSNVINKRENLLEKKKNQRKIRIKGIQNKDILKRNKNH

SEQ ID NO: 9529 - DNA, 351 bp, Homo sapiens
ggtatcagtgaacgaaatcaaacaatatttatcacacatattggaacaaagaacatctagtaatgtaatcaataaaagagaaaatctcctggagaaaaagaagaatcaacgtaaaataagaataaaaggaattcaaaataaagatatcttgaagagaaataagaatcattggtgagaagaaaagaacaggagaagaactatgaaaacagcagatgtgaggagcaagaaagatggtgattggctgcgctaaactgaaaagttagtgaaacttcaaagttgggggattccaactgatatttttaaatcagcaatgtctaaggtgaccattaaaaattgtttttgttcctagga

SEQ ID NO: 9530 - protein, 57 aa, Homo sapiens; identical to SEQ ID NO: 9526

SEQ ID NO: 9531 - DNA, 530 bp, Homo sapiens
aagagagaaagtagagacataatgattatagagttcttcctggattgtggcagtgttcaggatcagactctagctatcaatagatcgttcattaattgtgggtgtatagagaaccagggaaggagttagtggaagagaaaacagttattttttaaaagctagtgctggcgggccacagtggttcatacctacaatcccagcactttgggaggtccaggcgggcagatcacgtgaggtcgggagtttgagaccagcctgaccaacatggagaaaccccgtctctactaaaaatacaaaattagctgggcgtggtggtgcatgcctgtaatcccagctactccagaggctgaggcgggagaatcgcttgaacttgggaggcagagggttgcagtgagttgagatcgtgccattgcactccagcctgggcaacaagagcgaaactcctatctctactaaaaataaaaaaattagccaggcacatgcctgtaatcccagctacttgggagcctgaggcaggagaatagcttgaa

SEQ ID NO: 9532 - protein, 35 aa, Homo sapiens
MIIEFFLDCGSVQDQTLAINRSFINCGCIENQGRS

SEQ ID NO: 9533 - DNA, 1425 bp, Homo sapiens
gcgtgcgccctggggcccaagttggggcgcgccgtggctagaacacggagagcggcgggcagtgcagccaatgggaggcggcgctgcctagcggctggtaggcggtgcctgcgcgggtgttaggttagcgcgaggcgtgacctagttgacaggctctgaggtgctgctgtggcggcgtccgcggggctgaggcgggtgggagccggagccgagcgcgggctgagggaggagggcggcgactggagagcggcgagcggcgagcagcgcaggacgcagagcctctttcactttttccctgctgagtgccccctcccacccctcccactccacacacaccctgtttgcccgtgagcctggggaacttgcagcttaaagccagccacccccacggcaacatgtaccccagcaacaagaagaaaaaggtgtggagagaggagaaagaacgtttattgaagatgaccttagaagagagacgcaaagaatacctaagagactatattcccctgaacagcattctatcatggaaggaggagatgaagggcaagggccaaaatgatggatgcatctctcatggttgaagaagtggtggaggatggcatgggaaagagtgcctgaggatccttgcctggaacaagttatggaaagaaagtcttacagcttgggctctaggaaaagagccttttatcccaccttgtcttccagtccattttgaatcaagaaagactcattgaagactcctttgagaaaagtctgttttgaagaaggaaaaagaaatactgtttgagagaaggcaaacagacaaaaagggtgatagaaatatgtatttttgttgtatatgtaactctaagagaccttcctagagtgaatgaaggtagaaaactgaaaagggagtaaattaaggaatgattgaattttgtgggtcttgatggaaaaacgctggtcttcttttaatgtggaaaaacagctagtgcttcagtcctaggaattatgtctctgctgtgggcagttgtcataaactcttctcacaatccgagctgctctttgtcctctgtgaatgaaggtacttttgcttccatttcatccaaggatgaatgaaaatgtatagcatctgcccaaacctaaaaagtacagtgtgtttatcacgagagctttgtaaggtacttcacttccactttaaaattctttagtgctcaaaaccaactattgtgggtttttgtcaataaatactaatttttcaagatgaagtatggtgatttctattcatattgtggtcaattttctcaattttgtttcccatagatagcgtgatggaacttaaattttattttttacacttaaataactgtgctttttgtgatgcgtaatcatgattttctcttttccttgagattttaacagaccttatattagtgcatatgtcaaaat

SEQ ID NO: 9534 - protein, 60 aa, Homo sapiens
MYPSNKKKKVWREEKERLLKMTLEERRKEYLRDYIPLNSILSWKEEMKGKGQNDGCISHG

SEQ ID NO: 9535 - DNA, 4998 bp, Homo sapiens
gcgtgcgccctggggcccaagttggggcgcgccgtggctagaacacggagagcggcgggcagtgcagccaatgggaggcggcgctgcctagcggctggtaggcggtgcctgcgcgggtgttaggttagcgcgaggcgtgacctagttgacaggctctgaggtgctgctgtggcggcgtccgcggggctgaggcgggtgggagccggagccgagcgcgggctgagggaggagggcggcgactggagagcggcgagcggcgagcagcgcaggacgcagagcctctttcactttttccctgctgagtgccccctcccacccctcccactccacacacaccctgtttgcccgtgagcctggggaacttgcagcttaaagccagccacccccacggcaacatgtaccccagcaacaagaagaaaaaggtgtggagagaggagaaagaacgtttattgaagatgaccttagaagagagacgcaaagaatacctaagagactatattcccctgaacagcattctatcatggaaggaggagatgaagggcaagggccaaaatgatgaagaaaatactcaggaaacatcccaggtgaagaaaagtttgactgaaaaagtttctctctatagaggtgacatcacattgctagaggtagatgctatagtcaatgccgcaaatgccagtcttcttggaggaggaggtgtggatggctgtattcatagagcagccggcccctgtttgctagctgaatgtcgtaacctgaatggctgtgatactggacatgcaaaaatcacatgtggctatgaccttcctgcaaaatatgtcatccatactgtagggccaatagccaggggccatattaatggttcccacaaggaagaccttgcaaattgctataaatcatctctgaagctcgtgaaagaaaataacatccgatcagttgcatttccctgcatctcaacaggcatttatggctttcccaacgagcctgctgcagtcattgccctcaacaccattaaggaatggcttgccaagaatcaccatgaggtggatcggatcattttctgtgtcttcttagaagttgacttcaaaatctacaaaaagaaaatgaatgagtttttctccgtagacgataataatgaagaagaagaggatgttgaaatgaaagaagattcagatgagaacggtccagaggagaagcaaagtgtggaagaaatggaagagcagagccaagatgcagatggtgtcaacactgtcactgtgcccggccctgcttcagaagaggcagttgaagactgtaaagatgaagattttgcaaaggatgaaaatattacaaaaggcggtgaagtgacagatcattctgtgcgtgaccaagatcatcccgatggacaagagaatgattcaacgaagaatgaaataaaaattgaaacagaatcgcagagctcatatatggaaacagaagaactttcatcaaaccaagaagatgccgtgattgtggagcaaccagaagtgattccattaacagaggaccaagaagaaaaagaaggtgaaaaagctccaggcgaggacacacctaggatgcctgggaaaagtgaaggctccagtgacctagaaaatactccaggtcctgatgcaggggcacaagatgaagcgaaggaacaaagaaatggaactaaatgacaatcctcagcatcgcaaggcctctcctggctctgggggagctcgggaagatagcagcacacgctgtggaggagggtgggggtggggggaaggcaagtcccatggaaggacggggaatcctttactctaatttctccagctgcattttgttccgtttatctgcagaaaaagaaagaaaaaaaagaaaaaaaaagtttcctttaatttggtggagggacccatgttgacgcatctttcaggcattatccttgtaatttctgtcttttctcttacaactttgccccagggtcacagtggcttgattgaacactcacatgtgtatcctggcccctgtctgctttcttggttatttcacaaagctggtcacacagtggtttattcaaaggaaggggaggaagacagtggtttgataagctgcaggataaattttaggaatcaatgagcccagcagcagtataatccccagacagaggaggcaggatagaaaatgggcaaaagcctcggaaaccacttggaaaaggtctggacaatgaggtgaaaatattttcttcagggttcccaaggcacaatttgttccaagtggctaatgagaaatatggaagctgaattttttccagagcagagtgcagaggcataacagaagggtgggccctggcagccatctgggtctcttccttcctaaccatggtggcaggtgcatccttctttgacactgactttcagcagagcttacttggttcatgaggtcttcacatggagactaccagcaagaggtgactctctgctgcataactgtaaaggatggccctttgctaggtgttacagttaaaagctaagaaaaggggcagtgcatttaggacccaaacatatgcctatgaatatcaaaagctcctcctgaaattgctgtgagttttccataaaagaatatcctgtcttcacccaaggcttgacagcccacagagtggtctcatttgaaattacaggaaattagagcttttgcttgcagttctgccttcctggcctgtgtttaaatgctgtcacttgtttatgccaagttcaaggctgattcaatggttggtcccctcacccagaaaaccctgaaggggaggatacagctctgaaggggggcagcagtactaaaaacccaagatgccagtggtatagtgggcacaagggatggcgaccatgaggatgccaggcatcatcaccaatatctatcctagagccagtataaggccagatgcctacttcccacagcctccccgggttccaaagtcatgtcattgttttcagtggaaacatatcgtttgttgcatatcttcttaaatccatcttccttgtaagggctttagaactaaaacttacttatattgtttttccttaacagagggagaaaaatagtggattattatttctaaaataaaaggatgttctgctttctaaatatcccatcaaaatcttcagttttgcacttttttgatggaaaattcatcttatcttcctatgactttggttttagcctttctgaatttgttaccccttctggatggcttatttgatatactggaatagttaacaagctatacttcagcatatgcactatattctaacaaattttttttaataaaatcaagacatcagcaagaatgacatttacgtgacctcataatgtgggattatggccttctgttgctattccagtttgatatggaagcatctatatcctctattgccgttagatgttgttgcttttcagaaaagtaacgaaaaggctcattttaaagaatccaagaaacgatgtcatccaaatattgacagtttctacatttcatgccatctttataactcaattgaaagttgccgtcattcttgtgaagtatttgacaagtgcaatctgctagaagctcgtttttcttgtgactcccaaatgttagtgctacttagcctcagtaatgagttacagttgaaaaaaacatgagggaaacagagggacagagattttctaatgaacaatgatggaagagacctaatgtccttgctagaaacagccaggatggaaattatccagccctggcattctccttatcatcaatgacagtcattttattcatttatttcaaatgtgggtgggctagaagtggaaggagggaattctctctgcctaaaaattctagaagaatgaaagtaatctttgtatccaggaaactaagagaatgaggaataaatatcttcagcccgactcctgaatttgtttattcttccatctataattagattgtgttttcatttttgctttgtcatgctttttggttgttatttggctatacagttttatgctttaaaacaaatgataaagttaatttccaattcaatagtgaaatattaacaatctaactatagccagatcaaagacacctgaacacagaaaacctttatttgctggtgctgccattgcacaggctgtacaatgaaatagatttgaaaagctgattgattttcccgcacataaattctggatgtcaatttccaaccaaactccaatacagctatgtggcatgaagagttacaggagggagggaggaaaatagccctatgttagtcatgtttgcatacagaggatcaaagtaggccttcaccataatagttctaattaaaatggtcctcgctgtaggagagacaaaggggcttttcctctagctggtaactattcagatgatggacaagtcttctttcataaaagattacaaagaaggcatccgaatcactgtctgtgatactgggtcacatattaatcactgcagctaattgtaaatctttctatgaaacactgaaaagcctctttgtgaattaatacagttctgcttgatgcacttgatttgaaaagacatttctctgtatgtggcgcatgtcggctttgctttgaaaaataacaaagttagcagaatatgttcaatatattttcttggggaatagggtttttattacatgattcattaaggatttgccttaccctgacatttgtgatataaaggaaaatcagaaaaaaagtaattttcttgatcaagatatgtttttacttaatgcaaataaatgtagtctgttgcttgcaaggaaaaaaaaatggcttctgatatctggtataaactgctaaataggataatacgtgcctcttttgttaaaccggcatttaaatgctggactgcttctaaatctgtttgtttcttttcatctgtgccatacactaaaaaacaactgttgccttcatactatatttgttagagcagaatacaaataaaatttgtttgagaggataatgtgaaattat

SEQ ID NO: 9536 - protein, 425 aa, Homo sapiens
MYPSNKKKKVWREEKERLLKMTLEERRKEYLRDYIPLNSILSWKEEMKGKGQNDEENTQETSQVKKSLTEKVSLYRGDITLLEVDAIVNAANASLLGGGGVDGCIHRAAGPCLLAECRNLNGCDTGHAKITCGYDLPAKYVIHTVGPIARGHINGSHKEDLANCYKSSLKLVKENNIRSVAFPCISTGIYGFPNEPAAVIALNTIKEWLAKNHHEVDRIIFCVFLEVDFKIYKKKMNEFFSVDDNNEEEEDVEMKEDSDENGPEEKQSVEEMEEQSQDADGVNTVTVPGPASEEAVEDCKDEDFAKDENITKGGEVTDHSVRDQDHPDGQENDSTKNEIKIETESQSSYMETEELSSNQEDAVIVEQPEVIPLTEDQEEKEGEKAPGEDTPRMPGKSEGSSDLENTPGPDAGAQDEAKEQRNGTK

SEQ ID NO: 9537 - DNA, 4674 bp, Homo sapiens
aactagcaccctcgctgtccttgtgcagtggaacgtccccaggtctgagaatgcacctcccgccgtgtccaccccggccgcgtctctcctgaaggcagatcttggaggtgcagccaggactcctagaggagcctcctccagtcaccatcgcgggtggggcgagccgggtctcctgctgggcttcccagccgcttcgctccggacctgcctggagcctacaaaaaacaagggctcgtccttgcactctcgccccccatggatcacccctagaagtggaaggcggccgccgggttcctcttctgtgtcatggtttttgcatctgctgagcgaccggtcttcacgaatcattttcttgtggagttgcataaagggggagaggacaaagctcgccaagttgcagcagaacacggctttggagtccgaaagcttccctttgctgaaggtctgtaccacttttatcacaatggccttgcaaaggccaagagaagacgcagcctacaccacaagcagcagctggagagagaccccagggtaaagatggctttgcagcaggaaggatttgaccgaaaaaagcgaggttacagagacatcaatgagatcgacatcaacatgaacgatcctctttttacaaagcagtggtatctgatcaatactgggcaagctgatggcactcctggccttgatttgaatgtggctgaagcctgggagctgggatacacagggaaaggtgttaccattggaattatggatgatgggattgactatctccacccggacctggcctccaactataatgccgaagcaagttacgacttcagcagcaacgacccctatccttaccctcggtacacagatgactggtttaacagccacgggacccgatgtgcaggagaagtttctgctgccgccaacaacaatatctgtggagttggagtagcatacaactccaaggttgcaggcatccggatgctggaccagccattcatgacagacatcatcgaggcctcctccatcagtcatatgccacagctgattgacatctacagcgccagctggggccccacagacaacggcaagacagtggatgggccccgggagctcacgctgcaggccatggccgatggcgtgaacaagggccgcggcggcaaaggcagcatctacgtgtgggcctccggggacggcggcagctatgacgactgcaactgcgacggctacgcctccagcatgtggaccatctccatcaactcagccatcaacgacggcaggactgccctgtacgacgagagctgctcttccaccttggcttccaccttcagcaacgggaggaaaaggaaccccgaggccggtgtggcaaccacagatttgtacggcaactgcactctgaggcattctgggacatctgcagctgcccccgaggcagctggtgtgtttgcactggctctggaggctaacctgggtctgacctggcgggacatgcagcatctgactgtgctcacctccaaacggaaccagcttcacgacgaggtccatcagtggcggcgcaatggggtcggcctggaatttaatcacctctttggctacggggtccttgatgcaggtgccatggtgaaaatggctaaagactggaaaaccgtgcctgagagattccactgtgtgggaggctccgtgcaggaccctgagaaaataccatccactggcaagttggtgctgacactcacaaccgacgcctgtgaggggaaggaaaattttgtccgctacctggagcatgtccaggctgtcatcacggtcaacgcaaccagaagaggagacctgaacatcaacatgacttcccctatgggcaccaagtccattttgctgagccggcgtccaagggatgacgactccaaggtgggctttgacaagtggcctttcatgaccactcacacgtggggggaagacgcccgaggcacctggaccctggagctgggatttgtcggcagcgccccgcagaagggggtgctgaaggagtggaccctgatgctgcatggcactcagagtgccccgtacatcgaccaggtggtgcgggattaccagtccaagttggccatgtccaagaaagaggagctggaggaagagctggacgaagccgtggagagaagcctgaaaagcatccttaacaagaactagcgctgcacatccgcctttcccaccgccctccctccccagctccgcctctgtcctcgctccacgtttcaggcaggcacctagcaattccatcacccgtacaggcaattccgtcttcttaatctgaagcttcactcactgtcaatgattattttcattacaatggaaacaatcttttttactctatgccccaaatatagcgttcccaacaacatccatgtcctatgtgtgactctaaattctttatttctgtcattcaaatgggtgatatcctgaaaaaaaaaaaaaaaaaaaaactgggacagctttcccctcatttttttttttgtttctgagaaaagaacgtattttaaaagccacatagagtgactccaagaacaattgtccatggtctcaaacaaggggctgttacataacaagaaaatcaaagctgaggacagggtgtgagcgccacatctctgaaagcacaggagacactgtgctataaatcctttggggagcgatgttttgaatttagtgagatttaccagggatgtagattaaggtgatgtgattcaaaagatgccattcatagagagccctagttactgcatggggaaagagatccaggaagcatgagtgctggatattttactaccaatgccaagataattcactctactcagccggcgtggcaaatataaaacttacagagcgtggctgtgctctcaccagctgctgctctgagttatgttaaaatccgctagagcagcccaaatttttctcagtttgtatagagttcatcccagccccaattttctggggctcctcacatagctacccaaaagagaaaaaaaattaagacaagcctggcaacacacctggtgaagagtagtttactagcttttcaaacaagaatgtcccttttcctaagtcactttgaggtgtctcaatctgatctgagtgagaggcgacaggagtatttttttttttttacagctttacacacacagatgtgggctttgatttccaagtaatataatggaagagaaatctcatactcccccacagtttgatgtcattaatgtgttgggaaaaaggcctctgtcccggaagagtcatgggaggtgaaaggggcacgtttgaagatgcgagcgctatcttcacatagttctccagttgtatggagcctcttctgccaagagagggccatgcaattcatcccagaggaacctgaggcctgaaggaggtgagagaagacctctgtgaggaaagcacacagtcaccttctcggcaactaagcagtccctgagaccatttaacatgcaacccgaaggttatggtcaatcccaaaagtcaccactccattcccaactagacattaccaaagtgacctacccagagattgcttctcatccccagtcccaatgcacatccattcccaagaaatgctttgtcttcagcctctccaggcaccatctcccttcctgtgggagcagagagcttagcctggagcacctttccttcaagccagcaacacagagcactaggttcaattccctgaaggtggccactttaagagagaaatctgaaaaccccatttgctttcttttctcccatattggcatggatttctgtcttctctaacaccttgtgaccttctctatatcatgctttaaagtgtaataatatgattttttaaaagaaatttattacttgttgcaaaggtctttttaaaccagtttagatttcaagaaaaaataaatggaaatcatcgaaaattcatttcacattaatggtctaaaaataaaccaaaggacattatgtgtgcatgtgtgtataagtgcacacagaaatatatatacatatgtagactatatacatgtgtgtatatatgtgtatatatacatacacttgtataaatgtatatacacatatacctataatgtgtgtatgtgtatttattgaagaaacagataccatactcatttctaaaagaatattcagagaatatcaagatgattctggctgaaaaaggccagtggaaattcaggtgaaaatgttcatcaattcccattgcatcacctctgtaatttttcagctctctgtataaacattaaatgtcttatatagcagcaaaaatataaaatagttgtccatattttcacaggtgtggtgtaatttataaaattagaaagcaacttatcagctacttaagagaaatggcaagttttgatatgagtatacaatatataaaaatatatatagtgctatatatataaatatttggtctctatttcattttttgcatcagtattaatactaaaatatgtctcgctagtgatgtttttatgatatccctgatcctaactgaagagacagttatttatagtcatttattttaaaaaatgaaaataagtgaataataattaggttaacattgttgctccctgtgacaaaattttataagcaaatttcaaaagacatgttgtaaattaggaggctcaacaataaaacattatgctccagaaa

SEQ ID NO: 9538 - protein, 619 aa, Homo sapiens
MVFASAERPVFTNHFLVELHKGGEDKARQVAAEHGFGVRKLPFAEGLYHFYHNGLAKAKRRRSLHHKQQLERDPRVKMALQQEGFDRKKRGYRDINEIDINMNDPLFTKQWYLINTGQADGTPGLDLNVAEAWELGYTGKGVTIGIMDDGIDYLHPDLASNYNAEASYDFSSNDPYPYPRYTDDWFNSHGTRCAGEVSAAANNNICGVGVAYNSKVAGIRMLDQPFMTDIIEASSISHMPQLIDIYSASWGPTDNGKTVDGPRELTLQAMADGVNKGRGGKGSIYVWASGDGGSYDDCNCDGYASSMWTISINSAINDGRTALYDESCSSTLASTFSNGRKRNPEAGVATTDLYGNCTLRHSGTSAAAPEAAGVFALALEANLGLTWRDMQHLTVLTSKRNQLHDEVHQWRRNGVGLEFNHLFGYGVLDAGAMVKMAKDWKTVPERFHCVGGSVQDPEKIPSTGKLVLTLTTDACEGKENFVRYLEHVQAVITVNATRRGDLNINMTSPMGTKSILLSRRPRDDDSKVGFDKWPFMTTHTWGEDARGTWTLELGFVGSAPQKGVLKEWTLMLHGTQSAPYIDQVVRDYQSKLAMSKKEELEEELDEAVERSLKSILNKN

SEQ ID NO: 9539 - DNA, 2485 bp, Homo sapiens
gagctggtgctctcccccagcccctagggaattggagctgaggaggagctgaaaatgcagatttagcatcaagcacagacctacactcgctctttctctccggtacacacagctccccacattcgcacccctgcccgcgcgccgggccgcctgactgcacggcttcccctccagccagatgctggagaacacacactgattcgctgctttccaagaccctgttcagtctctttctctatacaaagatttttttaaaaactatatataagaattctttatttgcaccctccctccgagtcccctgctccgccagcctgcgcgcctcctagcaccacttttcactcccaaagaaggatgaagggtggttgtgtctcccagtggaaggcggccgccgggttcctcttctgtgtcatggtttttgcatctgctgagcgaccggtcttcacgaatcattttcttgtggagttgcataaagggggagaggacaaagctcgccaagttgcagcagaacacggctttggagtccgaaagcttccctttgctgaaggtctgtaccacttttatcacaatggccttgcaaaggccaagagaagacgcagcctacaccacaagcagcagctggagagagaccccagggtaaagatggctttgcagcaggaaggatttgaccgaaaaaagcgaggttacagagacatcaatgagatcgacatcaacatgaacgatcctctttttacaaagcagtggtatctgatcaatactgggcaagctgatggcactcctggccttgatttgaatgtggctgaagcctgggagctgggatacacagggaaaggtgttaccattggaattatggatgatgggattgactatctccacccggacctggcctccaactataatgccgaagcaagttacgacttcagcagcaacgacccctatccttaccctcggtacacagatgactggtttaacagccacgggacccgatgtgcaggagaagtttctgctgccgccaacaacaatatctgtggagttggagtagcatacaactccaaggttgcaggcatccggatgctggaccagccattcatgacagacatcatcgaggcctcctccatcagtcatatgccacagctgattgacatctacagcgccagctggggccccacagacaacggcaagacagtggatgggccccgggagctcacgctgcaggccatggccgatggcgtgaacaagggccgcggcggcaaaggcagcatctacgtgtgggcctccggggacggcggcagctatgacgactgcaactgcgacggctacgcctccagcatgtggaccatctccatcaactcagccatcaacgacggcaggactgccctgtacgacgagagctgctcttccaccttggcttccaccttcagcaacgggaggaaaaggaaccccgaggccggtgtggcaaccacagatttgtacggcaactgcactctgaggcattctgggacatctgcagctgcccccgaggcagctggtgtgtttgcactggctctggaggctaacctgggtctgacctggcgggacatgcagcatctgactgtgctcacctccaaacggaaccagcttcacgacgaggtccatcagtggcggcgcaatggggtcggcctggaatttaatcacctctttggctacggggtccttgatgcaggtgccatggtgaaaatggctaaagactggaaaaccgtgcctgagagattccactgtgtgggaggctccgtgcaggaccctgagaaaataccatccactggcaagttggtgctgacactcacaaccgacgcctgtgaggggaaggaaaattttgtccgctacctggagcatgtccaggctgtcatcacggtcaacgcaaccagaagaggagacctgaacatcaacatgacttcccctatgggcaccaagtccattttgctgagccggcgtccaagggatgacgactccaaggtgggctttgacaagtggcctttcatgaccactcacacgtggggggaagacgcccgaggcacctggaccctggagctgggatttgtcggcagcgccccgcagaagggggtgctgaaggagtggaccctgatgctgcatggcactcagagtgccccgtacatcgaccaggtggtgcgggattaccagtccaagttggccatgtccaagaaagaggagctggaggaagagctggacgaagccgtggagagaagcctgaaaagcatccttaacaagaactagcgctgcacatccgcctttcccaccgccctccctccccagctccgcctctgtcctcgctccacgtttcaggcaggcacctagcaattccatcacccgtacaggcaattccgtcttcttaatctgaagcttcactcactgtcaatgattattttcattacaatggaaacaatcttttttactctatgccccaaatatagcgttcccaacaacatcc

SEQ ID NO: 9540 - protein, 638 aa, Homo sapiens
MKGGCVSQWKAAAGFLFCVMVFASAERPVFTNHFLVELHKGGEDKARQVAAEHGFGVRKLPFAEGLYHFYHNGLAKAKRRRSLHHKQQLERDPRVKMALQQEGFDRKKRGYRDINEIDINMNDPLFTKQWYLINTGQADGTPGLDLNVAEAWELGYTGKGVTIGIMDDGIDYLHPDLASNYNAEASYDFSSNDPYPYPRYTDDWFNSHGTRCAGEVSAAANNNICGVGVAYNSKVAGIRMLDQPFMTDIIEASSISHMPQLIDIYSASWGPTDNGKTVDGPRELTLQAMADGVNKGRGGKGSIYVWASGDGGSYDDCNCDGYASSMWTISINSAINDGRTALYDESCSSTLASTFSNGRKRNPEAGVATTDLYGNCTLRHSGTSAAAPEAAGVFALALEANLGLTWRDMQHLTVLTSKRNQLHDEVHQWRRNGVGLEFNHLFGYGVLDAGAMVKMAKDWKTVPERFHCVGGSVQDPEKIPSTGKLVLTLTTDACEGKENFVRYLEHVQAVITVNATRRGDLNINMTSPMGTKSILLSRRPRDDDSKVGFDKWPFMTTHTWGEDARGTWTLELGFVGSAPQKGVLKEWTLMLHGTQSAPYIDQVVRDYQSKLAMSKKEELEEELDEAVERSLKSILNKN

SEQ ID NO: 9541 - DNA, 4779 bp, Homo sapiens
gagctggtgctctcccccagcccctagggaattggagctgaggaggagctgaaaatgcagatttagcatcaagcacagacctacactcgctctttctctccggtacacacagctccccacattcgcacccctgcccgcgcgccgggccgcctgactgcacggcttcccctccagccagatgctggagaacacacactgattcgctgctttccaagaccctgttcagtctctttctctatacaaagatttttttaaaaactatatataagaattctttatttgcaccctccctccgagtcccctgctccgccagcctgcgcgcctcctagcaccacttttcactcccaaagaaggatgaagggtggttgtgtctcccagtggaaggcggccgccgggttcctcttctgtgtcatggtttttgcatctgctgagcgaccggtcttcacgaatcattttcttgtggagttgcataaagggggagaggacaaagctcgccaagttgcagcagaacacggctttggagtccgaaagcttccctttgctgaaggtctgtaccacttttatcacaatggccttgcaaaggccaagagaagacgcagcctacaccacaagcagcagctggagagagaccccagggtaaagatggctttgcagcaggaaggatttgaccgaaaaaagcgaggttacagagacatcaatgagatcgacatcaacatgaacgatcctctttttacaaagcagtggtatctgatcaatactgggcaagctgatggcactcctggccttgatttgaatgtggctgaagcctgggagctgggatacacagggaaaggtgttaccattggaattatggatgatgggattgactatctccacccggacctggcctccaactataatgccgaagcaagttacgacttcagcagcaacgacccctatccttaccctcggtacacagatgactggtttaacagccacgggacccgatgtgcaggagaagtttctgctgccgccaacaacaatatctgtggagttggagtagcatacaactccaaggttgcaggcatccggatgctggaccagccattcatgacagacatcatcgaggcctcctccatcagtcatatgccacagctgattgacatctacagcgccagctggggccccacagacaacggcaagacagtggatgggccccgggagctcacgctgcaggccatggccgatggcgtgaacaagggccgcggcggcaaaggcagcatctacgtgtgggcctccggggacggcggcagctatgacgactgcaactgcgacggctacgcctccagcatgtggaccatctccatcaactcagccatcaacgacggcaggactgccctgtacgacgagagctgctcttccaccttggcttccaccttcagcaacgggaggaaaaggaaccccgaggccggtgtggcaaccacagatttgtacggcaactgcactctgaggcattctgggacatctgcagctgcccccgaggcagctggtgtgtttgcactggctctggaggctaacctgggtctgacctggcgggacatgcagcatctgactgtgctcacctccaaacggaaccagcttcacgacgaggtccatcagtggcggcgcaatggggtcggcctggaatttaatcacctctttggctacggggtccttgatgcaggtgccatggtgaaaatggctaaagactggaaaaccgtgcctgagagattccactgtgtgggaggctccgtgcaggaccctgagaaaataccatccactggcaagttggtgctgacactcacaaccgacgcctgtgaggggaaggaaaattttgtccgctacctggagcatgtccaggctgtcatcacggtcaacgcaaccagaagaggagacctgaacatcaacatgacttcccctatgggcaccaagtccattttgctgagccggcgtccaagggatgacgactccaaggtgggctttgacaagtggcctttcatgaccactcacacgtggggggaagacgcccgaggcacctggaccctggagctgggatttgtcggcagcgccccgcagaagggggtgctgaaggagtggaccctgatgctgcatggcactcagagtgccccgtacatcgaccaggtggtgcgggattaccagtccaagttggccatgtccaagaaagaggagctggaggaagagctggacgaagccgtggagagaagcctgaaaagcatccttaacaagaactagcgctgcacatccgcctttcccaccgccctccctccccagctccgcctctgtcctcgctccacgtttcaggcaggcacctagcaattccatcacccgtacaggcaattccgtcttcttaatctgaagcttcactcactgtcaatgattattttcattacaatggaaacaatcttttttactctatgccccaaatatagcgttcccaacaacatccatgtcctatgtgtgactctaaattctttatttctgtcattcaaatgggtgatatcctgaaaaaaaaaaaaaaaaaaaaactgggacagctttcccctcatttttttttttgtttctgagaaaagaacgtattttaaaagccacatagagtgactccaagaacaattgtccatggtctcaaacaaggggctgttacataacaagaaaatcaaagctgaggacagggtgtgagcgccacatctctgaaagcacaggagacactgtgctataaatcctttggggagcgatgttttgaatttagtgagatttaccagggatgtagattaaggtgatgtgattcaaaagatgccattcatagagagccctagttactgcatggggaaagagatccaggaagcatgagtgctggatattttactaccaatgccaagataattcactctactcagccggcgtggcaaatataaaacttacagagcgtggctgtgctctcaccagctgctgctctgagttatgttaaaatccgctagagcagcccaaatttttctcagtttgtatagagttcatcccagccccaattttctggggctcctcacatagctacccaaaagagaaaaaaaattaagacaagcctggcaacacacctggtgaagagtagtttactagcttttcaaacaagaatgtcccttttcctaagtcactttgaggtgtctcaatctgatctgagtgagaggcgacaggagtatttttttttttttacagctttacacacacagatgtgggctttgatttccaagtaatataatggaagagaaatctcatactcccccacagtttgatgtcattaatgtgttgggaaaaaggcctctgtcccggaagagtcatgggaggtgaaaggggcacgtttgaagatgcgagcgctatcttcacatagttctccagttgtatggagcctcttctgccaagagagggccatgcaattcatcccagaggaacctgaggcctgaaggaggtgagagaagacctctgtgaggaaagcacacagtcaccttctcggcaactaagcagtccctgagaccatttaacatgcaacccgaaggttatggtcaatcccaaaagtcaccactccattcccaactagacattaccaaagtgacctacccagagattgcttctcatccccagtcccaatgcacatccattcccaagaaatgctttgtcttcagcctctccaggcaccatctcccttcctgtgggagcagagagcttagcctggagcacctttccttcaagccagcaacacagagcactaggttcaattccctgaaggtggccactttaagagagaaatctgaaaaccccatttgctttcttttctcccatattggcatggatttctgtcttctctaacaccttgtgaccttctctatatcatgctttaaagtgtaataatatgattttttaaaagaaatttattacttgttgcaaaggtctttttaaaccagtttagatttcaagaaaaaataaatggaaatcatcgaaaattcatttcacattaatggtctaaaaataaaccaaaggacattatgtgtgcatgtgtgtataagtgcacacagaaatatatatacatatgtagactatatacatgtgtgtatatatgtgtatatatacatacacttgtataaatgtatatacacatatacctataatgtgtgtatgtgtatttattgaagaaacagataccatactcatttctaaaagaatattcagagaatatcaagatgattctggctgaaaaaggccagtggaaattcaggtgaaaatgttcatcaattcccattgcatcacctctgtaatttttcagctctctgtataaacattaaatgtcttatatagcagcaaaaatataaaatagttgtccatattttcacaggtgtggtgtaatttataaaattagaaagcaacttatcagctacttaagagaaatggcaagttttgatatgagtatacaatatataaaaatatatatagtgctatatatataaatatttggtctctatttcattttttgcatcagtattaatactaaaatatgtctcgctagtgatgtttttatgatatccctgatcctaactgaagagacagttatttatagtcatttattttaaaaaatgaaaataagtgaataataattaggttaacattgttgctccctgtgacaaaattttataagcaaatttcaaaagacatgttgtaaattaggaggctcaacaataaaacattatgctccagaaa

SEQ ID NO: 9542 - protein, 638 aa, Homo sapiens; identical to SEQ ID NO: 9540

SEQ ID NO: 9543 - DNA, 534 bp, Homo sapiens
aagataacaataaaaacaccgaaagccaaggtgaccatgtcaatctagaaccatgggttgcacgggacagagaagactgagagagaggatgcatctgagagggctgggacgtgtgcagaagcacaagtttggatgggaagtctccagcaggcatcctactcccccaagacagcatcttttgccagttgctgtttatggattttctccacactccaaatcacatacttatacctccgttcctcagttaccatctttagacaacagctattcactccccaatacctaagatgagcatttagctcactactcccaatgtctgaactttcatgactatttttgactcctgcatgagcatttcctcttctgacagcagtcgctgattcccagctctgtaagatgaggacatcagtgcccctccctttctttctgcttttctcttcccttcttcaatcactcgtgttttgtgcctctgcttctaccacttcatagcactgtggtgtttaatctcgggtgcctgggcttcctgggagagca

SEQ ID NO: 9544 - protein, 77 aa, Homo sapiens
MGCTGQRRLRERMHLRGLGRVQKHKFGWEVSSRHPTPPRQHLLPVAVYGFSPHSKSHTYTSVPQLPSLDNSYSLPNT

SEQ ID NO: 9545 - DNA, 536 bp, Homo sapiens
gttgcatgctgagtttgggggagcagaagagtctcgcggggatagtcagtgcgcagggagactagcacaggccggcagagaagtgacccagccccggattgcctggtaaccttccgttcccaggaggctgctgtgaggctcctctggcttcatggagtataatggacccacagccatctccttccccaacaccaactctgcctgcattttaggccaggtttgtaggagagttgaatgaagattgaatgaatgaatgatgaaaagtacaaaatgccatcacttcacttctttcaggaagacccaggacactctgctgcatcctccacctgtttgtgaattaaatgtccatgatggcttttactaagcacttactatgtgccaggcactgtgctgagctctgcacctttaagaggcagcaagtcgtgactggttcagagctggctcagagctgcctgagttggaagcctcggataggaaaatggaagcttaaagaggttaagccctggccaagcacagtagctcgtgcctgtaattcc

SEQ ID NO: 9546 - protein, 64 aa, Homo sapiens
MSMMAFTKHLLCARHCAELCTFKRQQVVTGSELAQSCLSWKPRIGKWKLKEVKPWPSTVARACN

SEQ ID NO: 9547 - DNA, 632 bp, Homo sapiens
gttcgtgtggctgttggcaggaggcctcagtttttcaccttctggacgcctgcacagggctgcttaagcagcctcacaacatggcagctgactctcgccatcgtgagtgattcaagagagagcaagatggaagccgcaatatctatgatgacctggtcacagtctgtcatttccacaactggtaacacaggttggccaagttcaagccccagttccgggatggagagctccatgccttggccctgccagtgggacttctgcatgtgctgggagagaagaaaggtttcctttgagccctgccaggatcttgttacagtctccacagagcaagacttcagggtcagggtgttgcattatgaagacaggagccgtggagcctccagcaggagacaatggcttccattgagataatatgacttaacgaggccacaagtccacagccaccactcaggaaacaataaccatttcaagagggcacaggaggtgttacagagaggcgtggtgacacaccccacccaccgtggcctcagagatggtgctaagggagaaagtttgctgggatttgtctgaaaaggtcagttattaaaaacagcttctggctgggcgcgctggctcacacctataatcctacc

SEQ ID NO: 9548 - protein, 94 aa, Homo sapiens
MEAAISMMTWSQSVISTTGNTGWPSSSPSSGMESSMPWPCQWDFCMCWERRKVSFEPCQDLVTVSTEQDFRVRVLHYEDRSRGASSRRQWLPLR

SEQ ID NO: 9549 - DNA, 1297 bp, Homo sapiens
cttgggtcctcctccctctgcctctgttcagctccaccttgatgctgactaggctgggccatgaggagagggttaggggatagagatgggagctggggagcagggctccactctgagacgggggcagccttgccggatccagggcagagttaagcggccccagctctgctttcctagagctgctgagaacccgggaaatggtgtggaggttccggggagccctgcccctacctggcaaccgcaatgcagcaggcaccaagttctcctgcacattgcgacagtgtgaccctgggctctggcgggcggtaggtggggcctttggacctaccagcagtgagggagttaacacagcagctgacttctgtaggcaaggaaaactcccctcagacactttgctgcctggcctcctgccagcaacaagcaggagctgaaaactagaagttgaggcgtgagtttggccactccgtagtgtgcacttggtgagggcagcaactcgccacagctgccaggcgtctgtccattcacccatctgtccatctggcagcccgctgttcagacctgtctgtctgtccgcccatctgtaagcccatctctgtcccattgtctatctgaccatctttctcttactgtcctctttgtctagctatctggcctatctgtcgatccatcttcgtgtctgtcttcagcccccacctgtttgtccatctgtccaattacctgtgagtctatctatgcattttcttgtccattcatctgcccacccatctgtccctccgtctgcccaccggcctcccctctccttctgggccgcagagccacggtccaggactgcagagccatggttggcctggtccttctggggctggggctggcgctggctgtcattgtgctggctgtggtcctctctcgacaccaggccccatttgacccccaggcctttgcccacgccgctgttgctgctgactccaaggtctgctcaaatattgtaggctggagcccctgggtgcgagttcctaagctttctgcctggacgtctctggcttctctgcccacacactccctgcccccagtgtccctgcccctgccccagcacaggcatgccaacttttgcacagaactgggaaaccctctgagcaggaaccacatcctgacttctcacgggagtcgggatccgagcaagcagcgctcagtgaaactgagcaggattgccctggccctggtctgtgggcacctgatggtcctcagtccaataagctcggagaacactgagttaaacaaagggagccaggggtcttga

SEQ ID NO: 9550 - protein, 152 aa, Homo sapiens
MVGLVLLGLGLALAVIVLAVVLSRHQAPFDPQAFAHAAVAADSKVCSNIVGWSPWVRVPKLSAWTSLASLPTHSLPPVSLPLPQHRHANFCTELGNPLSRNHILTSHGSRDPSKQRSVKLSRIALALVCGHLMVLSPISSENTELNKGSQGS

SEQ ID NO: 9551 - DNA, 1108 bp, Homo sapiens; identical to SEQ ID NO: 1201

SEQ ID NO: 9552 - protein, 225 aa, Homo sapiens; identical to SEQ ID NO: 1202

SEQ ID NO: 9553 - DNA, 977 bp, Homo sapiens; identical to SEQ ID NO: 1205

SEQ ID NO: 9554 - protein, 225 aa, Homo sapiens; identical to SEQ ID NO: 1202

SEQ ID NO: 9555 - DNA, 1049 bp, Homo sapiens; identical to SEQ ID NO: 1203

SEQ ID NO: 9556 - protein, 225 aa, Homo sapiens; identical to SEQ ID NO: 1202

SEQ ID NO: 9557 - DNA, 534 bp, Homo sapiens
gaaagacagagaggcaaatgcagcgggttgggggtggtcagcagagaggggtcggtccattccagcttcctgtggacactgctggctgagggttggaggtggggcaggaacagactgcacctggcacacaggccagaccccctcaagcccctccatggcaggaactggtattgatcccattttaaagctgtgaaaactgcggggaaaaaaatgaagtgacttgcttgaggtcccagagctagtggcaaaaaggagcaatgaagtccatgacggcctgagtctgctggatgtcaagaccctcagttccaacgattcgacctcattcagcatcatctgctgtgctgatgtccaggggccagagcagttattgcaaaggaagatttctctaaggctcttcctatttttctgttagccatgcaaagtttataaacttttattaggatagcagtaaattgcagagcagtgacaatatgtgaaaaaggtcttgcttcactcaattaagtatgttctggatggttacagacttcatgtagg

SEQ ID NO: 9558 - protein, 33 aa, Homo sapiens
MSRPSVPTIRPHSASSAVLMSRGQSSYCKGRFL

SEQ ID NO: 9559 - DNA, 2376 bp, Homo sapiens
atacgacaggaaaaatggagaatggatagtgaggcgtgatcagcaggctcttccatgacaaccagcagtgccttcttgctgcatcctctggagagaaggagccctgcgtcctcagggaaggcagaagggcaggcaagccggatactgtgatggtgcctcttccattcacaagggaggagccctcacagccttgtcatcacctcctaaaggccttgccttttaatttgatcacatgggccatgaagtttcaacacctgaattttggcagaaatgcattcaaaccacagcagacccattatcctatttctaaggaacctgggataagacaagtccataggacaggcatggacaagcgtcctgagccctggggccaggggaaatccaaggtaacaagggaaattggcgatcccagccaggtgcatggctagagcagttctttccttcggaagggcagcgatggaaatttcagctctactttttccttttcccgagctgtgtgatcttgagcagcttccttgcagctcatccttcatgtcctaaaacagatgatacagcaacatcagcaaggtggcagactaaggaacttcagacactacttactacccccagaaacatttttttaaaaacaattagaggacctttggaaaatagtgaaaaggtacaggagccaagcaactgcccattcaagaaaaagcaacattcaaaatgcaggagattttgtggatttgtactccccctttctgcacccttccctggcactgagcagtgttggtttggaggaggtggcagcccagctcccagttctttccctctaatgttagtgagcagagtctaacctgtctggggatggcttgaaggattagtcctgctttgttcaactcagagctcagaataagagaagcagtttaattcagattgcaggctgagaaaaagctatggaaagcagcaggaactgctcttaaaaactgcagggaggctacagagactgaagatgcctgggcaagagatttcaaatggaagcatgtaataaaccctctaagggcacacaaagaagctggaacaagacttttggaaaattaagatgtctaaaaggagccatgtttatggggaaatagttaaagccacatgaaggctcagacgagatgcatactcagaaaaaacctgagaagatcttaagctactccttgggctgactccaaggctcagaacatgtcctgagaattagtgaagatcttccccatcacatagcctgtccgcaaatactaggagaagtggctgttttttcaaattcttaattctcaacaacgacaacaaaaatcacaaggcgtacaaagacaccagaaaatacaacttcttcagggaagaaaatgaattgtcggaaaccacccgtaaatccaagaaaatgatggagggactctctgtagtattgtgtccggaattggtgggttcttggtctcactgacttcaagaatgaagccgcggaccctcgcgacggcagagaccaagagaaaatactgttacatggttacaagatcaagttcacaaggacataaacaagatggagacctcatcccgtttcttcgtttgtttcagggatctgtaacaaagtttattactgaccagcttgctgggctatcttgaacagcaagcttatggggtcctaagctcatgttctattttaaggtacctctcttcatggcagaatgacacagaaagacaaattcacagcacaaagttcaccagattcgttacagcttaagactagcctcatgaatcctttttcctattaattaaaactttgcaagagatagtgatttttaccattcccgcatccattttgcacagtgaaggagtgagagagagaagaattgtctgcgctatctaaggtgaggagttcaggggggccagagaaagacccacccattgcagagacactgaattaatagttcaggtggcagctggttggttgataaagaatcttttccagtcccatcagctctcaacttttcccctttggggagaaaaagttctccatgttccaaagtcctgtatatgcctaatcctgtcagccatagctgccagcaaagagtgcaaggcagattaatccaaagagaatagtggttaaaatcctatagtgccaagtccacttttgaccaagagggactttactgcaccccatcccatcctttacctaggtaaaatgtaccccattgcttacccaaagtcagccaattggtactgcagtctatttcctttggaatgggatagcaacttagctaaaaggttagcagatttaatttttttaagtatatttgtcacttaagctttttatttgcctttcacaaagtcgttaaataaaaatgccaaaatcttttt

SEQ ID NO: 9560 - protein, 56 aa, Homo sapiens
MKPRTLATAETKRKYCYMVTRSSSQGHKQDGDLIPFLRLFQGSVTKFITDQLAGLS

SEQ ID NO: 9561 - DNA, 538 bp, Homo sapiens
acgacaggaaaaatggagaatggatagtgaggcgtgatcagcaggctcttccatgacaaccagcagggcctgctgaatcattcctgctcctgtggagatgagtttggagttttatgctaacatcatctctgcttcactttttctccatggcgagtaatttgaaggggatcactgaccgtgccatggcacacaaaagcacaacttcagaaacaagatgtggctcggggacaacttagaggttatttgagacgctgcaggttttcagcaggtgcttccaatccatggacttggagaagaatgtcagctaatggctgccactgtgctgccaggcttccatccagggactttagtaaagttctgctgaaagagatgtaaaccgggagagggatggaggctggatcctggagtgtgaatatttgaccatcctttaccccagcagcacctccacgcaaggttttacatagcagtgggtttgtgttcccatcaaactgggcctggtcagggtcaagcaagcccaagcctctgcccccgcatgctg

SEQ ID NO: 9562 - protein, 40 aa, Homo sapiens
MLTSSLLHFFSMASNLKGITDRAMAHKSTTSETRCGSGTT

SEQ ID NO: 9563 - DNA, 514 bp, Homo sapiens
agcggctgggaggtgactgagtggtccaggtttacagaggaagtgcctcttgtgtgaagaagcccaggctgggacgtctggtttgtgctgcctgcagtgatgttcctgagaatttctgtcccttggggtcagggacatcccaggtgcctttggatttctcctgtgagttagcagcctggaacaatgggaaggacgtggatagtttagtaatctgggactctttgaaatcgagggcagtaaggatacttgtcagaattttatagcaagtcagagagaacgttcagaacctgaacttcattcctgaagcagatgtgaagtgggagaccccctgcttttgatgtgagcttctggccagggtccccaggcaactcacctctcctttatggtgccccatgggggtttataaaggtaatcatatttgggaactgtaacactcaccacgaagatctgcagcttcactcctgagcccagcgagaccacaagcccaccgggaggaatgaacaactccagatgc

SEQ ID NO: 9564 - protein, 49 aa, Homo sapiens
SGRPPAFDVSFWPGSPGNSPLLYGAPWGFIKVIIFGNCNTHHEDLQLHS

SEQ ID NO: 9565 - DNA, 2442 bp, Homo sapiens
agacactggccgcgggccaccatctggacgcgatcccccgctagggcctccctggtctgggccaaagttggtggccaccttcgcgcgggctgcgccctccttctcttccctgccctcctcccccggggcccgcgcccgctgcctccagcacgcgcgtcggcaggctcggcaagcgaagaggagcggctcgccccagggcgcccctcgcccagcctgccggccaggcgagcgcgacgagagtctccccgcaccccttcctctcccgggggccgagagggttgggctccgccccggcgccgcagctcccgactccccgccgctcgggctgccgccgctgccccgcgcccggcgctcggggcagccgggggcgcaggcggagagcgcagggcggggagaggcgtggggagcagagcggcgctgaggggagggcagaggaggagagagcctggcagcggaggagcagaggcgggcgccgcaccgccccgcacgctcgctcgctcgggagagtcgcgggcggccgcttgggcgcacttgccgggtcaccttgtcccggaggagaaatggcttccctgaggcaagtgtaacctacattcccagcccaccagcctgacgcccagccagggagagagtaccatggatggcatcattgaacagaagagcatgctggtgcacagtaaaatcagtgatgctggcaagaggaatggtttaattaacaccagaaacttgatggccgagagcagagatggtctggtgtctgtttacccagcgccccagtaccagagccaccgggtgggggccagcacagtgccggccagcctggacagcagcaggagtgagccgatgcagcagctgctggaccccaacaccctgcagcagtcagtggagtcccgctaccggcccaacatcatcctctattcagagggcgtgctgcgctcctggggggacggtgtggccgccgactgctgcgagaccaccttcatcgaggaccggtcgcccaccaaagacagcctcgagtacccggatgggaagttcattgacctctcagctgatgacataaaaatccacaccctgtcctacgatgtggaggaggaggaggagttccaggagctggagagcgactactcaagcgacacagagagtgaggacaatttcctcatgatgcccccgcgggaccacctgggcctcagtgtcttctccatgctctgctgcttctggcctctgggcatcgcagccttctacttgtcccatgagaccaacaaagccgtggccaagggggacttgcaccaggccagcaccagctcccggcgggccctattcctggcagtgctgtccatcaccattgggactggcgtctatgtgggcgtggccgtggccctcatcgcctacctctccaagaacaaccacctgtgagcttcctgcgaatggagggggagcacccggggccaggtctgtgtggacgtggaggaagcaggcataccgcatgatgctgtacagtacaaatgattgccaaatgatgccacgaagccctgggatttcctacccatggatttattttgtttttatcctttaatttcatgttcacagcactgtgtagagcaccagacagacgggcactgctaatccttccaaaggaaagctccaaagatcccagcccgcaaggctgtctctggatggattctggtggatgaatggcaacgcggctctctgcagcctgccagtgcccagagtgccaccgcattagcaatatacaaacagtccaaaaaagtgtttattttttatggaatacggtgcaataggcagaggacaagggacacatcactcttctgtctgtggccctgctggagtcctttgtgccccccggagtccacacgccttccctgcaagacgagaatggggctgggaagaaagaggcaacaccacggctggcaggagccccgctgcactgctctgcagacccattggcctgaccctgagaagcagagccagcaaagcccgggacctgcccctctttctttcccttcacaccaccccagcctcaggatgtcaagccacctccggaacgtgtctacactccacagctaccccgcagcaatacgcactcttgggacctcgctgatctaggatggggaggcaggccaccgcccctcccaagactcctcaagaaagagccccgcggttgctccggaaactcgaggcactgcagctatgggcactgcctcagcctaaagacacaggggcgcctcccaatcaccgcgctggcggatgctcaccccgtcataagcagaaactagtgatcctggaaatgagatgggccttactctgtcgactaaatgaatagctattttcttgtcattttttaaagtgcaactcttgcttcatgctgcttaagttaccagatgaatgctgagaaataagtaatcacagacattttaataccatttc

SEQ ID NO: 9566 - protein, 258 aa, Homo sapiens; identical to SEQ ID NO: 1208

SEQ ID NO: 9567 - DNA, 2523 bp, Homo sapiens
agacactggccgcgggccaccatctggacgcgatcccccgctagggcctccctggtctgggccaaagttggtggccaccttcgcgcgggctgcgccctccttctcttccctgccctcctcccccggggcccgcgcccgctgcctccagcacgcgcgtcggcaggctcggcaagcgaagaggagcggctcgccccagggcgcccctcgcccagcctgccggccaggcgagcgcgacgagagtctccccgcaccccttcctctcccgggggccgagagggttgggctccgccccggcgccgcagctcccgactccccgccgctcgggctgccgccgctgccccgcgcccggcgctcggggcagccgggggcgcaggcggagagcgcagggcggggagaggcgtggggagcagagcggcgctgaggggagggcagaggaggagagagcctggcagcggaggagcagaggcgggcgccgcaccgccccgcacgctcgctcgctcgggagagtcgcgggcggccgcttgggcgcacttgccgggtcaccttgtcccggaggagaaatggcttccctgaggcaagtgtaacctacattcccagcccaccagcctgacgcccagccagggagagagtaccatggatggcatcattgaacagaagagcatgctggtgcacagtaaaatcagtgatgctggcaagaggaatggtttaattaacaccagaaacttgatggccgagagcagagatggtctggtgtctgtttacccagcgccccagtaccagagccaccgggtgggggccagcacagtgccggccagcctggacagcagcaggagtgagccgatgcagcagctgctggaccccaacaccctgcagcagtcagtggagtcccgctaccggcccaacatcatcctctattcagagggcgtgctgcgctcctggggggacggtgtggccgccgactgctgcgagaccaccttcatcgaggaccggtcgcccaccaaagacagcctcgagtacccggatgggaagttcattgacctctcagctgatgacataaaaatccacaccctgtcctacgatgtggaggaggaggaggagttccaggagctggagagcgactactcaagcgacacagagagtgaggacaatttcctcatgatgcccccgcgggaccacctgggcctcagtgtcttctccatgctctgctgcttctggcctctgggcatcgcagccttctacttgtcccatgagaccaacaaagccgtggccaagggggacttgcaccaggccagcaccagctcccggcgggccctattcctggcagtgctgtccatcaccattgggactggcgtctatgtgggcgtggccgtggccctcatcgcctacctctccaagaacaaccacctgtgagcttcctgcgaatggagggggagcacccggggccaggtctgtgtggacgtggaggaagcaggcataccgcatgatgctgtacagtacaaatgattgccaaatgatgccacgaagccctgggatttcctacccatggatttattttgtttttatcctttaatttcatgttcacagcactgtgtagagcaccagacagacgggcactgctaatccttccaaaggaaagctccaaagatcccagcccgcaaggctgtctctggatggattctggtggatgaatggcaacgcggctctctgcagcctgccagtgcccagagtgccaccgcattagcaatatacaaacagtccaaaaaagtgtttattttttatggaatacggtgcaataggcagaggacaagggacacatcactcttctgtctgtggccctgctggagtcctttgtgccccccggagtccacacgccttccctgcaagacgagaatggggctgggaagaaagaggcaacaccacggctggcaggagccccgctgcactgctctgcagacccattggcctgaccctgagaagcagagccagcaaagcccgggacctgcccctctttctttcccttcacaccaccccagcctcaggatgtcaagccacctccggaacgtgtctacactccacagctaccccgcagcaatacgcactcttgggacctcgctgatctaggatggggaggcaggccaccgcccctcccaagactcctcaagaaagagccccgcggttgctccggaaactcgaggcactgcagctatgggcactgcctcagcctaaagacacaggggcgcctcccaatcaccgcgctggcggatgctcaccccgtcataagcagaaactagtgatcctggaaatgagatgggccttactctgtcgactaaatgaatagctattttcttgtcattttttaaagtgcaactcttgcttcatgctgcttaagttaccagatgaatgctgagaaataagtaatcacagacattttaataccatttcattgctgttttacgagtgttcattacttaacaaaaaattatcttttagctttttcgcttaagacttttctttctgatgaat

SEQ ID NO: 9568 - protein, 258 aa, Homo sapiens; identical to SEQ ID NO: 1208

SEQ ID NO: 9569 - DNA, 1739 bp, Homo sapiens
gtttaattaacaccagaaacttgatggccgagagcagagatggtctggtgtctgtttacccagcgccccagtaccagagccaccgggtgggggccagcacagtgccggccagcctggacagcagcaggagtgagccgatgcagcagctgctggaccccaacaccctgcagcagtcagtggagtcccgctaccggcccaacatcatcctctattcagagggcgtgctgcgctcctggggggacggtgtggccgccgactgctgcgagaccaccttcatcgaggaccggtcgcccaccaaagacagcctcgagtacccggatgggaagttcattgacctctcagctgatgacataaaaatccacaccctgtcctacgatgtggaggaggaggaggagttccaggagctggagagcgactactcaagcgacacagagagtgaggacaatttcctcatgatgcccccgcgggaccacctgggcctcagtgtcttctccatgctctgctgcttctggcctctgggcatcgcagccttctacttgtcccatgagaccaacaaagccgtggccaagggggacttgcaccaggccagcaccagctcccggcgggccctattcctggcagtgctgtccatcaccattgggactggcgtctatgtgggcgtggccgtggccctcatcgcctacctctccaagaacaaccacctgtgagcttcctgcgaatggagggggagcacccggggccaggtctgtgtggacgtggaggaagcaggcataccgcatgatgctgtacagtacaaatgattgccaaatgatgccacgaagccctgggatttcctacccatggatttattttgtttttatcctttaatttcatgttcacagcactgtgtagagcaccagacagacgggcactgctaatccttccaaaggaaagctccaaagatcccagcccgcaaggctgtctctggatggattctggtggatgaatggcaacgcggctctctgcagcctgccagtgcccagagtgccaccgcattagcaatatacaaacagtccaaaaaagtgtttattttttatggaatacggtgcaataggcagaggacaagggacacatcactcttctgtctgtggccctgctggagtcctttgtgccccccggagtccacacgccttccctgcaagacgagaatggggctgggaagaaagaggcaacaccacggctggcaggagccccgctgcactgctctgcagacccattggcctgaccctgagaagcagagccagcaaagcccgggacctgcccctctttctttcccttcacaccaccccagcctcaggatgtcaagccacctccggaacgtgtctacactccacagctaccccgcagcaatacgcactcttgggacctcgctgatctaggatggggaggcaggccaccgcccctcccaagactcctcaagaaagagccccgcggttgctccggaaactcgaggcactgcagctatgggcactgcctcagcctaaagacacaggggcgcctcccaatcaccgcgctggcggatgctcaccccgtcataagcagaaactagtgatcctggaaatgagatgggccttactctgtcgactaaatgaatagctattttcttgtcattttttaaagtgcaactcttgcttcatgctgcttaagttaccagatgaatgctgagaaataagtaatcacagacattttaataccatttc

SEQ ID NO: 9570 - protein, 227 aa, Homo sapiens
MAESRDGLVSVYPAPQYQSHRVGASTVPASLDSSRSEPMQQLLDPNTLQQSVESRYRPNIILYSEGVLRSWGDGVAADCCETTFIEDRSPTKDSLEYPDGKFIDLSADDIKIHTLSYDVEEEEEFQELESDYSSDTESEDNFLMMPPRDHLGLSVFSMLCCFWPLGIAAFYLSHETNKAVAKGDLHQASTSSRRALFLAVLSITIGTGVYVGVAVALIAYLSKNNHL

SEQ ID NO: 9571 - DNA, 1820 bp, Homo sapiens
gtttaattaacaccagaaacttgatggccgagagcagagatggtctggtgtctgtttacccagcgccccagtaccagagccaccgggtgggggccagcacagtgccggccagcctggacagcagcaggagtgagccgatgcagcagctgctggaccccaacaccctgcagcagtcagtggagtcccgctaccggcccaacatcatcctctattcagagggcgtgctgcgctcctggggggacggtgtggccgccgactgctgcgagaccaccttcatcgaggaccggtcgcccaccaaagacagcctcgagtacccggatgggaagttcattgacctctcagctgatgacataaaaatccacaccctgtcctacgatgtggaggaggaggaggagttccaggagctggagagcgactactcaagcgacacagagagtgaggacaatttcctcatgatgcccccgcgggaccacctgggcctcagtgtcttctccatgctctgctgcttctggcctctgggcatcgcagccttctacttgtcccatgagaccaacaaagccgtggccaagggggacttgcaccaggccagcaccagctcccggcgggccctattcctggcagtgctgtccatcaccattgggactggcgtctatgtgggcgtggccgtggccctcatcgcctacctctccaagaacaaccacctgtgagcttcctgcgaatggagggggagcacccggggccaggtctgtgtggacgtggaggaagcaggcataccgcatgatgctgtacagtacaaatgattgccaaatgatgccacgaagccctgggatttcctacccatggatttattttgtttttatcctttaatttcatgttcacagcactgtgtagagcaccagacagacgggcactgctaatccttccaaaggaaagctccaaagatcccagcccgcaaggctgtctctggatggattctggtggatgaatggcaacgcggctctctgcagcctgccagtgcccagagtgccaccgcattagcaatatacaaacagtccaaaaaagtgtttattttttatggaatacggtgcaataggcagaggacaagggacacatcactcttctgtctgtggccctgctggagtcctttgtgccccccggagtccacacgccttccctgcaagacgagaatggggctgggaagaaagaggcaacaccacggctggcaggagccccgctgcactgctctgcagacccattggcctgaccctgagaagcagagccagcaaagcccgggacctgcccctctttctttcccttcacaccaccccagcctcaggatgtcaagccacctccggaacgtgtctacactccacagctaccccgcagcaatacgcactcttgggacctcgctgatctaggatggggaggcaggccaccgcccctcccaagactcctcaagaaagagccccgcggttgctccggaaactcgaggcactgcagctatgggcactgcctcagcctaaagacacaggggcgcctcccaatcaccgcgctggcggatgctcaccccgtcataagcagaaactagtgatcctggaaatgagatgggccttactctgtcgactaaatgaatagctattttcttgtcattttttaaagtgcaactcttgcttcatgctgcttaagttaccagatgaatgctgagaaataagtaatcacagacattttaataccatttcattgctgttttacgagtgttcattacttaacaaaaaattatcttttagctttttcgcttaagacttttctttctgatgaat

SEQ ID NO: 9572 - protein, 227 aa, Homo sapiens; identical to SEQ ID NO: 9570

SEQ ID NO: 9573 - DNA, 1226 bp, Homo sapiens
ccagctcccggcgggccctattcctggcagtgctgtccatcaccattgggactggcgtctatgtgggcgtggccgtggccctcatcgcctacctctccaagaacaaccacctgtgagcttcctgcgaatggagggggagcacccggggccaggtctgtgtggacgtggaggaagcaggcataccgcatgatgctgtacagtacaaatgattgccaaatgatgccacgaagccctgggatttcctacccatggatttattttgtttttatcctttaatttcatgttcacagcactgtgtagagcaccagacagacgggcactgctaatccttccaaaggaaagctccaaagatcccagcccgcaaggctgtctctggatggattctggtggatgaatggcaacgcggctctctgcagcctgccagtgcccagagtgccaccgcattagcaatatacaaacagtccaaaaaagtgtttattttttatggaatacggtgcaataggcagaggacaagggacacatcactcttctgtctgtggccctgctggagtcctttgtgccccccggagtccacacgccttccctgcaagacgagaatggggctgggaagaaagaggcaacaccacggctggcaggagccccgctgcactgctctgcagacccattggcctgaccctgagaagcagagccagcaaagcccgggacctgcccctctttctttcccttcacaccaccccagcctcaggatgtcaagccacctccggaacgtgtctacactccacagctaccccgcagcaatacgcactcttgggacctcgctgatctaggatggggaggcaggccaccgcccctcccaagactcctcaagaaagagccccgcggttgctccggaaactcgaggcactgcagctatgggcactgcctcagcctaaagacacaggggcgcctcccaatcaccgcgctggcggatgctcaccccgtcataagcagaaactagtgatcctggaaatgagatgggccttactctgtcgactaaatgaatagctattttcttgtcattttttaaagtgcaactcttgcttcatgctgcttaagttaccagatgaatgctgagaaataagtaatcacagacattttaataccatttcattgctgttttacgagtgttcattacttaacaaaaaattatcttttagctttttcgcttaagacttttctttttgatg

SEQ ID NO: 9574 - protein, 112 aa, Homo sapiens [sequence omitted]

SEQ ID NO: 9575 - DNA, 742 bp, Homo sapiens
aggcatgattgcatttgttacctctggataaatgctcatggattgaagcacctgtttaaatcgcaccctacttctagccctgcctccagactcgcctctttgcattcagggagcacagaaatgtggaaccccatctaatgggttcactggcacacagacctcagacaagggggagctgaggactggactctgaccactgttttggttctaaatttcttcctgaggcccaagaggaggtcacgtccaccagctaaacctagcattcttttctgctggctacaaaatttttagacaaggctttgcctccttaaacaatcgcaagtttaaaaatctttgaatccagccatctatgacctgtgggcccccacttggagatgttccacgtttttaggtcaagccaatgtacagcctccacctattgatttatgactttgcctgtgacctctgcctccctccctttaaaaactcctacctgtaagccattgaggccaggtctaaatcatgagctgccctgcaatcggtgcctcaatttctctcgccgcaaccctgaggtcagccttggctttgctctgctgcactggtggacccaagctctgttcactgttgtcagcctagggtcctgcctccagccctgatttctcagagattggacttggaccctccaagccccctgattacaaaaggaagtgagcttgttccaagactgcagggaagggatttccattttgagctccataggcgg

SEQ ID NO: 9576 - protein, 69 aa, Homo sapiens
MTLPVTSASLPLKTPTCKPLRPGLNHELPCNRCLNFSRRNPEVSLGFALLHWWTQALFTVVSLGSCLQP

SEQ ID NO: 9577 - DNA, 8416 bp, Homo sapiens
agtttggggggcggggcctggccctctgcctcggggtgggctccgcccccgtcccccgcagggccttagcagcggctgccgcagctcaatcgcggagcaactagccgggcgtctgcgggagccgagcgtggtgaggtggggcctcaggggcaggtgggaggtgctcgggttaaccgtccgaggcccggagacccgcccgtctagggcgcctgagggaatcccgttcgggcagcggcctcttgttacccgggaggaacccgaggcccagagaggggctgggacgcgtcgttagggcccggggcccgcttgcctcagcttcttgctgccgccagcacgctaagctccagtcggcgccgaaggagagcttcccgaccctcgtgtccagtagccgcaatcccaggctgggagggtgaggcgccgcgctctgccgcccccccgcccctcgctccctgtgtcctggcggatttgcacgtaatctatccgaaagcccagtcccacccgccacccgactctggagctcccattcttcaggaccctgctgaagtatcgcttctcagccgccttctccaggcgcagctgcattcgcttctcggtttttgcactcgctgtgcaccgagttactttcccggcccctcgttgacaccgttcacaggtggctgttggtctttagtaagggtgaggtagagttgttggcagaaatcctgggataagagaatagtttcctggaagatctgtgcctccaaccagcagagagggattgagcttcattgaactcaacagagccaacatttcatagcaccatgttcaagaggaggttgaagtggcatggcaatggttagagaccctgctgggcgtgaacaccctctggctacctagggacctgtgggcctaccacctggtgccctcatggagacaagaagccctgggttgaacaacatgaagccccagtcactgcagctggtactggaagagcaggtgctggcactacagcagcagatggcagagaatcaggcagcctcctggcggaagctgaagaactcccaggaggcccagcagagacaagcaacccttgtgaggaagctgcaggccaaggtgctgcagtaccgaagctggtgccaagagctggagaagcggctagaagccactggaggaccaatcccccagaggtgggaaaatgtggaggagccaaacctggatgagctgctggtccgattggaggaggagcaacagaggtgtgagagtctagcagaggtgaacacccagcttcgactgcacatggaaaaagctgacgtggtgaataaagcccttagggaagatgtggaaaaactgacagtggactggagccgggcccgggatgagctaatgaggaaggagagccagtggcagatggagcaggagttcttcaagggctacctgaaaggggagcacggtcgccttctcagtctatggcgggaggttgtgacattccgacgccacttcctggaaatgaagtcagctactgacagagatctgatggagctaaaagctgagcatgtgaggctttcagggtctctgttgacctgttgtctgcgcttgactgtgggagcacagtctcgggaacccaacggatctggaagaatggatgggcgggagccggcccagctgctgctgctactagccaagacccaggagctggagaaggaagcccatgaaaggagccaggagttaatacagctgaagagtcaaggggatctggagaaggctgaacttcaggaccgggtgaccgagctctctgctctgttgacccagtctcagaagcaaaatgaagattatgaaaagatgataaaggctctgagagagacagtggagatcctggagacaaatcacacagaattaatggaacatgaagcatctcttagtaggaatgcgcaagaggagaagttgtctttacagcaggtgatcaaggatataacccaggtcatggtggaagaaggggacaatatagcccaaggctctggtcatgagaactctttggaattggactctagtatcttctcccagtttgattaccaggatgcagacaaggctcttactctggtgcgttcagtgctgactcggagacgccaggctgtgcaggacctaaggcagcagcttgcaggctgtcaagaggctgtgaacttgttgcaacagcagcatgatcagtgggaggaagagggcaaagccttgagacagcggctgcagaagctcactggggagcgggacactctggcagggcagactgtggacctccagggagaggtggactctctcagcaaggagcgagagctgctgcagaaggccagggaagagctgcggcagcagctggaggtgctagagcaggaggcatggcgcctgcgaagggtaaatgtggagcttcagctgcagggggactctgcccagggccagaaggaggaacagcaggaggagctgcacctggctgtccgggagagggagcgtcttcaggagatgctgatgggcctggaagccaaacagtcagaatcactcagtgaactgatcactcttcgggaagccctggagtcaagtcacctggaaggggagttactgaggcaagagcaaacggaagtgaccgcagcgctggctagggcagagcagtcaattgcagagctgtcgagttctgaaaacaccctgaagacagaagtagctgatcttcgggctgcagctgtcaagctcagtgccttaaatgaggctttggcgttagataaagttgggctgaaccagcagcttctccagttagaggaggagaaccagtctgtgtgcagcagaatggaggccgcagagcaggcgagaaatgctttgcaggtcgacctggcggaggcagagaagaggagggaagccctgtgggaaaagaacactcacctggaggctcagctgcagaaagctgaggaggctggggctgagctgcaggcagatctcagggacatccaagaagagaaggaagaaattcaaaagaaactaagtgagtcacgtcaccagcaggaggcagccacgactcagctggagcagctacatcaggaggcaaagcgacaggaagaagtgcttgccagggcagtccaggagaaggaggccctagtacgagagaaagcggctctagaggtgcggctgcaggccgtggagcgtgaccggcaggacctcgctgaacaactacaggggctcagctcagccaaggagctactggagagcagtctgtttgaagcccaacaacaaaattctgtgatagaggtcaccaaggggcagctggaggtccagattcaaactgtcactcaagccaaggaagtaatccaaggggaagtgaggtgcctgaagctggaactggacactgaacggagtcaggcagagcaggagcgggatgctgcagccagacagctggcccaggctgagcaagaagggaagactgccttggagcagcagaaggcagcccatgagaaagaggtgaaccagctccgggagaaatggatgcagctggaaacagagaaggagagagtatccctcctggagacactgctgcagacgcagaaggagctagcagatgccagccaacaactggaacgactgaggcaggacatgaaagtccagaaattaaaggagcaggagaccactgggatactacagacccagctccaggaggctcaacgggagctgaaggaggcagcccggcagcacagagatgaccttgctgccctccaagaagagagcagctccctgctgcaggataagatggacctgcagaagcaggtggaggacttgaagtctcagctggtggcccaggatgactcccagaggctggtggagcaggaggttcaggagaagctgagagagacccaggagtataaccgaattcagaaggagctggagagagagaaagccagcctgactctgtcactgatggaaaaggaacagagactccttgttttacaagaagctgactctattcgacaacaagagctgagtgccctgcgccaggacatgcaggaggcccagggagaacagaaagagctcagtgctcagatggaattactaaggcaagaggtgaaggaaaaggaggctgactttctggcccaggaagcacagctgctggaggagctggaggcgtctcatatcacggagcagcagctgcgagcctccttgtgggcccaggaagccaaggcagcccaactacagctgcgactgcgcagcacagagagccagctagaagcgctggccgcagagcagcagcccgggaaccaggcccaggcccaggcccagctggccagcctctactctgccctgcagcaggccctggggtctgtttgtgagagcaggcctgagctgagtggtgggggagactctgctccttccgtctggggccttgagccagaccagaatggagctaggagcctctttaagagagggcccctgctgactgctctctccgctgaggcagtagcatctgccctccacaagcttcatcaagacctgtggaagactcaacagacccgggatgttctgagggatcaggtccagaaactggaagagcgtctaactgatactgaggctgagaagagccaggtccacacagagttgcaggatctgcagagacagctctcccagaatcaggaagagaaatccaagtgggaaggaaagcagaactccctagaatctgagctgatggaactacatgaaactatggcatccttacagagtcgcctgcggagagcagagctacagcgaatggaagcccagggtgagcgagagttacttcaggcagccaaggagaacctgacagcccaggtggaacacctgcaagcagctgtcgtagaagccagggctcaggcaagtgctgctggcatcctggaagaagacctgagaacggctcgctcagcactgaagctgaaaaatgaggaagtagagagtgagcgtgagagagcccaggctctgcaagagcagggcgaactgaaggtggcccaagggaaggctctgcaagagaatttggccctcctgacccagaccctagctgaaagagaagaggaggtggagactctgcggggacaaatccaggaactggagaagcaacgggaaatgcagaaggctgctttggaattgctgtctctggacctgaagaagaggaaccaagaggtagatctgcagcaagaacagattcaggagctagagaagtgtaggtctgttttagagcatctgcccatggccgtccaggagcgagagcagaagctgactgtgcagagggagcagatcagagagctcgagaaggatcgggagactcagaggaacgtcttggagcatcagcttctagaacttgagaagaaagaccaaatgattgagtcccagagaggacaggttcaggacctgaaaaagcagttggttactctggaatgcctggccctggaactggaggaaaaccatcacaagatggagtgccagcaaaaactgatcaaggagctggagggccagagggaaacccagagagtggctttgacccaccttacgctggacctagaagaaaggagccaggagctgcaggcacaaagcagccagatccatgacctggagagccacagcaccgttctggcaagagagctgcaggagagggaccaggaggtgaagtctcagcgagaacagatcgaggagctgcagaggcagaaagagcatctgactcaggatctcgagaggagagaccaggagctgatgctgcagaaggagaggattcaggttctcgaggatcagaggacccggcagaccaagatcctggaggaggacctggaacagatcaagctgtccttgagagagcgaggccgggagctgaccactcagaggcagctgatgcaggaacgggcagaggaagggaagggcccaagtaaagcacagcgcgggagcctagagcacatgaagctgatcctgcgtgataaggagaaggaggtggaatgtcagcaggagcatatccatgaactccaggagctcaaagaccagctggagcagcagctccagggcctgcacaggaaggtaggtgagaccagcctcctcctgtcccagcgagagcaggaaatagtggtcctgcagcagcaactgcaggaagccagggaacaaggggagctgaaggagcagtcacttcagagtcaactggatgaggcccagagagccctagcccagagggaccaggaactggaggctctgcagcaagaacagcagcaggcccagggacaggaggagagggtgaaggaaaaggcagacgccctccagggagctctggagcaagcccatatgacactgaaggagcgtcatggagagcttcaggaccacaaggaacaggcacgaaggctggaggaagagctggcagtggagggacggcgggtccaggccctggaggaggtgctgggagacctaagggctgagtctcgggaacaggagaaagctctgttggccctccagcagcagtgtgctgagcaggcacaggagcatgaggtggagaccagggccctgcaggacagctggctgcaggcccaggcagtgctcaaggaacgggaccaggagctggaagctctgcgggcagaaagtcagtcctcccggcatcaggaggaggctgcccgggcccgggctgaggctctgcaggaggcccttggcaaggctcatgctgccctgcaggggaaagagcagcatctcctcgagcaggcagaattgagccgcagtctggaggccagcactgcaaccctgcaagcctccctggatgcctgccaggcacacagtcggcagctggaggaggctctgaggatacaagaaggtgagatccaggaccaggatctccgataccaggaggatgtgcagcagctgcagcaggcacttgcccagagggatgaagagctgagacatcagcaggaacgggagcagctgctggagaagtctctggcccagagggtccaagagaatatgatccaagagaagcagaatctggggcaagagagagaagaggaggagataaggggccttcatcagagtgtaagggagctacagctgactctagcccaaaaggaacaggagattctggagctgagggagacccagcaaaggaacaacctggaagccttaccccacagccacaaaacctccccaatggaggaacaatctctaaaacttgattctttagagcccaggctgcagcgggagctggagcggctacaggcagccctgagacagacagaagccagggagattgagtggagggagaaggcccaggacttggcactctccctagcgcagaccaaggccagtgtcagcagtctgcaggaggtagccatgttcctacaagcctctgtcctggagcgggactcagaacagcaaaggctgcaggatgaactggagctcaccagacgggctctggagaaggagcggctacacagcccaggtgcaaccagcacagcagaactggggtccagaggggagcagggtgtgcagctgggagaggtctcaggagtggaggctgagcctagtcctgatggaatggagaagcagtcatggagacaaaggcttgaacacctgcagcaagcagtggcccggctggagattgacaggagcaggctgcagcgccacaatgtccagctgcggagtaccttggagcaggtggagcgagaacggaggaagctgaagagggaggccatgcgtgcggcccaggcagggtccctagagatcagcaaggccacggcttcttcacccacacagcaggatgggagaggacagaagaactcagatgccaagtgtgtggctgaactgcagaaagaggtggtcctgctgcaagctcagctgactttggagcggaagcagaagcaggactacatcacccgctcagcacagaccagccgtgagctagcaggcctgcaccacagcctctcacactcacttcttgccgtggcccaggcccctgaggccactgtcctggaggcagagacccgcaggctggatgagtccctgactcaaagtctgacatccccagggccagtcctgctacaccccagccccagcactacccaagccgcctccaggtagcagccacagccaggagcacacagacagaagactgtgtcatgggtcatggcccctccgcacacctacaggtttgccaaaggaaaagcctggctctgttaggcacccaggagccccaggtcggcgggtgttcccaggaagaggaagtaaatctgcaaccctggggaggaccccaactcacctgggaatgaggcaaattgcatttgcttgctccctatggaatcacccagaggggtgccttgccctggctgagggacatgtactgcctctcatctagaatttattttcctagcacttcaccacctccttcatcttctccttcaacaataaaccctgagatctttgcattcat

SEQ ID NO: 9578 - protein, 2386 aa, Homo sapiens; identical to SEQ ID NO: 1210

SEQ ID NO: 9579 - DNA, 8584 bp, Homo sapiens
agtttggggggcggggcctggccctctgcctcggggtgggctccgcccccgtcccccgcagggccttagcagcggctgccgcagctcaatcgcggagcaactagccgggcgtctgcgggagccgagcgtggtgaggtggggcctcaggggcaggtgggaggtgctcgggttaaccgtccgaggcccggagacccgcccgtctagggcgcctgagggaatcccgttcgggcagcggcctcttgttacccgggaggaacccgaggcccagagaggggctgggacgcgtcgttagggcccggggcccgcttgcctcagcttcttgctgccgccagcacgctaagctccagtcggcgccgaaggagagcttcccgaccctcgtgtccagtagccgcaatcccaggctgggagggtgaggcgccgcgctctgccgcccccccgcccctcgctccctgtgtcctggcggatttgcacgtaatctatccgaaagcccagtcccacccgccacccgactctggagctcccattcttcaggaccctgctgaagtatcgcttctcagccgccttctccaggcgcagctgcattcgcttctcggtttttgcactcgctgtgcaccgagttactttcccggcccctcgttgacaccgttcacaggtggctgttggtctttagtaagggtgaggtagagttgttggcagaaatcctgggataagagaatagtttcctggaagatctgtgcctccaaccagcagagagggattgagcttcattgaactcaacagagccaacatttcatagcaccatgttcaagaggaggttgaagtggcatggcaatggttagagaccctgctgggcgtgaacaccctctggctacctagggacctgtgggcctaccacctggtgccctcatggagacaagaagccctgggttgaacaacatgaagccccagtcactgcagctggtactggaagagcaggtgctggcactacagcagcagatggcagagaatcaggcagcctcctggcggaagctgaagaactcccaggaggcccagcagagacaagcaacccttgtgaggaagctgcaggccaaggtgctgcagtaccgaagctggtgccaagagctggagaagcggctagaagccactggaggaccaatcccccagaggtgggaaaatgtggaggagccaaacctggatgagctgctggtccgattggaggaggagcaacagaggtgtgagagtctagcagaggtgaacacccagcttcgactgcacatggaaaaagctgacgtggtgaataaagcccttagggaagatgtggaaaaactgacagtggactggagccgggcccgggatgagctaatgaggaaggagagccagtggcagatggagcaggagttcttcaagggctacctgaaaggggagcacggtcgccttctcagtctatggcgggaggttgtgacattccgacgccacttcctggaaatgaagtcagctactgacagagatctgatggagctaaaagctgagcatgtgaggctttcagggtctctgttgacctgttgtctgcgcttgactgtgggagcacagtctcgggaacccaacggatctggaagaatggatgggcgggagccggcccagctgctgctgctactagccaagacccaggagctggagaaggaagcccatgaaaggagccaggagttaatacagctgaagagtcaaggggatctggagaaggctgaacttcaggaccgggtgaccgagctctctgctctgttgacccagtctcagaagcaaaatgaagattatgaaaagatgataaaggctctgagagagacagtggagatcctggagacaaatcacacagaattaatggaacatgaagcatctcttagtaggaatgcgcaagaggagaagttgtctttacagcaggtgatcaaggatataacccaggtcatggtggaagaaggggacaatatagcccaaggctctggtcatgagaactctttggaattggactctagtatcttctcccagtttgattaccaggatgcagacaaggctcttactctggtgcgttcagtgctgactcggagacgccaggctgtgcaggacctaaggcagcagcttgcaggctgtcaagaggctgtgaacttgttgcaacagcagcatgatcagtgggaggaagagggcaaagccttgagacagcggctgcagaagctcactggggagcgggacactctggcagggcagactgtggacctccagggagaggtggactctctcagcaaggagcgagagctgctgcagaaggccagggaagagctgcggcagcagctggaggtgctagagcaggaggcatggcgcctgcgaagggtaaatgtggagcttcagctgcagggggactctgcccagggccagaaggaggaacagcaggaggagctgcacctggctgtccgggagagggagcgtcttcaggagatgctgatgggcctggaagccaaacagtcagaatcactcagtgaactgatcactcttcgggaagccctggagtcaagtcacctggaaggggagttactgaggcaagagcaaacggaagtgaccgcagcgctggctagggcagagcagtcaattgcagagctgtcgagttctgaaaacaccctgaagacagaagtagctgatcttcgggctgcagctgtcaagctcagtgccttaaatgaggctttggcgttagataaagttgggctgaaccagcagcttctccagttagaggaggagaaccagtctgtgtgcagcagaatggaggccgcagagcaggcgagaaatgctttgcaggtcgacctggcggaggcagagaagaggagggaagccctgtgggaaaagaacactcacctggaggctcagctgcagaaagctgaggaggctggggctgagctgcaggcagatctcagggacatccaagaagagaaggaagaaattcaaaagaaactaagtgagtcacgtcaccagcaggaggcagccacgactcagctggagcagctacatcaggaggcaaagcgacaggaagaagtgcttgccagggcagtccaggagaaggaggccctagtacgagagaaagcggctctagaggtgcggctgcaggccgtggagcgtgaccggcaggacctcgctgaacaactacaggggctcagctcagccaaggagctactggagagcagtctgtttgaagcccaacaacaaaattctgtgatagaggtcaccaaggggcagctggaggtccagattcaaactgtcactcaagccaaggaagtaatccaaggggaagtgaggtgcctgaagctggaactggacactgaacggagtcaggcagagcaggagcgggatgctgcagccagacagctggcccaggctgagcaagaagggaagactgccttggagcagcagaaggcagcccatgagaaagaggtgaaccagctccgggagaaatgggagaaggagcgctcctggcaccagcaggagctggcaaaggctctggagagcttagaaagggaaaaaatggagctggaaatgaggctaaaggagcagcagacagaaatggaggccatccaggcccagagggaagaagaacggacccaggcagagagtgccctatgccagatgcagctggaaacagagaaggagagagtatccctcctggagacactgctgcagacgcagaaggagctagcagatgccagccaacaactggaacgactgaggcaggacatgaaagtccagaaattaaaggagcaggagaccactgggatactacagacccagctccaggaggctcaacgggagctgaaggaggcagcccggcagcacagagatgaccttgctgccctccaagaagagagcagctccctgctgcaggataagatggacctgcagaagcaggtggaggacttgaagtctcagctggtggcccaggatgactcccagaggctggtggagcaggaggttcaggagaagctgagagagacccaggagtataaccgaattcagaaggagctggagagagagaaagccagcctgactctgtcactgatggaaaaggaacagagactccttgttttacaagaagctgactctattcgacaacaagagctgagtgccctgcgccaggacatgcaggaggcccagggagaacagaaagagctcagtgctcagatggaattactaaggcaagaggtgaaggaaaaggaggctgactttctggcccaggaagcacagctgctggaggagctggaggcgtctcatatcacggagcagcagctgcgagcctccttgtgggcccaggaagccaaggcagcccaactacagctgcgactgcgcagcacagagagccagctagaagcgctggccgcagagcagcagcccgggaaccaggcccaggcccaggcccagctggccagcctctactctgccctgcagcaggccctggggtctgtttgtgagagcaggcctgagctgagtggtgggggagactctgctccttccgtctggggccttgagccagaccagaatggagctaggagcctctttaagagagggcccctgctgactgctctctccgctgaggcagtagcatctgccctccacaagcttcatcaagacctgtggaagactcaacagacccgggatgttctgagggatcaggtccagaaactggaagagcgtctaactgatactgaggctgagaagagccaggtccacacagagttgcaggatctgcagagacagctctcccagaatcaggaagagaaatccaagtgggaaggaaagcagaactccctagaatctgagctgatggaactacatgaaactatggcatccttacagagtcgcctgcggagagcagagctacagcgaatggaagcccagggtgagcgagagttacttcaggcagccaaggagaacctgacagcccaggtggaacacctgcaagcagctgtcgtagaagccagggctcaggcaagtgctgctggcatcctggaagaagacctgagaacggctcgctcagcactgaagctgaaaaatgaggaagtagagagtgagcgtgagagagcccaggctctgcaagagcagggcgaactgaaggtggcccaagggaaggctctgcaagagaatttggccctcctgacccagaccctagctgaaagagaagaggaggtggagactctgcggggacaaatccaggaactggagaagcaacgggaaatgcagaaggctgctttggaattgctgtctctggacctgaagaagaggaaccaagaggtagatctgcagcaagaacagattcaggagctagagaagtgtaggtctgttttagagcatctgcccatggccgtccaggagcgagagcagaagctgactgtgcagagggagcagatcagagagctcgagaaggatcgggagactcagaggaacgtcttggagcatcagcttctagaacttgagaagaaagaccaaatgattgagtcccagagaggacaggttcaggacctgaaaaagcagttggttactctggaatgcctggccctggaactggaggaaaaccatcacaagatggagtgccagcaaaaactgatcaaggagctggagggccagagggaaacccagagagtggctttgacccaccttacgctggacctagaagaaaggagccaggagctgcaggcacaaagcagccagatccatgacctggagagccacagcaccgttctggcaagagagctgcaggagagggaccaggaggtgaagtctcagcgagaacagatcgaggagctgcagaggcagaaagagcatctgactcaggatctcgagaggagagaccaggagctgatgctgcagaaggagaggattcaggttctcgaggatcagaggacccggcagaccaagatcctggaggaggacctggaacagatcaagctgtccttgagagagcgaggccgggagctgaccactcagaggcagctgatgcaggaacgggcagaggaagggaagggcccaagtaaagcacagcgcgggagcctagagcacatgaagctgatcctgcgtgataaggagaaggaggtggaatgtcagcaggagcatatccatgaactccaggagctcaaagaccagctggagcagcagctccagggcctgcacaggaaggtaggtgagaccagcctcctcctgtcccagcgagagcaggaaatagtggtcctgcagcagcaactgcaggaagccagggaacaaggggagctgaaggagcagtcacttcagagtcaactggatgaggcccagagagccctagcccagagggaccaggaactggaggctctgcagcaagaacagcagcaggcccagggacaggaggagagggtgaaggaaaaggcagacgccctccagggagctctggagcaagcccatatgacactgaaggagcgtcatggagagcttcaggaccacaaggaacaggcacgaaggctggaggaagagctggcagtggagggacggcgggtccaggccctggaggaggtgctgggagacctaagggctgagtctcgggaacaggagaaagctctgttggccctccagcagcagtgtgctgagcaggcacaggagcatgaggtggagaccagggccctgcaggacagctggctgcaggcccaggcagtgctcaaggaacgggaccaggagctggaagctctgcgggcagaaagtcagtcctcccggcatcaggaggaggctgcccgggcccgggctgaggctctgcaggaggcccttggcaaggctcatgctgccctgcaggggaaagagcagcatctcctcgagcaggcagaattgagccgcagtctggaggccagcactgcaaccctgcaagcctccctggatgcctgccaggcacacagtcggcagctggaggaggctctgaggatacaagaaggtgagatccaggaccaggatctccgataccaggaggatgtgcagcagctgcagcaggcacttgcccagagggatgaagagctgagacatcagcaggaacgggagcagctgctggagaagtctctggcccagagggtccaagagaatatgatccaagagaagcagaatctggggcaagagagagaagaggaggagataaggggccttcatcagagtgtaagggagctacagctgactctagcccaaaaggaacaggagattctggagctgagggagacccagcaaaggaacaacctggaagccttaccccacagccacaaaacctccccaatggaggaacaatctctaaaacttgattctttagagcccaggctgcagcgggagctggagcggctacaggcagccctgagacagacagaagccagggagattgagtggagggagaaggcccaggacttggcactctccctagcgcagaccaaggccagtgtcagcagtctgcaggaggtagccatgttcctacaagcctctgtcctggagcgggactcagaacagcaaaggctgcaggatgaactggagctcaccagacgggctctggagaaggagcggctacacagcccaggtgcaaccagcacagcagaactggggtccagaggggagcagggtgtgcagctgggagaggtctcaggagtggaggctgagcctagtcctgatggaatggagaagcagtcatggagacaaaggcttgaacacctgcagcaagcagtggcccggctggagattgacaggagcaggctgcagcgccacaatgtccagctgcggagtaccttggagcaggtggagcgagaacggaggaagctgaagagggaggccatgcgtgcggcccaggcagggtccctagagatcagcaaggccacggcttcttcacccacacagcaggatgggagaggacagaagaactcagatgccaagtgtgtggctgaactgcagaaagaggtggtcctgctgcaagctcagctgactttggagcggaagcagaagcaggactacatcacccgctcagcacagaccagccgtgagctagcaggcctgcaccacagcctctcacactcacttcttgccgtggcccaggcccctgaggccactgtcctggaggcagagacccgcaggctggatgagtccctgactcaaagtctgacatccccagggccagtcctgctacaccccagccccagcactacccaagccgcctccaggtagcagccacagccaggagcacacagacagaagactgtgtcatgggtcatggcccctccgcacacctacaggtttgccaaaggaaaagcctggctctgttaggcacccaggagccccaggtcggcgggtgttcccaggaagaggaagtaaatctgcaaccctggggaggaccccaactcacctgggaatgaggcaaattgcatttgcttgctccctatggaatcacccagaggggtgccttgccctggctgagggacatgtactgcctctcatctagaatttattttcctagcacttcaccacctccttcatcttctccttcaacaataaaccctgagatctttgcattcat

SEQ ID NO: 9580 - protein, 2442 aa, Homo sapiens; identical to SEQ ID NO: 1212

SEQ ID NO: 9581 - DNA, 1243 bp, Homo sapiens
ggcgaactgaaggtggcccaagggaaggctctgcaagagaatttggccctcctgacccagaccctagctgaaagagaagaggaggtggagactctgcggggacaaatccaggaactggagaagcaacgggaaatgcagaaggctgctttggaattgctgtctctggacctgaagaagaggaaccaagaggtagatctgcagcaagaacagattcaggagctagagaagtgtaggtctgttttagagcatctgcccatggccgtccaggagcgagagcagaagctgactgtgcagagggagcagatcagagagctcgagaaggatcgggagactcagaggaacgtcttggagcatcagcttctagaacttgagaagaaagaccaaatgattgagtcccagagaggacaggttcaggacctgaaaaagcagttggttactctggaatgcctggccctggaactggaggaaaaccatcacaagatggagtgccagcaaaaactgatcaaggagctggagggccagagggaaacccagagagtggctttgacccaccttacgctggacctagaagaaaggagccaggagctgcaggcacaaagcagccagatccatgacctggagagccacagcaccgttctggcaagagagctgcaggagagggaccaggaggtgaagtctcagcgagaacagatcgaggagctgcctccctctggacctattcagtcctcaagggtgccctgctaaaggctgggctgaaagctaagaggagaggtggcattcaatgtgtcctgtgtcctccctggggttgattaaggggtcgatgcccaatagagtccttcatcttggcgttcagcccagggtccagctgccaagggaaggcttggcaatcaagggtgatggagataagaatgaaaaggggcaccaccctgtgccaaagctggcatgttgtatatctgagagaggagctgcctattcacagtgtagggttgtcaagctggaggcagggagagaaaagcaagagctttttggttcctcttgaggatagaatctataggaaaatgtaagagggttaaaaataaatttcccatgcatccaaacttttttctttggtagactttcttgtcatctatttaaaatgaaacaagtgcatgtacgtggttaagacattttagctaggaatgatggtgcgtgcctgtagtcccagctacttgggaggctgaggcaggaggatcgcttgaacctg

SEQ ID NO: 9582 - protein, 203 aa, Homo sapiens
MQKAALELLSLDLKKRNQEVDLQQEQIQELEKCRSVLEHLPMAVQEREQKLTVQREQIRELEKDRETQRNVLEHQLLELEKKDQMIESQRGQVQDLKKQLVTLECLALELEENHHKMECQQKLIKELEGQRETQRVALTHLTLDLEERSQELQAQSSQIHDLESHSTVLARELQERDQEVKSQREQIEELPPSGPIQSSRVPC

SEQ ID NO: 9583 - DNA, 496 bp, Homo sapiens
aggtatatccaggaaagttggctggagaaccatggtcagtatccgtccttggagtttgtggctctgttgtatgccttgcatacctgtgaccaggtatccttgtttggttttggggaagacaattgcaaaaggtggtcccattactgggatgacaaatattggtttgagaacaccatgcaaaatttcccagcagaataccagatcatcttgaaactgcagtgtgagaggaagattgctgtctacggctgagatgtttccagtggagtccccaggaggcttgacaggtagccaaggggaccttgtggtgtcagagagggactagggcttcaagcagaccctggatggagattactctgctactgaataaaaccctagcttatttctctctctggatttctggtggcattaaagggctacattctattactgattctgtcttatcaccatgtgactctcttatgctgtatcttaccaaaaaataaaattaaatgagaaa

SEQ ID NO: 9584 - protein, 59 aa, Homo sapiens
MVSIRPWSLWLCCMPCIPVTRYPCLVLGKTIAKGGPITGMTNIGLRTPCKISQQNTRSS

SEQ ID NO: 9585 - DNA, 870 bp, Homo sapiens
atgctggggacttctgtggccccagcctcttcttcccggtgccaggtgtcggggccaatctactgtctgccaggggcaccatcatcagggccagagatcatgattcgatacaggagtttgggcctggtggctgcctatgtcctttcattgtggctgatcacctccttcctacaccagcactccagccagaaggacctccgtaatatggccaagatacacccaggaatctgccaccatcccagcaacttttccagaaaatgcaactgctcatctgaggtccacacatgctctgcctgcctccacgtgcctggcgagtctgactggtttgacagacgcttcgacagtaccgttgaacccctacagaggccacaagatcccacgtccaatgatgctctgatattgtggctgggactcgagagggtcaagtcagagaaggaggttgagaataagcagcagcagctgattaaagcacctcccctgtgcccactgggccatgtggtgtccaactgccgggtctgtgcagtggtgggaaactcaaggtctctatggagctctggccttggcttcaggattaatcaacatgaagtggtcctcaggatgaaccaggcccctgtctgaggctttgaggcagatgtggggaacaggaccaccatgcgcgttatgtaccctgggattgccagccctcaggaccccggtacccaactgctgctgcttccgttgaattcatctggtctggagtggttcataagtgtactgcataaacagacaagcatgtggaagcaaaaaaaaccctggatttcagacggttcaggttcctggtggaaccgaagacagcaaagataaggtgctggtgatcagcctctacttcct

SEQ ID NO: 9586 - protein, 205 aa, Homo sapiens
MLGTSVAPASSSRCQVSGPIYCLPGAPSSGPEIMIRYRSLGLVAAYVLSLWLITSFLHQHSSQKDLRNMAKIHPGICHHPSNFSRKCNCSSEVHTCSACLHVPGESDWFDRRFDSTVEPLQRPQDPTSNDALILWLGLERVKSEKEVENKQQQLIKAPPLCPLGHVVSNCRVCAVVGNSRSLWSSGLGFRINQHEVVLRMNQAPV

SEQ ID NO: 9587 - DNA, 1034 bp, Homo sapiens
acatgctgtctctctgccctggcctcttccaccccatgcccagtcagagaccgttttgaggcattgcgactgcccttggttcagttccgggaagtgtggctgcccttctgagaccctcaactgctcctcctgccaccacacagccgacgaatggaactggcttgatgcgtgctccaggaagactatggggtacctgatgaggacaagagagtctatgacctctgacactgtgctctggtggttggtcagtggtcaacactgggcccggccatatcccccatgctttccgggcctcacccatctcccactttccgcccaaatccctgcccttggccctgtcttcacagcctctggatggagatctcacccacccagctctgttttctctcccctgggcccagcccccaatctccctcttgctgtttccagggcatgaactcagggagcgagcttgggaaattgtggaggaagctgtttaaagggattcccaggctctcggtgagccattttgatttctattgtgggacttgtgtgctgttggggcgcccacagatcccgcagggctccagccttggcaacgacatcgaccaataccccgtggttttcaggaatgccagcgaccagggctcctggatgcagctggagatgctactgcggaagctctctgacctggtgtggacttcagatgctctaagtgataagattttggaagatggtctggttccctagtggagtggaagatagcaaagacacggtcaccctctttggatttggatcagaatagcaaggaaagtgtttctatcactggaaggaggataatcagaccaagggctccaaggaaatactgcccacgtctagtgcaggagcagaaatcgaagtcatccatcagctagcgtgtggacaagctcactattcacacaagctcagcctagctgagtccatacaaatcctatttctgggtgggtaaagggcaggaggaaattgtaagatcagtctggtactgaataaaatcctggcctgattgtcttacctgt

SEQ ID NO: 9588 - protein, 149 aa, Homo sapiens
MLSGPHPSPTFRPNPCPWPCLHSLWMEISPTQLCFLSPGPSPQSPSCCFQGMNSGSELGKLWRKLFKGIPRLSVSHFDFYCGTCVLLGRPQIPQGSSLGNDIDQYPVVFRNASDQGSWMQLEMLLRKLSDLVWTSDALSDKILEDGLVP

SEQ ID NO: 9589 - DNA, 383 bp, Homo sapiens
agccacatgctgtctctctgccctggcctcttccaccccatgcccagtcagagaccgttttgaggcattgcgactgcccttggttcagttccgggaagtgtggctgcccttctgagaccctcaactgctcctcctgccaccacacagccgacgaatggaactggcttgatgcgtgctccaggaagactatggggtacctgatgaggacaagagagtctatgacctctgacactgtgctctggtggttgggcatgaactcagggagcgagcttgggaaattgtggaggaagctgtttaaagggattcccaggctctcggtgagccattttgatttctattgtgggacttgtgtgctgttggggcgcccacagatcccgcagggc

SEQ ID NO: 9590 - protein, 64 aa, Homo sapiens
MGYLMRTRESMTSDTVLWWLGMNSGSELGKLWRKLFKGIPRLSVSHFDFYCGTCVLLGRPQIPQ

SEQ ID NO: 9591 - DNA, 536 bp, Homo sapiens
actgaggtattccttcccctctcaggactagccacatgctgtctctctgccctggcctcttccaccccatgcccagtcagagaccgttttgagggtagagaagccagtctacggcccaccacgggagccaccgcctgggccagacatgaagcgctggcagatttttgtcctgtgggtcttttgggtgctcatcctctggctgatgaccccctatctggatctgacacctgaatcagcaccccaggaaaaacgaatgtacttggtaccacagcattgcgactgcccttggttcagttccgggaagtgtggctgcccttctgagaccctcaactgctcctcctgccaccacacagccgacgaatggaactggcttgatgcgtgctccaggaagactatggggtacctgatgaggacaagagagtctatgacctctgacactgtgctctggtggttgggcatgaactcagggagcgagcttgggaaattgtggaggaagctgtttaaagggattcccaggctctcggtgagccattttg

SEQ ID NO: 9592 - protein, 129 aa, Homo sapiens
MKRWQIFVLWVFWVLILWLMTPYLDLTPESAPQEKRMYLVPQHCDCPWFSSGKCGCPSETLNCSSCHHTADEWNWLDACSRKTMGYLMRTRESMTSDTVLWWLGMNSGSELGKLWRKLFKGIPRLSVSH

SEQ ID NO: 9593 - DNA, 789 bp, Homo sapiens
aggggggcgtggctccaggccggaagagggagtctgtaggggcgggccggctggcgtcccctttccggccggtccccatggaggcgctggggaagctgaagcagttcgatgcctaccccaagactttggaggacttccgggtcaagacctgcgggggcgccaccgtgaccattgtcagtggccttctcatgctgctactgttcctgtccgagctgcagtattacctcaccacggaggtgcatcctgagctctacgtggacaagtcgcggggagataaactgaagatcaacatcgatgtactttttccgcacatgccttgtgcctatctgagtattgatgccatggatgtggccggagaacagcagctggatgtggaacacaacctgttcaagcaacgactagataaagatggcatccccgtgagctcagaggctgagcggcatgagcttgggaaagtcgaggtgacggtgtttgaccctgactccctggaccctgatcgctgtgagagctgctatggtgctgaggcagaagatatcaagtgctgtaacacctgtgaagatgtgcgggaggcatatcgcctggctggactcatcgattcgctcatctaccactcagcacgagccatccagaagaaaattgatctagggaagacaacgtagtcaccctcggtgcttcctctgtctcctctttctccctggcctgtggttgtcccccagcctctgccaccctccacctcctcggtcagccccagccccaggttgataaatctattgattgattgtgatagta

SEQ ID NO: 9594 - protein, 193 aa, Homo sapiens
MEALGKLKQFDAYPKTLEDFRVKTCGGATVTIVSGLLMLLLFLSELQYYLTTEVHPELYVDKSRGDKLKINIDVLFPHMPCAYLSIDAMDVAGEQQLDVEHNLFKQRLDKDGIPVSSEAERHELGKVEVTVFDPDSLDPDRCESCYGAEAEDIKCCNTCEDVREAYRLAGLIDSLIYHSARAIQKKIDLGKTT

SEQ ID NO: 9595 - DNA, 1369 bp, Homo sapiens
gtggctccaggccggaagagggagtctgtaggggcgggccggctggcgtcccctttccggccggtccccatggaggcgctggggaagctgaagcagttcgatgcctaccccaagactttggaggacttccgggtcaagacctgcgggggcgccaccgtgaccattgtcagtggccttctcatgctgctactgttcctgtccgagctgcagtattacctcaccacggaggtgcatcctgagctctacgtggacaagtcgcggggagataaactgaagatcaacatcgatgtactttttccgcacatgccttgtgcctatctgagtattgatgccatggatgtggccggagaacagcagctggatgtggaacacaacctgttcaagcaacgactagataaagatggcatccccgtgagctcagaggctgagcggcatgagcttgggaaagtcgaggtgacggtgtttgaccctgactccctggaccctgatcgctgtgagagctgctatggtgctgaggcagaagatatcaagtgctgtaacacctgtgaagatgtgcgggaggcatatcgccgtagaggctgggccttcaagaacccagatactattgagcagtgccggcgagagggcttcagccagaagatgcaggagcagaagaatgaaggctgccaggtgtatggcttcttggaagtcaataaggtggccggaaacttccactttgcccctgggaagagcttccagcagtcccatgtgcacgtacatgctgtggagatccatgacttgcagagctttggccttgacaacatcaacatgacccactacatccagcacctgtcatttggggaggactatccaggcattgtgaaccccctggaccacaccaatgtcactgcgccccaagcctccatgatgttccagtactttgtgaaggtggtgcccactgtgtacatgaaggtggacggagaggtactgaggacaaatcagttctctgtgaccagacatgagaaggttgccaatgggctgttgggcgaccaaggccttcccggagtcttcgtcctctatgagctctcgcccatgatggtgaagctgacggagaagcacaggtccttcacccacttcctgacaggtgtgtgcgccatcattgggggcatgttcacagtggctggactcatcgattcgctcatctaccactcagcacgagccatccagaagaaaattgatctagggaagacaacgtagtcaccctcggtgcttcctctgtctcctctttctccctggcctgtggttgtcccccagcctctgccaccctccacctcctcggtcagccccagccccaggttgataaatctattgattgattgtgatagtactc

SEQ ID NO: 9596 - protein, 388 aa, Homo sapiens; identical to SEQ ID NO: 1218

SEQ ID NO: 9597 - DNA, 1355 bp, Homo sapiens
gtggctccaggccggaagagggagtctgtaggggcgggccggctggcgtcccctttccggccggtccccatggaggcgctggggaagctgaagcagttcgatgcctaccccaagactttggaggacttccgggtcaagacctgcgggggcgccaccgtgaccattgtcagtggccttctcatgctgctactgttcctgtccgagctgcagtattacctcaccacggaggtgcatcctgagctctacgtggacaagtcgcggggagataaactgaagatcaacatcgatgtactttttccgcacatgccttgtgcctatctgagtattgatgccatggatgtggccggagaacagcagctggatgtggaacacaacctgttcaagcaacgactagataaagatggcatccccgtgagctcagaggctgagcggcatgagcttgggaaagtcgaggtgacggtgtttgaccctgactccctggaccctgatcgctgtgagagctgctatggtgctgaggcagaagatatcaagtgctgtaacacctgtgaagatgtgcgggaggcatatcgccgtagaggctgggccttcaagaacccagatactattgagcagtgccggcgagagggcttcagccagaagatgcaggagcagaagaatgaaggctgccaggtgtatggcttcttggaagtcaataaggtggccggaaacttccactttgcccctgggaagagcttccagcagtcccatgtgcacgtccatgacttgcagagctttggccttgacaacatcaacatgacccactacatccagcacctgtcatttggggaggactatccaggcattgtgaaccccctggaccacaccaatgtcactgcgccccaagcctccatgatgttccagtactttgtgaaggtggtgcccactgtgtacatgaaggtggacggagaggtactgaggacaaatcagttctctgtgaccagacatgagaaggttgccaatgggctgttgggcgaccaaggccttcccggagtcttcgtcctctatgagctctcgcccatgatggtgaagctgacggagaagcacaggtccttcacccacttcctgacaggtgtgtgcgccatcattgggggcatgttcacagtggctggactcatcgattcgctcatctaccactcagcacgagccatccagaagaaaattgatctagggaagacaacgtagtcaccctcggtgcttcctctgtctcctctttctccctggcctgtggttgtcccccagcctctgccaccctccacctcctcggtcagccccagccccaggttgataaatctattgattgattgtgatagtactca

SEQ ID NO: 9598 - protein, 383 aa, Homo sapiens; identical to SEQ ID NO: 1216

SEQ ID NO: 9599 - DNA, 687 bp, Homo sapiens
tggctccaggccggaagagggagtctgtaggggcgggccggctggcgtcccctttccggccggtccccatggaggcgctggggaagctgaagcagttcgatgcctaccccaagactttggaggacttccgggtcaagacctgcgggggcgccaccgtgaccattgtcagtggccttctcatgctgctactgttcctgtccgagctgcagtattacctcaccacggaggtgcatcctgagctctacgtggacaagtcgcggggagataaactgaagatcaacatcgatgtactttttccgcacatgccttgtgcctatctgagtattgatgccatggatgtggccggagaacagcagctggatgtggaacacaacctgttcaagcaacgactagataaagatggcatccccgtgagctcagaggctgagcggcatgcagattaatgcaggacaccagtggaaccaacataatttgctataggactggatgtggagtggaggagagcaaagtcatggttgttgattccaacgctttcagcctgagcaaatgaatgacttgagatggagatgactggaggagaaggtttttttggtgggagggaggagtggctattggatatccactgctgtgtaacaaagtactccaaaagttagtagtttgatacaataaaaatgtgttttttcagtt

SEQ ID NO: 9600 - protein, 124 aa, Homo sapiens
MEALGKLKQFDAYPKTLEDFRVKTCGGATVTIVSGLLMLLLFLSELQYYLTTEVHPELYVDKSRGDKLKINIDVLFPHMPCAYLSIDAMDVAGEQQLDVEHNLFKQRLDKDGIPVSSEAERHAD

SEQ ID NO: 9601 - DNA, 1672 bp, Homo sapiens
tggctccaggccggaagagggagtctgtaggggcgggccggctggcgtcccctttccggccggtccccatggaggcgctggggaagctgaagcagttcgatgcctaccccaagactttggaggacttccgggtcaagacctgcgggggcgccaccgtgaccattgtcagtggccttctcatgctgctactgttcctgtccgagctgcagtattacctcaccacggaggtgcatcctgagctctacgtggacaagtcgcggggagataaactgaagatcaacatcgatgtactttttccgcacatgccttgtgcctatctgagtattgatgccatggatgtggccggagaacagcagctggatgtggaacacaacctgttcaagcaacgactagataaagatggcatccccgtgagctcagaggctgagcggcatgagcttgggaaagtcgaggtgacggtgtttgaccctgactccctggaccctgatcgctgtgagagctgctatggtgctgaggcagaagatatcaagtgctgtaacacctgtgaagatgtgcgggaggcatatcgccgtagaggctgggccttcaagaacccagatactattgagcagtgccggcgagagggcttcagccagaagatgcaggagcagaagaatgaaggctgccaggtgtatggcttcttggaagtcaataaggtggccggaaacttccactttgcccctgggaagagcttccagcagtcccatgtgcacggtgagtgatctgcactagctggggagatttagatgctggccaccttcttggtgagcttgagtggtcctcttctgcctgctgctcatttgtcttgggcaaccatttggccagagcaggccttcatctcagggcagcagtttggcacagtggctaagagcacaggccgaggagccagactgcctgcattcagataccagtttcagaccttactggctgtgtgactttgagaaggtttcttaatctttttgactcctgttttctactttataaaatgttgatgagggcacttatctcacagggtgtgtgtgcaggttaaagatgatagcacggagcctggcttgtggtaggtacttgttgaaatggtagccccccgtgtccgatgatgacctgtgcatgaggctttgggagaagcagagctaggttggagcacaggttctgccacacctgggctatgtcatatttgggccctatttagttgcttcttctgtaaaatggggatgatgataatagtacccactcacagggctgttggggtgaacaaatgagatttattctcattcatttgttcattcatgcattcacaaaatatttagtaatcacctactagtctagttgctaagggtacagtagtgaacaatctgtgccctcagaacattctagtaaagaaatagacaataagtatataaaatataaatagtccccaattaacaatggttcagcttgcaatttttaacttcatgatgggtattacatgcatttttcacttaacgatattttctttttcttttttgagacagagtctcactctgtcgcccaggctggagtgcagtggcatgatcttgactcactgcaacctccacctcctggattcaagtgattctcctacctcagcctcttgagtagctgggtgtacaggtgc

SEQ ID NO: 9602 - protein, 230 aa, Homo sapiens
MEALGKLKQFDAYPKTLEDFRVKTCGGATVTIVSGLLMLLLFLSELQYYLTTEVHPELYVDKSRGDKLKINIDVLFPHMPCAYLSIDAMDVAGEQQLDVEHNLFKQRLDKDGIPVSSEAERHELGKVEVTVFDPDSLDPDRCESCYGAEAEDIKCCNTCEDVREAYRRRGWAFKNPDTIEQCRREGFSQKMQEQKNEGCQVYGFLEVNKVAGNFHFAPGKSFQQSHVHGE

SEQ ID NO: 9603 - DNA, 1398 bp, Homo sapiens
tggctccaggccggaagagggagtctgtaggggcgggccggctggcgtcccctttccggccggtccccatggaggcgctggggaagctgaagcagttcgatgcctaccccaagactttggaggacttccgggtcaagacctgcgggggcgccaccgtgaccattgtcagtggccttctcatgctgctactgttcctgtccgagctgcagtattacctcaccacggaggtgcatcctgagctctacgtggacaagtcgcggggagataaactgaagatcaacatcgatgtactttttccgcacatgccttgtgcctatctgagtattgatgccatggatgtggccggagaacagcagctggatgtggaacacaacctgttcaagcaacgactagataaagatggcatccccgtgagctcagaggctgagcggcatgagcttgggaaagtcgaggtgacggtgtttgaccctgactccctggaccctgatcgctgtgagagctgctatggtgctgaggcagaagatatcaagtgctgtaacacctgtgaagatgtgcgggaggcatatcgccgtagaggctgggccttcaagaacccagatactattgagcagtgccggcgagagggcttcagccagaagatgcaggagcagaagaatgaaggctgccaggtgtatggcttcttggaagtcaataaggtggccggaaacttccactttgcccctgggaagagcttccagcagtcccatgtgcacgggtgtgtgtgcaggttaaagatgatagcacggagcctggcttgtgtccatgacttgcagagctttggccttgacaacatcaacatgacccactacatccagcacctgtcatttggggaggactatccaggcattgtgaaccccctggaccacaccaatgtcactgcgccccaagcctccatgatgttccagtactttgtgaaggtggtgcccactgtgtacatgaaggtggacggagaggtactgaggacaaatcagttctctgtgaccagacatgagaaggttgccaatgggctgttgggcgaccaaggccttcccggagtcttcgtcctctatgagctctcgcccatgatggtgaagctgacggagaagcacaggtccttcacccacttcctgacaggtgtgtgcgccatcattgggggcatgttcacagtggctggactcatcgattcgctcatctaccactcagcacgagccatccagaagaaaattgatctagggaagacaacgtagtcaccctcggtgcttcctctgtctcctctttctccctggcctgtggttgtcccccagcctctgccaccctccacctcctcggtcagccccagccccaggttgataaatctattgattgattgtgatagtactc

SEQ ID NO: 9604 - protein, 398 aa, Homo sapiens
MEALGKLKQFDAYPKTLEDFRVKTCGGATVTIVSGLLMLLLFLSELQYYLTTEVHPELYVDKSRGDKLKINIDVLFPHMPCAYLSIDAMDVAGEQQLDVEHNLFKQRLDKDGIPVSSEAERHELGKVEVTVFDPDSLDPDRCESCYGAEAEDIKCCNTCEDVREAYRRRGWAFKNPDTIEQCRREGFSQKMQEQKNEGCQVYGFLEVNKVAGNFHFAPGKSFQQSHVHGCVCRLKMIARSLACVHDLQSFGLDNINMTHYIQHLSFGEDYPGIVNPLDHTNVTAPQASMMFQYFVKVVPTVYMKVDGEVLRTNQFSVTRHEKVANGLLGDQGLPGVFVLYELSPMMVKLTEKHRSFTHFLTGVCAIIGGMFTVAGLIDSLIYHSARAIQKKIDLGKTT

SEQ ID NO: 9605 - DNA, 530 bp, Homo sapiens
gccggctggcgtcccctttccggccggtccccatggaggcgctggggaagctgaagcagttcgatgcctaccccaagactttggaggacttccgggtcaagacctgcgggggcgccaccgtgaccattgtcagtggccttctcatgctgctactgttcctgtccgagctgcagtattacctcaccacggagatctgagtattgatgccatggatgtggccggagaacagcagctggatgtggaacacaacctgttcaagcaacgactagataaagatggcatccccgtgagctcagaggctgagcggcatgagcttgggaaagtcgaggtgacggtgtttgaccctgactccctggaccctgatcgctgtgagagctgctatggtgctgaggcagaagatatcaagtgctgtaacacctgtgaagatgtgcgggaggcatatcgccgtagaggctgggccttcaagaacccagatactattgagcagtgccggcgagagggcttcagccagaagatgcaggagcagaaga

SEQ ID NO: 9606 - protein, 106 aa, Homo sapiens
MDVAGEQQLDVEHNLFKQRLDKDGIPVSSEAERHELGKVEVTVFDPDSLDPDRCESCYGAEAEDIKCCNTCEDVREAYRRRGWAFKNPDTIEQCRREGFSQKMQEQ

SEQ ID NO: 9607 - DNA, 2843 bp, Homo sapiens
cccctttccggccggtccccatggaggcgctggggaagctgaagcagttcgatgcctaccccaagactttggaggacttccgggtcaagacctgcgggggcgccaccgtgaccattgtcagtggccttctcatgctgctactgttcctgtccgagctgcagtattacctcaccacggaggtgcatcctgagctctacgtggacaagtcgcggggagataaactgaagatcaacatcgatgtactttttccgcacatgccttgtgcctatctgagtattgatgccatggatgtggccggagaacagcagctggatgtggaacacaacctgttcaagcaacgactagataaagatggcatccccgtgagctcagaggctgagcggcatggtaaccaggggagggggccgggtctcagatcccaaagctggatgtacccaagcctatctgctagcaagtgaactgtggcaggcatagtgatacattaaacaactaagagctagagaagtcaagtgacttgcctagggtcccccagctagtaagagtcagagtgagctaaaatcctctatacatatcgagtcaggtaatctacctggctattattctcagaggtcctcaatacctgcagatggtagtttgaataccagaggtttgaagataggtcttatgtgctcttgccttggtagaactgtctagatggacccaggcttctttgagtgtttgctttcccagcccattggcttaattcagcccttaatgctcttcccctttggaatgcaggtggtttaatgagaatttaggttctcaagtcagattgcctgggttcacatctagctttgtctcctgcagtctgtgagcttcagctagaaagtggtaataaaacagtagtaccaaccacatggaattgtaagatcaaatgaagtcatatgtgtaaaatgcctggtacagagtgggtacccacttttaccttcctttcctttatcttggtggcttcccaattcccttcgttaactcagtttcccaccacagcaaactgtcctcaaagctgggatttctaacaccttagagattactctggtggggagttttatcattcgttgtttcagcagattaatgcaggacaccagtggaaccaacataatttgctataggactggatgtggagtggaggagagcaaagtcatggttgttgattccaacgctttcagcctgagcaaatgaatgacttgagatggagatgactggaggagaaggtttttttggtgggagggaggagtggctattggatatccactgctgtgtaacaaagtactccaaaagttagtagtttgatacaataaaaatgtgttttttcagtttccctgggtcaggaatttaggagtggcttgtttgggtgattcgggattagggtatctcacgaggttgcagtcatctaaggattgatggggcactgaagaatctactatctatctatctatctatctatctatctatctatctatctatctgtctatcttgagacagagtctcactttgtcgcccaggctggagtgcagtggcgcgatcttggctcactgcaacctccgcctcccaggttcaagtgattctcctgcctcaacctcccgagtagctgggattacaggcctgtgccaccatgcccagctaattttttgtatttttagtagagacggggttgcaccttgttgggccagatggtcttgatctcttgaccttgtgatccacccgcctcagccttccaaagtgctgggattacaggcatgagccactgcgcctggcctacttatttgttgtttaaatttattttttttctgtcaaggtgttctttatttcagagagagggcaggacagggggctcagtctttcttggcatcagctttcctcatgatggctgggacattgctcagctcctcctgcctcctcttagtgcggatgtgcgtccccactcttttcttgatgaacttgagggcccgtttgtccttggagaccttgagtaacaccatggcgtgccgctcatacggggcgaaaccacacacctctcggatcatgtcccacatgaatttggtgtttggtcaggcgcccgcggcggcagctgtgcctgggcttgctcatgttcttggtcatcttgtggcccttgtcaaggcacacggccatagtgggtagcacagagccatggctgctgctctccaatggcagctgtggcagaagggctggtgccacgcggggatctactttttttttttttttttttttttttttgagtcacgctctgtcacccaggctggagtgcaatggtgcgatttcagctcactgcaacctctgcctcccggcttcaagtgattcacctgcctcagccttctgagtagctggggttacaggcgcctgcccccacacccggctactttttgtatttttggtagagacagggtttcaccatcgtggccaggctggtctcaaactcctgacctcaggtgatccacccgccttggcctcccaaagtgttgggattacaggcatgggccaccacgcccagcaggggatctgcttttaaagggctcactcatagggctgttggcaggatgcctcagtgcctcaccacatgggcctctcagtagggttgcttgtgtgtccttgtatcacggcaactggcttcccccacttggatcttgcaagtgagctgagagaacaaagtagaaaccataacctttggccaggcatggtggctcacgcctgtagtcccagcacttttggaggctgaggcagttggatcacctgaagtcaggagttcaagaccagcctggccaacatggtaaaaccccatctctact

SEQ ID NO: 9608 - protein, 145 aa, Homo sapiens
MEALGKLKQFDAYPKTLEDFRVKTCGGATVTIVSGLLMLLLFLSELQYYLTTEVHPELYVDKSRGDKLKINIDVLFPHMPCAYLSIDAMDVAGEQQLDVEHNLFKQRLDKDGIPVSSEAERHGNQGRGPGLRSQSWMYPSLSASK

SEQ ID NO: 9609 - DNA, 720 bp, Homo sapiens
tttccggccggtccccatggaggcgctggggaagctgaagcagttcgatgcctaccccaagactttggaggacttccgggtcaagacctgcgggggcgccaccgtgaccattgtcagtggccttctcatgctgctactgttcctgtccgagctgcagtattacccactacatccagcacctgtcatttggggaggactatccaggcattgtgaaccccctggaccacaccaatgtcactgcgccccaagcctccatgatgttccagtactttgtgaaggtggtgcccactgtgtacatgaaggtggacggagaggtactgaggacaaatcagttctctgtgaccagacatgagaaggttgccaatgggctgttgggcgaccaaggccttcccggagtcttcgtcctctatgagctctcgcccatgatggtgaagctgacggagaagcacaggtccttcacccacttcctgacaggtgtgtgcgccatcattgggggcatgttcacagtggctggactcatcgattcgctcatctaccactcagcacgagccatccagaagaaaattgatctagggaagacaacgtagtcaccctcggtgcttcctctgtctcctctttctccctggcctgtggttgtcccccagcctctgccaccctccacctcctcggtcagccccagccccaggttgataaatctattgattgattgtgatagtactc

SEQ ID NO: 9610 - protein, 111 aa, Homo sapiens
MEALGKLKQFDAYPKTLEDFRVKTCGGATVTIVSGLLMLLLFLSELQYYPLHPAPVIWGGLSRHCEPPGPHQCHCAPSLHDVPVLCEGGAHCVHEGGRRGTEDKSVLCDQT

SEQ ID NO: 9611 - DNA, 829 bp, Homo sapiens
ggggaagctgaagcagttcgatgcctaccccaagactttggaggacttccgggtcaagacctgcgggggcgccaccgtgaccattgtcagtggccttctcatagctgctatggtgctgaggcagaagatatcaagtgctgtaacacctgtgaagatgtgcgggaggcatatcgccgtagaggctgggccttcaagaacccagatactattgagcagtgccggcgagagggcttcagccagaagatgcaggagcagaagaatgaaggctgccaggtgtatggcttcttggaagtcaataaggtggccggaaacttccactttgcccctgggaagagcttccagcagtcccatgtgcacgtccatgacttgcagagctttggccttgacaacatcaacatgacccactacatccagcacctgtcatttggggaggactatccaggcattgtgaaccccctggaccacaccaatgtcactgcgccccaagcctccatgatgttccagtactttgtgaaggtggtgcccactgtgtacatgaaggtggacggagaggtactgaggacaaatcagttctctgtgaccagacatgagaaggttgccaatgggctgttgggcgaccaaggccttcccggagtcttcctcatctaccactcagcacgagccatccagaagaaaattgatctagggaagacaacgtagtcaccctcggtgcttcctctgtctcctctttctccctggcctgtggttgtcccccagcctctgccaccctccacctcctcggtcagccccagccccaggttgataaatctattgattgattgtgatagta

SEQ ID NO: 9612 - protein, 151 aa, Homo sapiens
MQEQKNEGCQVYGFLEVNKVAGNFHFAPGKSFQQSHVHVHDLQSFGLDNINMTHYIQHLSFGEDYPGIVNPLDHTNVTAPQASMMFQYFVKVVPTVYMKVDGEVLRTNQFSVTRHEKVANGLLGDQGLPGVFLIYHSARAIQKKIDLGKTT

SEQ ID NO: 9613 - DNA, 1312 bp, Homo sapiens
tggaattagctgaaatctgtttcctcggttgcattgggcaaagtcacttctcatcagtgagcctcaacatcttctcagtaaaacagggataattaccgccaccctcaaagagtcattgtggggatgaaatgagatgatggttgtgaagtacagtgatctgtacacagctaatgttcagtatttactgttgactgttttcttactgtttcttttattaaaagaattgatatgtgtgtagaagtgcttaatgcctgacccgtagcatgtactatatgaatattagttattataacttttattatccctaagcaaagggcttgtgcagactggagccaccgatttcactgtgtctggccccagctgatgcctctgcttctcccctccccttagagcttgggaaagtcgaggtgacggtgtttgaccctgactccctggaccctgatcgctgtgagagctgctatggtgctgaggcagaagatatcaagtgctgtaacacctgtgaagatgtgcgggaggcatatcgccgtagaggctgggccttcaagaacccagatactattgagcagtgccggcgagagggcttcagccagaagatgcaggagcagaagaatgaaggctgccaggtgtatggcttcttggaagtcaataaggtggccggaaacttccactttgcccctgggaagagcttccagcagtcccatgtgcacggtgagtgatctgcactagctggggagatttagatgctggccaccttcttggtgagcttgagtggtcctcttctgcctgctgctcatttgtcttgggcaaccatttggccagagcaggccttcatctcagggcagcagtttggcacagtggctaagagcacaggccgaggagccagactgcctgcattcagataccagtttcagaccttactggctgtgtgactttgagaaggtttcttaatctttttgactcctgttttctactttataaaatgttgatgagggcacttatctcacagggtgtgtgtgcaggttaaagatgatagcacggagcctggcttgtggtaggtacttgttgaaatggtagccccccgtgtccgatgatgacctgtgcatgaggctttgggagaagcagagctaggttggagcacaggttctgccacacctgggctatgtcatatttgggccctatttagttgcttcttctgtaaaatggggatgatgataatagtacccactcacagggctgttggggtgaacaaatgagatttattctcattcatttgttcattcatgcattcacaaaatatttagtaatcacctac

SEQ ID NO: 9614 - protein, 88 aa, Homo sapiens
MVLRQKISSAVTPVKMCGRHIAVEAGPSRTQILLSSAGERASARRCRSRRMKAARCMASWKSIRWPETSTLPLGRASSSPMCTVSDLH

SEQ ID NO: 9615 - DNA, 971 bp, Homo sapiens
cagggtctgttctaaagactcctgaggagggcgtgaactctcacacaggcccaaggcttgccctttctggctgtccttaagcaggaccaggaggtgccaggctggagaaggaatgaggggcagagaagacaggtggtttgcagtccagggggaggaaggaggaggccagtgctgctcctactaatgacgccttctcccttgccttctcccttctctcctagtccatgacttgcagagctttggccttgacaaccctccatgatgttccagtactttgtgaaggtggtgcccactgtgtacatgaaggtggacggagaggtgagtcagggagctccctaccagagtctcctgcgcggtgccaagcactggagttcctgcattttgttccgtcagcctggggagtgaaagctgcctcgtcctcacatggcgaataaaagactgaggcacagagagggtgggggatttgccctcccaggcagagtgcaggcctggggctgttagatttaaagcgcctgctctttctgctgccctcaccgcttctatccgttcctccggtgcccaccgtctgcctgcctcactgttctctgtggtctgcctgggctgggggttaggcaaggcaagtctctgtgtacccgctcccaaggctgccctggcctgtggagcagcatctcagcagagtggcaggatgcgaggggctgagggcagaggaagtcaggtcagccttggtgcgtctttggagagctgcttctcagcctggacccccgtgagaacacccaccaaatgctgccaggataggtaaactgtaaagacttggcacctggaggggaaggctgaggccaagactaggagagggggtctggcgggccaggccttgcagtgcaggccactagcacggtgctgtgttctctccttacacggccaaggctcaacaggaaaggggaaggagcaggggtggggctgatggtggctgg

SEQ ID NO: 9616 - protein, 69 aa, Homo sapiens
MTCRALALTTLHDVPVLCEGGAHCVHEGGRRGESGSSLPESPARCQALEFLHFVPSAWGVKAASSSHGE

SEQ ID NO: 9617 - DNA, 606 bp, Homo sapiens
cagagctttggatgagctctggatggtgttgtttacagatcaacatgacccactacatccagcacctgtcatttggggaggactatccaggcattgtgaaccccctggaccacaccaatgtcactgcgccccaagcctccatgatgttccagtactttgtgaaggtggtgcccactgtgtacatgaaggtggacggagaggtactgaggacaaatcagttctctgtgaccagacatgagaaggttgccaatgggctgttgggcgaccaaggccttcccggagtcttcgtcctctatgagctctcgcccatgatggtgaagctgacggagaagcacaggtccttcacccacttcctgacaggtgtgtgcgccatcattgggggcatgttcacagtggctggactcatcgattcgctcatctaccactcagcacgagccatccagaagaaaattgatctagggaagacaacgtagtcaccctcggtgcttcctctgtctcctctttctccctggcctgtggttgtcccccagcctctgccaccctccacctcctcggtcagccccagccccaggttgataaatctattgattgattgtgatagtactc

SEQ ID NO: 9618 - protein, 153 aa, Homo sapiens
MSSGWCCLQINMTHYIQHLSFGEDYPGIVNPLDHTNVTAPQASMMFQYFVKVVPTVYMKVDGEVLRTNQFSVTRHEKVANGLLGDQGLPGVFVLYELSPMMVKLTEKHRSFTHFLTGVCAIIGGMFTVAGLIDSLIYHSARAIQKKIDLGKTT

SEQ ID NO: 9619 - DNA, 548 bp, Homo sapiens
gctgcctcgtcctcacatggcgaataaaagactgaggcacagagagggtgggggatttgccctcccaggcagagtgcaggcctggggctgttagatttaaagcgcctgctctttctgctgccctcaccgcttctatccgttcctccggtgcccaccgtctgcctgcctcactgttctctgtggtctgcctgggctgggggttaggcaaggcaagtctctgtgtacccgctcccaaggctgccctggcctgtggagcagcatctcagcagagtggcaggatgcgaggggctgagggcagaggaagtcaggtcagccttggtgcgtctttggagagctgcttctcagcctggacccccgtgagaacacccaccaaatgctgccaggataggtactgaggacaaatcagttctctgtgaccagacatgagaaggttgccaatgggctgttgggcgaccaaggccttcccggagtcttcgtccttctgtctcctctttctccctggcctgtggttgtcccccagcctctgccaccctccacctcctcggtca

SEQ ID NO: 9620 - protein, 41 aa, Homo sapiens
MRRLPMGCWATKAFPESSSFCLLFLPGLWLSPSLCHPPPPR

SEQ ID NO: 9621 - DNA, 1018 bp, Homo sapiens
gctgcctcgtcctcacatggcgaataaaagactgaggcacagagagggtgggggatttgccctcccaggcagagtgcaggcctggggctgttagatttaaagcgcctgctctttctgctgccctcaccgcttctatccgttcctccggtgcccaccgtctgcctgcctcactgttctctgtggtctgcctgggctgggggttaggcaaggcaagtctctgtgtacccgctcccaaggctgccctggcctgtggagcagcatctcagcagagtggcaggatgcgaggggctgagggcagaggaagtcaggtcagccttggtgcgtctttggagagctgcttctcagcctggacccccgtgagaacacccaccaaatgctgccaggataggtaaactgtaaagacttggcacctggaggggaaggctgaggccaagactaggagagggggtctggcgggccaggccttgcagtgcaggccactagcacggtgctgtgttctctccttacacggccaaggctcaacaggaaaggggaaggagcaggggtggggctgatggtggctggagccaggtcctagccctagccctggcccaggctcccctcccaccccaggtactgaggacaaatcagttctctgtgaccagacatgagaaggttgccaatgggctgttgggcgaccaaggccttcccggagtcttcgtcctctatgagctctcgcccatgatggtgaagctgacggagaagcacaggtccttcacccacttcctgacaggtgtgtgcgccatcattgggggcatgttcacagtggctggactcatcgattcgctcatctaccactcagcacgagccatccagaagaaaattgatctagggaagacaacgtagtcaccctcggtgcttcctctgtctcctctttctccctggcctgtggttgtcccccagcctctgccaccctccacctcctcggtcagccccagccccaggttgataaatctattgattgattgtgatagtactc

SEQ ID NO: 9622 - protein, 54 aa, Homo sapiens
MMVKLTEKHRSFTHFLTGVCAIIGGMFTVAGLIDSLIYHSARAIQKKIDLGKTT

SEQ ID NO: 9623 - DNA, 794 bp, Homo sapiens
gctgcctcgtcctcacatggcgaataaaagactgaggcacagagagggtgggggatttgccctcccaggcagagtgcaggcctggggctgttagatttaaagcgcctgctctttctgctgccctcaccgcttctatccgttcctccggtgcccaccgtctgcctgcctcactgttctctgtggtctgcctgggctgggggttaggcaaggcaagtctctgtgtacccgctcccaaggctgccctggcctgtggagcagcatctcagcagagtggcaggatgcgaggggctgagggcagaggaagtcaggtcagccttggtgcgtctttggagagctgcttctcagcctggacccccgtgagaacacccaccaaatgctgccaggataggtactgaggacaaatcagttctctgtgaccagacatgagaaggttgccaatgggctgttgggcgaccaaggccttcccggagtcttcgtcctctatgagctctcgcccatgatggtgaagctgacggagaagcacaggtccttcacccacttcctgacaggtgtgtgcgccatcattgggggcatgttcacagtggctggactcatcgattcgctcatctaccactcagcacgagccatccagaagaaaattgatctagggaagacaacgtagtcaccctcggtgcttcctctgtctcctctttctccctggcctgtggttgtcccccagcctctgccaccctccacctcctcggtcagccccagccccaggttgataaatctattgattgattgtgatagtactc

SEQ ID NO: 9624 - protein, 54 aa, Homo sapiens; identical to SEQ ID NO: 9622

SEQ ID NO: 9625 - DNA, 282 bp, Homo sapiens
ggctgttgggcgaccaaggccttcccggagtcttcgtcctctatgagctcatcattgggggcatgttcacagtggctggactcatcgattcgctcatctaccactcagcacgagccatccagaagaaaattgatctagggaagacaacgtagtcaccctcggtgcttcctctgtctcctctttctccctggcctgtggttgtcccccagcctctgccaccctccacctcctcggtcagccccagccccaggttgataaatctattgattgattgtgatagta

SEQ ID NO: 9626 - protein, 31 aa, Homo sapiens
MSSSLGACSQWLDSSIRSSTTQHEPSRRKLI

SEQ ID NO: 9627 - DNA, 2226 bp, Homo sapiens
aaccgattctatagccaccacagagcaaactgtgggctggcctcccagtatgaagtgtgggtccagcagggcccacaggagccattctgagtttctggccaaacacattcaagctcacattcccttttgtgtctccagatcctatgatttcatggaaggggaccctcccacccaccgccactgccaaccaagacatagctcagtggtcaagacttgggcttgggagtcgggatcctgtaacgaatgtcacttgaccgctttctttttttatgaaacagtctcgctctgtctcccaggttggagtgcagtggcacgatctcggctgactgcaacctccacctcctgggttcaagcgattctcctgcctcagcctccccagtagctgggattacaggcgtgggcccccatgtccagctaatttttatattttcgctctgtctcccaggttggagtgcagtggcacgatctcggctgactgcaacctccacctcctgggttcaagcgattctcctgcctcagcctccccagtagctgggattacaggcgtgggcccccatgtccagctaatttttatatttttagtagagacagggtttcaccatgttgtccaggctggtcttgaacccctgacctcaagtgatccacccacctctgcctcccaaagtgctgggattacaggtgtgagccaccatgccaggccctcttaacctcttcaagtctgttttctcatctgcaaaacagaggtaataagatcagtatcttcttaatggaagcacctggactacatttttttcattcattgttatcataaatgaggactaacctgtctcccgttgggagttttgaacctagacctcatgtcttcatgacgtcatcactgccccaggcccagctgtgtccctacaccagccccagctgacgcatcttctttttctgcctgtagagatggttacaatgcctggcgtgatgcattctggccttcgcagatcctggcggggctgtgccaacgctgtggcctccctgcccctgaataccgagccggtgctgtcaaggtgggcagcaaagtcttcctgacaccaccggagaccctgcccccagggatctcttcacatgtggattgacatctttcctcaagatgtgcctgctccacccccagttgacatcaagcctcggcagccaatcagctatgagctcagagttgtcatctggaacacggaggatgtggttctggatgacgagaatccactcaccggagagatgtcgagtgacatctatgtgaagagctgggtgaaggggttggagcatgacaagcaggagacagacgttcacttcaactccctgactggggaggggaacttcaattggcgctttgtgttccgctttgactacctgcccacggagcgggaggtgagcgtctggcgcaggtctggaccctttgccctggaggaggcggagttccggcagcctgcagtgctggtcctgcaggtctgggactatgaccgcatctctgccaatgacttccttggatccctggagttgcagctaccagacatggtgcgtggggcccggggccccgagctctgctctgtgcagctggcccgcaatggggccgggccgaggtgcaatctgtttcgctgccgccgcctgaggggctggtggccggtagtgaagctgaaggaggcagaggacgtggagcgggaggcgcaggaggctcaggctggcaagaagaagcgaaagcagaggaggaggaagggccggccagaagacctggagttcacagacatgggtggcaatgtgtacatcctcacgggcaaggtggaggcagagtttgagctgctgactgtggaggaggccgagaaacggccagtggggaaggggcggaagcagccagagcctctggagaaacccagccgccccaaaacttccttcaactggtttgtgaacccgctgaagacctttgtcttcttcatctggcgccggtactggcgcaccctggtgctgctgctactggtgctgctcaccgtcttcctcctcctggtcttctacaccatccctggccagatcagccaggtcatcttccgtcccctccacaagtgactctcgctgaccttggacactcacccagggtgccaacccttcaatgcctgctcctggaagtctttcttacccatgtgagctaccccagagtctagtgcttcctctgaataaacctatcacagccactga

SEQ ID NO: 9628 - protein, 328 aa, Homo sapiens [sequence omitted]

SEQ ID NO: 9629 - DNA, 3600 bp, Homo sapiens
ggaccctgggcagccggagagctcattgccgcctttcaactcattgaactagactacagtggccgacttgaggtcagcatgccctggcgtggctagcacaggctgtgagcccaacttgttagtccatcaggccatccagccctagggaatataaaacatggatatgtcccaggaccagcctccaggtctcttttccccagagaataaagactgcaggtttgtcctgaggtcacctcattggaccacttgaccccaaggaacattgcaagtattcatgtgctaggttcaccttgttgggccatcctgcatgcctcagacaccctgctcccttcctgcacgaagctgcttcccgagaccccctcccttccaccaatccagccttggttggttcctgtgcatttacatttcaccagtacctctccatatcccctccccacacctaggcttttcctcctttggcctgattcctcttcgccctctgactgtttccctcctacagccctcagtgcccagtgaggtggagccccaggatctggcacccctggttgagccccactctggacgcctgtcccttccacccaacgtgtgcccagtgctcagggagttccgtgttgaggtgctgttctggggtcttaggggacttggtcgtgtgcatctgctcgaggtggagcagccccaggttgtactggaggtggctgggcaaggtgtggagtctgaggtcctggccagctaccgtgagagccccaatttcactgagcttgtcaggcatctgacagtggacttgccggagcagccttacttgcagcctccactcagcatcttggtgattgagcgccgggcctttggccacacagtccttgtgggttcccacattgtcccccacatgctgcgattcacatttcggggtcatgaggatcctcctgaggaggaaggagagatggaggagacaggggatatgatgcccaagggacctcaaggacagaagtccctggatcccttcttggctgaagcgggtatatccagacagctcctgaagcctcctctgaagaagctcccactaggaggcctcctaaatcaaggccctgggctggaggaagacatcccagatccagaggagctcgactgggggtccaagtactatgcgtcgctgcaggagctccaggggcagcacaactttgatgaagatgaaatggatgatcctggagattcagatggggtcaacctcatttctatggttggggagatccaagaccaggatctacaacaggtccctgaaggaagaatttaaccactttgaagactggctgaatgtgtttcctctgtaccgagggcaagggggccaggatggaggtggagaagaggaaggatctggacaccttgtgggcaagttcaagggctccttcctcatttaccctgaatcagaggcagtgttgttctctgagccccagatctcccgggggatcccacagaaccggcccatcaagctcctggtcagagtgtatgttgtaaaggctaccaacctggctcctgcagaccccaatggcaaagcagacccttacgtggtggtgagcgctggccgggagcggcaggacaccaaggaacgctacatccccaagcagctcaaccccatctttggagagatcctggagctaagcatctctctcccagctgagacggagctgacggtcgccgtatttgatcatgacctcgtgggttctgacgacctcatcggggagacccacattgatctggaaaaccgattctatagccaccacagagcaaactgtgggctggcctcccagtatgaagtgtgggtccagcagggcccacaggagccattctgagtttctggccaaacacattcaagctcacattcccttttgtgtctccagatcctatgatttcatggaaggggaccctcccacccaccgccactgccaaccaagacatagctcagtggtcaagacttaagcacctggactacatttttttcattcattgttatcataaatgaggactaacctgtctcccgttgggagttttgaacctagacctcatgtcttcatgacgtcatcactgccccaggcccagctgtgtccctacaccagccccagctgacgcatcttctttttctgcctgtagagatggttacaatgcctggcgtgatgcattctggccttcgcagatcctggcggggctgtgccaacgctgtggcctccctgcccctgaataccgagccggtgctgtcaaggtgggcagcaaagtcttcctgacaccaccggagaccctgcccccagggatctcttcacatgtggattgacatctttcctcaagatgtgcctgctccacccccagttgacatcaagcctcggcagccaatcagctatgagctcagagttgtcatctggaacacggaggatgtggttctggatgacgagaatccactcaccggagagatgtcgagtgacatctatgtgaagaggtaggctgctggccgggcggggcaacggcggtgcactagggggattgcaaatgggtgtgggccctcgggctgagtccagagccccgaccccaggccctccgtggtgctgagagcggggtgaggagtgggttctccatgtagctccagccctgacgctcacccaccccggccccagctgggtgaaggggttggagcatgacaagcaggagacagacgttcacttcaactccctgactggggaggggaacttcaattggcgctttgtgttccgctttgactacctgcccacggagcgggaggtgagcgtctggcgcaggtctggaccctttgccctggaggaggcggagttccggcagcctgcagtgctggtcctgcaggtctgggactatgaccgcatctctgccaatgacttccttggatccctggagttgcagctaccagacatggtgcgtggggcccggggccccgagctctgctctgtgcagctggcccgcaatggggccgggccgaggtgcaatctgtttcgctgccgccgcctgaggggctggtggccggtagtgaagctgaaggaggcagaggacgtggagcgggaggcgcaggaggctcaggctggcaagaagaagcgaaagcagaggaggaggaagggccggccagaagacctggagttcacagacatgggtggcaatgtgtacatcctcacgggcaaggtggaggcagagtttgagctgctgactgtggaggaggccgagaaacggccagtggggaaggggcggaagcagccagagcctctggagaaacccagccgccccaaaacttccttcaactggtttgtgaacccgctgaagacctttgtcttcttcatctggcgccggtactggcgcaccctggtgctgctgctactggtgctgctcaccgtcttcctcctcctggtcttctacaccatccctggccagatcagccaggtcatcttccgtcccctccacaagtgactctcgctgaccttggacactcacccagggtgccaacccttcaatgcctgctcctggaagtctttcttacccatgtgagctaccccagagtctagtgcttcctctgaataaacctatcacagccactga

SEQ ID NO: 9630 - protein, 326 aa, Homo sapiens
MPQTPCSLPARSCFPRPPPFHQSSLGWFLCIYISPVPLHIPSPHLGFSSFGLIPLRPLTVSLLQPSVPSEVEPQDLAPLVEPHSGRLSLPPNVCPVLREFRVEVLFWGLRGLGRVHLLEVEQPQVVLEVAGQGVESEVLASYRESPNFTELVRHLTVDLPEQPYLQPPLSILVIERRAFGHTVLVGSHIVPHMLRFTFRGHEDPPEEEGEMEETGDMMPKGPQGQKSLDPFLAEAGISRQLLKPPLKKLPLGGLLNQGPGLEEDIPDPEELDWGSKYYASLQELQGQHNFDEDEMDDPGDSDGVNLISMVGEIQDQDLQQVPEGRI

SEQ ID NO: 9631 - DNA, 4935 bp, Homo sapiens
ccgcccccagggctcaggctgcgtcccccgaggccgggctcccgcgatttccagctccttggggcgctgagctgttttggaggcgccccaggtcgtgttccacagcggcgcgtccgcagctgctggccaacttcttccgtttcagagcggcttagcccccctcccctgccctcacccccgaatacttggaggagatcagggtgaggtgcagagatttaccagcactcgccctccccacgctcccctccaacacgcttctcttgttccccacagcggggtttaaccctaccttcggcccggcctgggtgcccctctatggctcgccccccggcgcggggctccgggatagtcttcaaggtctcaacgaaggcgttggccaaggcatttggttccgcggccgccttctgctggctgtgtccatgcaggtgttggaagggagagctgaacctgagcctccccaggcccagcaggggtccacgttgtcccggctcacccgaaagaagaaaaagaaagccagaagggatcagaccccaaaggcggttccgcagcacttggacgccagccccggtgccgaggggcctgagatcccccgtgccatggaggtggaggtggaggagctgctgccgctgccagagaatgtcctggcgccctgtgaagatttcctgcttttcggtgtgctcttcgaggccaccatgatcgaccccaccgtggcctcccagcccatcagcttcgagatctccattggtcgcgcaggccgtctggaggagcaattgggccgagggtccagggctggggagggaactgagggtgcagccgtggaggctcagcctctgctgggagccaggccagaggaggagaaagaggaggaagaactggggacccatgctcagcggcctgagcccatggacggcagtgggccatacttctgcttgcccctctgtcactgcaagccatgcatgcatgtgtggagttgctgggaggaccacacctggcgcctgcagagcagcaactgcgtgcgcaaagtggccgagaggctggaccaggggctgcaggaggttgagagactgcagcgcaagccggggcctggcgcctgtgcacagctcaagcaggcactggaagtactggtggctgggagcagacagttttgccacggtgccgagcgcaggacgatgacccggcccaatgccctggatcgatgccgagggaaactcctggtgcacagcctgaaccttttggctaagcaaggactgcgacttctacgcggcctgagacggcgcaatgtgcaaaagaaggtggcactggccaagaagctcctggcaaaactgcgctttctggctgaggagcacaactttgatgaagatgaaatggatgatcctggagattcagatggggtcaacctcatttctatggttggggagatccaagaccagggtgaggctgaagtcaaaggcactgtgtccccaaaaaaagcagttgccaccctgaagatctacaacaggtccctgaaggaagaatttaaccactttgaagactggctgaatgtgtttcctctgtaccgagggcaagggggccaggatggaggtggagaagaggaaggatctggacaccttgtgggcaagttcaagggctccttcctcatttaccctgaatcagaggcagtgttgttctctgagccccagatctcccgggggatcccacagaaccggcccatcaagctcctggtcagagtgtatgttgtaaagctaagaaacctttgcaaaatccaaggtcatgaagacttttgcctgttttctgctgctaccaacctggctcctgcagaccccaatggcaaagcagacccttacgtggtggtgagcgctggccgggagcggcaggacaccaaggaacgctacatccccaagcagctcaaccccatctttggagagatcctggagctaagcatctctctcccagctgagacggagctgacggtcgccgtatttgatcatgacctcgtgggttctgacgacctcatcggggagacccacattgatctggaaaaccgattctatagccaccacagagcaaactgtgggctggcctcccagtatgaagtgtgggtccagcagggcccacaggagccattctgagtttctggccaaacacattcaagctcacattcccttttgtgtctccagatcctatgatttcatggaaggggaccctcccacccaccgccactgccaaccaagacatagctcagtggtcaagacttgggcttgggagtcgggatcctgtaacgaatgtcacttgaccgctttctttttttatgaaacagtctcgctctgtctcccaggttggagtgcagtggcacgatctcggctgactgcaacctccacctcctgggttcaagcgattctcctgcctcagcctccccagtagctgggattacaggcgtgggcccccatgtccagctaatttttatattttcgctctgtctcccaggttggagtgcagtggcacgatctcggctgactgcaacctccacctcctgggttcaagcgattctcctgcctcagcctccccagtagctgggattacaggcgtgggcccccatgtccagctaatttttatatttttagtagagacagggtttcaccatgttgtccaggctggtcttgaacccctgacctcaagtgatccacccacctctgcctcccaaagtgctgggattacaggtgtgagccaccatgccaggccctcttaacctcttcaagtctgttttctcatctgcaaaacagaggtaataagatcagtatcttcttaatggaagcacctggactacatttttttcattcattgttatcataaatgaggactaacctgtctcccgttgggagttttgaacctagacctcatgtcttcatgacgtcatcactgccccaggcccagctgtgtccctacaccagccccagctgacgcatcttctttttctgcctgtagagatggttacaatgcctggcgtgatgcattctggccttcgcagatcctggcggggctgtgccaacgctgtggcctccctgcccctgaataccgagccggtgctgtcaaggtgggcagcaaagtcttcctgacaccaccggagaccctgcccccagggatctcttcacatgtggattgacatctttcctcaagatgtgcctgctccacccccagttgacatcaagcctcggcagccaatcagctatgagctcagagttgtcatctggaacacggaggatgtggttctggatgacgagaatccactcaccggagagatgtcgagtgacatctatgtgaagaggtaggctgctggccgggcggggcaacggcggtgcactagggggattgcaaatgggtgtgggccctcgggctgagtccagagccccgaccccaggccctccgtggtgctgagagcggggtgaggagtgggttctccatgtagctccagccctgacgctcacccaccccggccccagctgggtgaaggggttggagcatgacaagcaggagacagacgttcacttcaactccctgactggggaggggaacttcaattggcgctttgtgttccgctttgactacctgcccacggagcgggaggtgagcgtctggcgcaggtctggaccctttgccctggaggaggcggagttccggcagcctgcagtgctggtcctgcaggtctgggactatgaccgcatctctgccaatgacttccttggtattacaatgcttagccttccccaccctcagcccctgcctccagccctcacctccgcccctgcctccagccctcacttccgtcccccagttccctactctgacccaaccttgaatcttgggattttggacccgaggtgtgaaacctttgctttctggcctaattactgagttaattaggcctagaccacagtaacctccattcccacccagagtctctgattcaactctgatttgaccctagcttgtcaccctgacaccgactccacagcctttggtccttggcactctgatcccgacccttggccctcttccactgggaagtagcaatgggtggaccgctgggctgtggtctgggtggtctatagctgtggcctgaccgcacactgcaacaactttcaatgccccaatttacaaccttggtgtgttgcctcctcacccctggcacaatgagactttgatcccatgcctaatctggtgtgctctggacttgcaggatccctggagttgcagctaccagacatggtgcgtggggcccggggccccgagctctgctctgtgcagctggcccgcaatggggccgggccgaggtgcaatctgtttcgctgccgccgcctgaggggctggtggccggtagtgaagctgaaggaggcagaggacgtggagcgggaggcgcaggaggctcaggctggcaagaagaagcgaaagcagaggaggaggaagggccggccagaagacctggagttcacagacatgggtggcaatgtgtacatcctcacgggcaaggtggaggcagagtttgagctgctgactgtggaggaggccgagaaacggccagtggggaaggggcggaagcagccagagcctctggagaaacccagccgccccaaaacttccttcaactggtttgtgaacccgctgaagacctttgtcttcttcatctggcgccggtactggcgcaccctggtgctgctgctactggtgctgctcaccgtcttcctcctcctggtcttctacaccatccctggccagatcagccaggtcatcttccgtcccctccacaagtgactctcgctgaccttggacactcacccagggtgccaacccttcaatgcctgctcctggaagtctttcttacccatgtgagctaccccagagtctagtgcttcctctgaataaacctatcacagccactga

SEQ ID NO: 9632 - protein, 569 aa, Homo sapiens
MQVLEGRAEPEPPQAQQGSTLSRLTRKKKKKARRDQTPKAVPQHLDASPGAEGPEIPRAMEVEVEELLPLPENVLAPCEDFLLFGVLFEATMIDPTVASQPISFEISIGRAGRLEEQLGRGSRAGEGTEGAAVEAQPLLGARPEEEKEEEELGTHAQRPEPMDGSGPYFCLPLCHCKPCMHVWSCWEDHTWRLQSSNCVRKVAERLDQGLQEVERLQRKPGPGACAQLKQALEVLVAGSRQFCHGAERRTMTRPNALDRCRGKLLVHSLNLLAKQGLRLLRGLRRRNVQKKVALAKKLLAKLRFLAEEHNFDEDEMDDPGDSDGVNLISMVGEIQDQGEAEVKGTVSPKKAVATLKIYNRSLKEEFNHFEDWLNVFPLYRGQGGQDGGGEEEGSGHLVGKFKGSFLIYPESEAVLFSEPQISRGIPQNRPIKLLVRVYVVKLRNLCKIQGHEDFCLFSAATNLAPADPNGKADPYVVVSAGRERQDTKERYIPKQLNPIFGEILELSISLPAETELTVAVFDHDLVGSDDLIGETHIDLENRFYSHHRANCGLASQYEVWVQQGPQEPF

SEQ ID NO: 9633 - DNA, 1745 bp, Homo sapiens
tctcggctgactgcaacctccacctcctgggttcaagcgattctcctgcctcagcctccccagtagctgggattacaggcgtgggcccccatgtccagctaatttttatatttttagtagagacagggtttcaccatgttgtccaggctggtcttgaacccctgacctcaagtgatccacccacctctgcctcccaaagtgctgggattacaggtgtgagccaccatgccaggccctcttaacctcttcaagtctgttttctcatctgcaaaacagaggtaataagatcagtatcttcttaatggaagcacctggactacatttttttcattcattgttatcataaatgaggactaacctgtctcccgttgggagttttgaacctagacctcatgtcttcatgacgtcatcactgccccaggcccagctgtgtccctacaccagccccagctgacgcatcttctttttctgcctgtagagatggttacaatgcctggcgtgatgcattctggccttcgcagatcctggcggggctgtgccaacgctgtggcctccctgcccctgaataccgagccggtgctgtcaaggtgggcagcaaagtcttcctgacaccaccggagaccctgcccccagggatctcttcacatgtggattgacatctttcctcaagatgtgcctgctccacccccagttgacatcaagcctcggcagccaatcagctatgagctcagagttgtcatctggaacacggaggatgtggttctggatgacgagaatccactcaccggagagatgtcgagtgacatctatgtgaagaggtaggctgctggccgggcggggcaacggcggtgcactagggggattgcaaatgggtgtgggccctcgggctgagtccagagccccgaccccaggccctccgtggtgctgagagcggggtgaggagtgggttctccatgtagctccagccctgacgctcacccaccccggccccagctgggtgaaggggttggagcatgacaagcaggagacagacgttcacttcaactccctgactggggaggggaacttcaattggcgctttgtgttccgctttgactacctgcccacggagcgggaggtgagcgtctggcgcaggtctggaccctttgccctggaggaggcggagttccggcagcctgcagtgctggtcctgcaggtctgggactatgaccgcatctctgccaatgacttccttggtattacaatgcttagccttccccaccctcagcccctgcctccagccctcacctccgcccctgcctccagccctcacttccgtcccccagttccctactctgacccaaccttgaatcttgggattttggacccgaggtgtgaaacctttgctttctggcctaattactgagttaattaggcctagaccacagtaacctccattcccacccagagtctctgattcaactctgatttgaccctagcttgtcaccctgacaccgactccacagcctttggtccttggcactctgatcccgacccttggccctcttccactgggaagtagcaatgggtggaccgctgggctgtggtctgggtggtctatagctgtggcctgaccgcacactgcaacaactttcaatgccccaatttacaaccttggtgtgttgcctcctcacccctggcacaatgagactttgatcccatgcctaatctggtgtgctctggacttgcaggatccctggagttgc

SEQ ID NO: 9634 - protein, 58 aa, Homo sapiens [sequence omitted]

SEQ ID NO: 9635 - DNA, 260 bp, Homo sapiens
tactgggaagaggaaagtctcctttggattctggacatcgggctgttgctgaagtccttgccttttagatctacaacaggtccctgaaggaagaatttaaccactttgaagactggctgaatgtgtttcctctgtaccgagggcaagggggccaggatggaggtggagaagaggaaggatctggacaccttgtgggcaagttcaagggctccttcctcatttaccctgaatcagaggcagtgttgttctctgagccccag

SEQ ID NO: 9636 - protein, 45 aa, Homo sapiens
MCFLCTEGKGARMEVEKRKDLDTLWASSRAPSSFTLNQRQCCSLS

SEQ ID NO: 9637 - DNA, 1104 bp, Homo sapiens
cgcgatttccagctccttggggcgctgagctgttttggaggcgccccaggtcgtgttccacagcggcgcgtccgcagctgctggccaacttcttccgtttcagagcggcttagcccccctcccctgccctcacccccgaatacttggaggagatcagggtgaggtgcagagatttaccagcactcgccctccccacgctcccctccaacacgcttctcttgttccccacagcggggtttaaccctaccttcggcccggcctgggtgcccctctatggctcgccccccggcgcggggctccgggatagtcttcaaggtctcaacgaaggcgttggccaaggcatttggttccgcggccgccttctgctggctgtgtccatgcaggtgttggaagggagagctgaacctgagcctccccaggcccagcaggggtccacgttgtcccggctcacccgaaagaagaaaaagaaagccagaagggatcagaccccaaaggcggttccgcagcacttggacgccagccccggtgccgaggggcctgagatcccccgtgccatggaggtggaggtggaggagctgctgccgctgccagagaatgtcctggcgccctgtgaagatttcctgcttttcggtgtgctcttcgaggccaccatgatcgaccccaccgtggcctcccagcccatcagcttcgagatctccattggtgtgtggcctagccgaacccctgagtgccatttcagaccttagaaccctggaaggggtgttgactttcagtaaggggcaggttctgacttctgttgaggcagaggtggttgagggggggttccagccctcagcctggcgcccactgacccttgctgctctggggcaggtcgcgcaggccgtctggaggagcaattgggccgagggtccagggctggggagggaactgagggtgcagccgtggaggctcagcctctgctgggagccaggccagaggaggagaaagaggaggaagaactggggacccatgctcagcggcctgagcccatggacggcagtgggtgagtgctgccggtggctggaagggggggtttgggaggtctccaggaacccagaatgcccg

SEQ ID NO: 9638 - protein, 126 aa, Homo sapiens
MARPPARGSGIVFKVSTKALAKAFGSAAAFCWLCPCRCWKGELNLSLPRPSRGPRCPGSPERRKRKPEGIRPQRRFRSTWTPAPVPRGLRSPVPWRWRWRSCCRCQRMSWRPVKISCFSVCSSRPP

SEQ ID NO: 9639 - DNA, 2079 bp, Homo sapiens
agaagaaagctggtaggggctgggagagggtaccacaggggagtatgatctacttgggggccagagaaggttccctgaggaaatagtacctgaacttagacttgaaggataacagatgttaactgggaggagagaatgttccaggcagaggaaaaggcatatgcaaaagtccagcgccttgaaggagcacagctggggtgcctggagtgagatggagctggaaagatccaggtggagcttgacctgaagtaccagcccccagagggcgctactggagcctggtcagaggaggactttggggcacccatccaggacagcttcgagttaatcatccccaatgtgggcttccaggaactggagcctggggaggcccagctggagcggcgggcagtggctctaggccgcaggctagctcgaagtctaggccagcaggacgatgaagagaatgagctggagcttgagctggagcaggacctggatgatgagcctgacgtggaactttctggtgttatgttcagccccctcaagagccgcgccagggccctggcccatggggatcccttccaggtgtccagagctcaagacttccaggtgggagtcactgtgctggaagcccagaaactggtgggagtcaacattaacccctatgtggccgtgcaagtgggggggcagcgccgtgtgaccgccacacagcgtgggaccagttgccccttctacaatgagtacttcttgttcgaatttcatgacacgcggcttcgtctccaagacttgctgctggagatcacggtgagtggggtaggggtgaccagtgtccttcagagaaggggggatgagaaagctgcaggactaacaccaccttcccccaaggctttccattcgcagaccctcccctttatggccacccggataggcaccttcaggatggacctgggcatcatcttggaccagccaggtatggaatcgtccccttattgagactctgcacggacaagggccctagagattgaccctgcagtgactccgcatggacccctatacactcacttcggagagggccatctctggcggaggctgaactcttggcacttccgcccctccctgctgagccagagaagccctggccattgtccgtcactccgatagcctcacggccaccctgtgcgtcccgccggtcgccccttacccctggctcgccccttcgcccttagatggccagttctaccaaagatgggttccgctgcatgatccccgagacacccgcgccgggaccaagggtttcattaaggtcaccttgtccgtgagggcgcgcggggacctgccccctccaatgctacccccggccccagggcactgttcggacatcgagaagtgagccggggtgaggtggggaggaggacatggatccgggggtggccgtggggcgcggataaggggaggggccgagatcccagtttctccccccccgctcggtgccccctcccctaggaacctgctcctgccgcgcggggtgcccgccgagaggccatgggcgcggctccgcgtgcgcctgtaccgcgccgaggggcttcccgcgctgcgcctggggctgctgggcagcctggtccgcgccctgcacgaccagcgcgtcctggtggagccctatgtgcgggtgtctttcctggggcaggagggcgagacgtcggtgagcgccgaggcggcggcgcccgaatggaacgagcagctgagcttcgtggagctcttcccgccgctgacgcgcagcctccgcctgcagctgcgggacgacgcgcccctggtcgacgcggcactcgctacgcacgtgccggacctgaggcggatctcccatccgggccgcgcggcggggtttaaccctaccttcggcccggcctgggtgcccctctatggctcgccccccggcgcggggctccgggatagtcttcaaggtctcaacgaaggcgttggccaaggcatttggttccgcggccgccttctgctggctgtgtccatgcaggtgttggaagggagagctgaacctgagcctccccaggcccagcaggggtccacgttgtcccggctcacccg

SEQ ID NO: 9640 - protein, 154 aa, Homo sapiens
MFSPLKSRARALAHGDPFQVSRAQDFQVGVTVLEAQKLVGVNINPYVAVQVGGQRRVTATQRGTSCPFYNEYFLFEFHDTRLRLQDLLLEITVSGVGVTSVLQRRGDEKAAGLTPPSPKAFHSQTLPFMATRIGTFRMDLGIILDQPGMESSPY

SEQ ID NO: 9641 - DNA, 2038 bp, Homo sapiens
acaaaaaaacaaagaaaaaagaaacgaaaaggcatgaggtccatgtccttgaggcctcatcggctggcagggagcagactggggtcctgttcactccccttgcctccctcccaccctatcacagctctcactccctgaggatgcaggatggaggctgaggcagtcctgccagcttgcagctggtggaggcagggagggctgaattgacctccaggaccttacccctatccctcggtcctctcctccctccccacccatgacccccaggcctgctccctgtgtgtttgactaaagggtagggattgctaaacctgctgggtgagtccagtgagtcagaggcgattcaggtgggcgggctggtgggcagaagggcagacgggcagaggaagtgccagtgccactgggaccatggctctgacggtaacgcgtgcaacgactaacagggctgaccggcacccacgaccgacaagtgaagctcacctttcgaggctttacccagaaaacaagaaaaattcactgtggtccagaagcagatatcggtgagctgttccgatggccccactatggggctccactggctggggagtgtctgtctgtgcaggtggtcaactgcagccgtgtattcagccttaggcctctagggaccctggtgatctccctgcagcagctacagaatgctgggcatttggtgctacgggaagccctagtggatgagaatcttcaagtgtccccgatccaggtggagcttgacctgaagtaccagcccccagagggcgctactggagcctggtcagaggaggactttggggcacccatccaggacagcttcgagttaatcatccccaatgtgggcttccaggaactggagcctggggaggcccagctggagcggcgggcagtggctctaggccgcaggctagctcgaagtctaggccagcaggacgatgaagagaatgagctggagcttgagctggagcaggacctggatgatgagcctgacgtggaactttctggtgttatgttcagccccctcaagagccgcgccagggccctggcccatggggatcccttccaggtgtccagagctcaagacttccaggtgggagtcactgtgctggaagcccagaaactggtgggagtcaacattaacccctatgtggccgtgcaagtgggggggcagcgccgtgtgaccgccacacagcgtgggaccagttgccccttctacaatgagtacttcttgttcgaatttcatgacacgcggcttcgtctccaagacttgctgctggagatcacggctttccattcgcagaccctcccctttatggccacccggataggcaccttcaggatggacctgggcatcatcttggaccagccagatggccagttctaccaaagatgggttccgctgcatgatccccgagacacccgcgccgggaccaagggtttcattaaggtcaccttgtccgtgagggcgcgcggggacctgccccctccaatgctacccccggccccagggcactgttcggacatcgagaagaacctgctcctgccgcgcggggtgcccgccgagaggccatgggcgcggctccgcgtgcgcctgtaccgcgccgaggggcttcccgcgctgcgcctggggctgctgggcagcctggtccgcgccctgcacgaccagcgcgtcctggtggagccctatgtgcgggtgtctttcctggggcaggagggcgagacgtcggtgagcgccgaggcggcggcgcccgaatggaacgagcagctgagcttcgtggagctcttcccgccgctgacgcgcagcctccgcctgcagctgcgggacgacgcgcccctggtcgacgcggcactcgctacgcacgtgccggacctgaggcggatctcccatccgggccgcgcggcggggtttaaccctaccttcggcccggcctgggtgcccctctatggctcgccccccggcgcggggctccgggatagtcttcaaggtctcaacgaaggcgttggccaaggcatttggttccgcggccgc

SEQ ID NO: 9642 - protein, 339 aa, Homo sapiens
MFSPLKSRARALAHGDPFQVSRAQDFQVGVTVLEAQKLVGVNINPYVAVQVGGQRRVTATQRGTSCPFYNEYFLFEFHDTRLRLQDLLLEITAFHSQTLPFMATRIGTFRMDLGIILDQPDGQFYQRWVPLHDPRDTRAGTKGFIKVTLSVRARGDLPPPMLPPAPGHCSDIEKNLLLPRGVPAERPWARLRVRLYRAEGLPALRLGLLGSLVRALHDQRVLVEPYVRVSFLGQEGETSVSAEAAAPEWNEQLSFVELFPPLTRSLRLQLRDDAPLVDAALATHVPDLRRISHPGRAAGFNPTFGPAWVPLYGSPPGAGLRDSLQGLNEGVGQGIWFRG

SEQ ID NO: 9643 - DNA, 1457 bp, Homo sapiens
cgacttcacgcagggtccgtggggtccccgcggcgcgcagcggctgaaggaggccccagggccttggcgaccgcagcggcggctttagcgtcagtgactaggcagcagggggtcaggatgcggcgaagctcccgcccgggctcggcctcgtcctcgcgcaagcacacgcccaactttttcagcgagaacagctcaatgagcatcacctcggaggacagcaaagggctccggtcagcggagcccgggcctggggagcccgagggcagaagagcccggggcccgagctgcggtgagcccgccttgagcgcgggagtgcccggaggaaccacatgggcaggaagctctcagcagaagccagcgcctcggagccacaactggcagacagcctgtggcgcggcaaccgtgaggggcggggcctcggaaccgactgggtctccagtagtctctgaggagccgctcgaccttctcccgaccctggatctgaggcaggagatgcctcccccgcgggtgttcaagagctttctgagcctgctcttccaggggctgagcgtgttgttatccctggcaggagacgtgctggtcagcatgtacagggaggtctgttccatccgcttcctgttcacggctgtgtcgctgctgagcctctttctgtcagcattctggctggggcttctgtacctggtctctcctttggagaatgaacctaaggagatgctgactctaagtgagtaccacgagcgcgtgcgctcccaggggcagcagctgcagcagctccaggccgagctggataaactccacaaggaggtgtccactgttcgggcagccaacagcgagagagtggccaagctcgtgttccagaggctgaatgaggattttgtgcggaagcccgactatgctttgagctctgtgggagcctccatcgacctgcagaagacatcccacgattacgcagacaggaacactgcctacttctggaatcgcttcagcttctggaactacgcacggccgcccacggttatcctggagccccacgtgttccctgggaattgctgggcttttgaaggcgaccaaggccaggtggtgatccaactgccgggccgagtgcagctgagcgacatcactctgcagcatccaccgcccagcgtggagcacaccggaggagccaacagcgccccccgcgatttcgcggtctttggcctccaggtttatgatgaaactgaagtttccttggggaaattcaccttcgatgttgagaaatcggagattcagactttccacctgcagaatgaccccccagctgcctttcccaaggtgaagatccagattctaagcaactggggccacccccgtttcacgtgcttgtatcgagtccgtgcccacggtgtgcgaacctcagagggggcagagggcagtgcacaggggccccattaaacatgctgatttttggagtagaattg

SEQ ID NO: 9644 - protein, 437 aa, Homo sapiens; identical to SEQ ID NO: 1221

SEQ ID NO: 9645 - DNA, 844 bp, Homo sapiens
tcggcctcccaaatcgctgggattacaggcgtgagccaccgcgcccggccaggagaccaactcttgacggagcctccctgaggggcggggcttcagagggcggagctggagccgggatagggctgcggtgggaccaaagcctgtgagagacttcccagctgtctggcttgtggactgagcaatctgcggcccggtctcgaggggaaaataggtctgtggtccgcaaggccccagtggagcccttgggttcccgcagaaccgactgggtctccagtagtctctgaggagccgctcgaccttctcccgaccctggatctgaggcaggagatgcctcccccgcgggtgttcaagagctttctgagcctgctcttccaggggctgagcgtgttgttatccctggcaggagacgtgctggtcagcatgtacagggaggtctgttccatccgcttcctgttcacggctgtgtcgctgctgagcctctttctgtcagcattctggctggggcttctgtacctggtctctcctttggagaatgaacctaaggagatgctgactctaaggtgaaagagggcacctagggtgggaaattggggggctcaaagttgcttctttgagaaccttgaaggcgtgggggcctttgggaggtgtccagggggacagggagccaaccccacggcgcccacctcccacctccagtgagtaccacgagcgcgtgcgctcccaggggcagcagctgcagcagctccaggccgagctggataaactccacaaggaggtgtccactgttcgggcagccaacagcgaggtgagccccggcccaccttggaaacccctgatggatccc

SEQ ID NO: 9646 - protein, 78 aa, Homo sapiens
MPPPRVFKSFLSLLFQGLSVLLSLAGDVLVSMYREVCSIRFLFTAVSLLSLFLSAFWLGLLYLVSPLENEPKEMLTLR

SEQ ID NO: 9647 - DNA, 730 bp, Homo sapiens
agccgggatagggctgcggtgggaccaaagcctgtgagagacttcccagctgtctggcttgtggactgagcaatctgcggcccggtctcgaggggaaaataggtctgtggtccgcaaggccccagtggagcccttgggttcccgcagaaccgactgggtctccagtagtctctgaggagccgctcgaccttctcccgaccctggatctgaggcaggagatgcctcccccgcgggtgttcaagagctttctgagcctgctcttccaggggctgagcgtgttgttatccctggcaggagacgtgctggtcagcatgtacaggtcagaggaagggacgctggcgccccaggaacagctctttggagggggtggggagcagggccggaaccttgctggcgcttgagccgattcagatctgattgagtcatgttggcaagagctgggtctaggaccctggggtggggactggagggttgagcaggtcggggcctcagcctccctccggttccccagggaggtctgttccatccgcttcctgttcacggctgtgtcgctgctgagcctctttctgtcagcattctggctggggcttctgtacctggtctctcctttggagaatgaacctaaggagatgctgactctaaggtgaaagagggcacctagggtgggaaattggggggctcaaagttgcttctttgagaaccttgaaggcgtgggggcctttgggaggtg

SEQ ID NO: 9648 - protein, 60 aa, Homo sapiens
MPPPRVFKSFLSLLFQGLSVLLSLAGDVLVSMYRSEEGTLAPQEQLFGGGGEQGRNLAGA

SEQ ID NO: 9649 - DNA, 368 bp, Homo sapiens
gagagacttcccagctgtctggcttgtggactgagcaatctgcggcccggtctcgaggggaaaataggtctgtggtccgcaaggccccagtggagcccttgggttcccgcagaaccgactgggtctccagtagtctctgaggagccgctcgaccttctcccgaccctggatctgaggcaggagatgcctcccccgcgggtgttcaagagctttctgagcctgctcttccaggggctgagcgtgttgttatccctggcaggagacgtgctggtcagcatgtacagggtcctgagacttaagctccgcccagagccctgcgggatttctcccggtgcccacgaagtccatcccaaagcaaccagctccca

SEQ ID NO: 9650 - protein, 60 aa, Homo sapiens
MPPPRVFKSFLSLLFQGLSVLLSLAGDVLVSMYRVLRLKLRPEPCGISPGAHEVHPKATS

SEQ ID NO: 9651 - DNA, 569 bp, Homo sapiens
gagacttcccagctgtctggcttgtggactgagcaatctgcggcccggtctcgaggggaaaataggtctgtggtccgcaaggccccagtggagcccttgggttcccgcagaaccgactgggtctccagtagtctctgaggagccgctcgaccttctcccgaccctggatctgaggcaggagatgcctcccccgcgggtgttcaagagctttctgagcctgctcttccaggggctgagcgtgttgttatccctggcaggagacgtgctggtcagcatgtacaggtcagaggaagggacgctggcgccccaggaacagctctttggagggggtggggagcagggccggaaccttgctggcgcttgagccgattcagatctgattgagtcatgttggcaagagctgggtctaggaccctggggtggggactggagggttgagcaggtcggggcctcagcctccctccggttccccagggaggtctgttccatccgcttcctgttcacggctgtgtcgctgctgagcctctttctgtcaggtgaggggcagtgaattccctggagcccctgcc

SEQ ID NO: 9652 - protein, 60 aa, Homo sapiens; identical to SEQ ID NO: 9648

SEQ ID NO: 9653 - DNA, 2847 bp, Homo sapiens
gaatgaatggctctggagcacctatgaatttgaacaataatctgaatcctatgtttcttggtccgttgaatcctgttaaccctatccagatgaactctcagagcagtgtgaagccactccccatcaaccctgatgatctgtatgtcagtgtgcatggaatgcccttttctgcaatggaaaatgatgtcagagatttttttcatgggctccgtgttgatgcagtgcatttgttgaaagatcatgtaggtcgaaataatgggaatggattggttaagtttctctcccctcaagatacatttgaagctttgaaacgaaacagaatgctgatgattcaacgctatgtggaagttagccctgccacagaaagacagtgggtagctgctggaggccatatcacttttaagcaaaatatgggaccttctggacaaactcatccccctcctcagacacttcccaggtcaaaatcgcccagtgggcagaaaagatcaaggtcaagatcaccacatgaggctggtttttgtgtttacttgaaagggctaccatttgaagcagaaaacaaacatgtcattgatttttttaaaaagctggatattgtggaagatagtatttatatagcttatggacccaatgggaaagcaactggcgaaggctttgtagagttcagaaatgaggctgactataaggctgctctgtgtcgtcataaacagtacatgggcaatcgctttattcaagttcatccaattactaagaaaggtatgctagaaaagatagatatgattcgaaaaagactgcagaacttcagctatgaccagagggaaatgatactaaatccagagggggatgtcaactctgccaaagtctgtgcccacataacaaatattccattcagcattacaaagatggatgttcttcagttcctagaaggaatcccagtggatgaaaatgctgtacatgttcttgttgataacaatgggcaaggtctaggacaggcattggttcagtttaaaaatgaagatgatgcacatggcccactgcgtgaccttggttcagctgtccatttcctgtgaccatctcattgacaaggacatcggctccaagtctgacccactctgcgtccttttacaggatgtgggagggggcagctgggctgagcttggccggactgaacgggtgcggaactgctcaagccctgagttctccaagactctacagcttgagtaccgctttgagacagtccagaagctacgctttggaatctatgacatagacaacaagacgccagagctgagggatgatgacttcctagggggtgctgagtgttccctaggacagattgtgtccagccaggtactgactctccccttgatgctgaagcctggaaaacctgctgggcgggggaccatcacggtctcagctcaggaattaaaggacaatcgtgtagtaaccatggaggtagaggccagaaacctagataagaaggacttcctgggaaaatcagatccatttctggagttcttccgccagggtgatgggaaatggcacctggtgtacagatctgaggtcatcaagaacaacctgaaccctacatggaagcgtttctcagtccccgttcagcatttctgtggtgggaaccccagcacacccatccaggtgcaatgctccgattatgacagtgacgggtcacatgatctcatcggtaccttccacaccagcttggcccagctgcaggcagtcccggctgagtttgaatgcatccaccctgagaagcagcagaaaaagaaaagctacaagaactctggaactatccgtgtcaagatttgtcgggtagaaacagagtactcctttctggactatgtgatgggaggctgtcagatcaacttcactgtgggcgtggacttcactggctccaatggagacccctcctcacctgactccctacactacctgagtccaacaggggtcaatgagtacctgatggcactgtggagtgtgggcagcgtggttcaggactatgactcagacaagctgttccctgcatttggatttggggcccaggttccccctgactggcaggtctcgcatgaatttgccttgaatttcaaccccagtaacccctactgtgcaggcatccagggcattgtggatgcctaccgccaagccctgccccaagttcgcctctatggccctaccaactttgcacccatcatcaaccatgtggccaggtttgcagcccaggctgcacatcaggggactgcctcgcaatacttcatgctgttgctgctgactgatggtgctgtgacggatgtggaagccacacgtgaggctgtggtgcgtgcctcgaacctgcccatgtcagtgatcattgtgggtgtgggtggtgctgactttgaggccatggagcagctggacgctgatggtggacccctgcatacacgttctgggcaggctgctgcccgcgacattgtgcagtttgtaccctaccgccggttccagaatgcccctcgggaggcattggcacagaccgtgctcgcagaagtgcccacacaactggtctcatacttcagggcccagggttgggccccgctcaagccacttccaccctcagccaaggatcctgcacaggccccccaggcctaggttcccttggaggctgtggcaagtcctcaatcctgtgtcccagaggtccctctgggccacaacccaacccttctcactctcctcagtgctagcactttgtattttttgatacttttatacttgtttctgcttttgctgctcttgatcccacctttgctcctgacaaccctcattcaataaagaccagtgaagaccaatgctttgccacca

SEQ ID NO: 9654 - protein, 542 aa, Homo sapiens
MKMMHMAHCVTLVQLSISCDHLIDKDIGSKSDPLCVLLQDVGGGSWAELGRTERVRNCSSPEFSKTLQLEYRFETVQKLRFGIYDIDNKTPELRDDDFLGGAECSLGQIVSSQVLTLPLMLKPGKPAGRGTITVSAQELKDNRVVTMEVEARNLDKKDFLGKSDPFLEFFRQGDGKWHLVYRSEVIKNNLNPTWKRFSVPVQHFCGGNPSTPIQVQCSDYDSDGSHDLIGTFHTSLAQLQAVPAEFECIHPEKQQKKKSYKNSGTIRVKICRVETEYSFLDYVMGGCQINFTVGVDFTGSNGDPSSPDSLHYLSPTGVNEYLMALWSVGSVVQDYDSDKLFPAFGFGAQVPPDWQVSHEFALNFNPSNPYCAGIQGIVDAYRQALPQVRLYGPTNFAPIINHVARFAAQAAHQGTASQYFMLLLLTDGAVTDVEATREAVVRASNLPMSVIIVGVGGADFEAMEQLDADGGPLHTRSGQAAARDIVQFVPYRRFQNAPREALAQTVLAEVPTQLVSYFRAQGWAPLKPLPPSAKDPAQAPQA

SEQ ID NO: 9655 - DNA, 1846 bp, Homo sapiens
agcgggccgacggccattttgtgaagcggcgaaggaggtggtggctgcgttgggctccgggaagccgttcgggctggggctgtcggccgcggggcggaggcactcgcgcggggggtaattcggggtctgggttctggtgccgcgcagctttccccgatggcccactgcgtgaccttggttcagctgtccatttcctgtgaccatctcattgacaaggacatcggctccaagtctgacccactctgcgtccttttacaggatgtgggagggggcagctgggctgagcttggccggactgaacgggtgcggaactgctcaagccctgagttctccaagactctacagcttgagtaccgctttgagacagtccagaagctacgctttggaatctatgacatagacaacaagacgccagagctgagggatgatgacttcctagggggtgctgagtgttccctaggacagattgtgtccagccaggtactgactctccccttgatgctgaagcctggaaaacctgctgggcgggggaccatcacggtctcagctcaggaattaaaggacaatcgtgtagtaaccatggaggtagaggccagaaacctagataagaaggacttcctgggaaaatcagatccatttctggagttcttccgccagggtgatgggaaatggcacctggtgtacagatctgaggtcatcaagaacaacctgaaccctacatggaagcgtttctcagtccccgttcagcatttctgtggtgggaaccccagcacacccatccaggtgcaatgctccgattatgacagtgacgggtcacatgatctcatcggtaccttccacaccagcttggcccagctgcaggcagtcccggctgagtttgaatgcatccaccctgagaagcagcagaaaaagaaaagctacaagaactctggaactatccgtgtcaagatttgtcgggtagaaacagagtactcctttctggactatgtgatgggaggctgtcagatcaacttcactgtgggcgtggacttcactggctccaatggagacccctcctcacctgactccctacactacctgagtccaacaggggtcaatgagtacctgatggcactgtggagtgtgggcagcgtggttcaggactatgactcagacaagctgttccctgcatttggatttggggcccaggttccccctgactggcaggtctcgcatgaatttgccttgaatttcaaccccagtaacccctactgtgcagcaatacttcatgctgttgctgctgactgatggtgctgtgacggatgtggaagccacacgtgaggctgtggtgcgtgcctcgaacctgcccatgtcagtgatcattgtgggtgtgggtggtgctgactttgaggccatggagcagctggacgctgatggtggacccctgcatacacgttctgggcaggctgctgcccgcgacattgtgcagtttgtaccctaccgccggttccagaatgcccctcgggaggcattggcacagaccgtgctcgcagaagtgcccacacaactggtctcatacttcagggcccagggttgggccccgctcaagccacttccaccctcagccaaggatcctgcacaggccccccaggcctaggttcccttggaggctgtggcaagtcctcaatcctgtgtcccagaggtccctctgggccacaacccaacccttctcactctcctcagtgctagcactttgtattttttgatacttttatacttgtttctgcttttgctgctcttgatcccacctttgctcctgacaaccctcattcaataaagaccagtgaagaccaatgctttgccacca

SEQ ID NO: 9656 - protein, 376 aa, Homo sapiens
MAHCVTLVQLSISCDHLIDKDIGSKSDPLCVLLQDVGGGSWAELGRTERVRNCSSPEFSKTLQLEYRFETVQKLRFGIYDIDNKTPELRDDDFLGGAECSLGQIVSSQVLTLPLMLKPGKPAGRGTITVSAQELKDNRVVTMEVEARNLDKKDFLGKSDPFLEFFRQGDGKWHLVYRSEVIKNNLNPTWKRFSVPVQHFCGGNPSTPIQVQCSDYDSDGSHDLIGTFHTSLAQLQAVPAEFECIHPEKQQKKKSYKNSGTIRVKICRVETEYSFLDYVMGGCQINFTVGVDFTGSNGDPSSPDSLHYLSPTGVNEYLMALWSVGSVVQDYDSDKLFPAFGFGAQVPPDWQVSHEFALNFNPSNPYCAAILHAVAAD

SEQ ID NO: 9657 - DNA, 1991 bp, Homo sapiens
cggagccgctgagcgggccgacggccattttgtgaagcggcgaaggaggtggtggctgcgttgggctccgggaagccgttcgggctggggctgtcggccgcggggcggaggcactcgcgcggggggtaattcggggtctgggttctggtgccgcgcagctttccccgatggcccactgcgtgaccttggttcagctgtccatttcctgtgaccatctcattgacaaggacatcggctccaagtctgacccactctgcgtccttttacaggatgtgggagggggcagctgggctgagcttggccggactgaacgggtgcggaactgctcaagccctgagttctccaagactctacagcttgagtaccgctttgagacagtccagaagctacgctttggaatctatgacatagacaacaagacgccagagctgagggatgatgacttcctagggggtgctgagtgttccctaggacagattgtgtccagccaggtactgactctccccttgatgctgaagcctggaaaacctgctgggcgggggaccatcacggtctcagctcaggaattaaaggacaatcgtgtagtaaccatggaggtagaggccagaaacctagataagaaggacttcctgggaaaatcagatccatttctggagttcttccgccagggtgatgggaaatggcacctggtgtacagatctgaggtcatcaagaacaacctgaaccctacatggaagcgtttctcagtccccgttcagcatttctgtggtgggaaccccagcacacccatccaggtgcaatgctccgattatgacagtgacgggtcacatgatctcatcggtaccttccacaccagcttggcccagctgcaggcagtcccggctgagtttgaatgcatccaccctgagaagcagcagaaaaagaaaagctacaagaactctggaactatccgtgtcaagatttgtcgggtagaaacagagtactcctttctggactatgtgatgggaggctgtcagatcaacttcactgtgggcgtggacttcactggctccaatggagacccctcctcacctgactccctacactacctgagtccaacaggggtcaatgagtacctgatggcactgtggagtgtgggcagcgtggttcaggactatgactcagacaagctgttccctgcatttggatttggggcccaggttccccctgactggcaggtctcgcatgaatttgccttgaatttcaaccccagtaacccctactgtgcaggcatccagggcattgtggatgcctaccgccaagccctgccccaagttcgcctctatggccctaccaactttgcacccatcatcaaccatgtggccaggtttgcagcccaggctgcacatcaggggactgcctcgcaatacttcatgctgttgctgctgactgatggtgctgtgacggatgtggaagccacacgtgaggctgtggtgcgtgcctcgaacctgcccatgtcagtgatcattgtgggtgtgggtggtgctgactttgaggccatggagcagctggacgctgatggtggacccctgcatacacgttctgggcaggctgctgcccgcgacattgtgcagtttgtaccctaccgccggttccagaatgcccctcgggaggcattggcacagaccgtgctcgcagaagtgcccacacaactggtctcatacttcagggcccagggttgggccccgctcaagccacttccaccctcagccaaggatcctgcacaggccccccaggcctaggttcccttggaggctgtggcaagtcctcaatcctgtgtcccagaggtccctctgggccacaacccaacccttctcactctcctcagtgctagcactttgtattttttgatacttttatacttgtttctgcttttgctgctcttgatcccacctttgctcctgacaaccctcattcaataaagaccagtgaagaccaatgctttgccacca

SEQ ID NO: 9658 - protein, 537 aa, Homo sapiens; identical to SEQ ID NO: 1223

SEQ ID NO: 9659 - DNA, 2076 bp, Homo sapiens
cggagccgctgagcgggccgacggccattttgtgaagcggcgaaggaggtggtggctgcgttgggctccgggaagccgttcgggctggggctgtcggccgcggggcggaggcactcgcgcggggggtaattcggggtctgggttctggtgccgcgcagctttccccgtctaaaagttggttttaattggttgcccacaggattgacttggcctctacttcttgttaaggaaattcatctcttgttttatcagatggcccactgcgtgaccttggttcagctgtccatttcctgtgaccatctcattgacaaggacatcggctccaagtctgacccactctgcgtccttttacaggatgtgggagggggcagctgggctgagcttggccggactgaacgggtgcggaactgctcaagccctgagttctccaagactctacagcttgagtaccgctttgagacagtccagaagctacgctttggaatctatgacatagacaacaagacgccagagctgagggatgatgacttcctagggggtgctgagtgttccctaggacagattgtgtccagccaggtactgactctccccttgatgctgaagcctggaaaacctgctgggcgggggaccatcacggtctcagctcaggaattaaaggacaatcgtgtagtaaccatggaggtagaggccagaaacctagataagaaggacttcctgggaaaatcagatccatttctggagttcttccgccagggtgatgggaaatggcacctggtgtacagatctgaggtcatcaagaacaacctgaaccctacatggaagcgtttctcagtccccgttcagcatttctgtggtgggaaccccagcacacccatccaggtgcaatgctccgattatgacagtgacgggtcacatgatctcatcggtaccttccacaccagcttggcccagctgcaggcagtcccggctgagtttgaatgcatccaccctgagaagcagcagaaaaagaaaagctacaagaactctggaactatccgtgtcaagatttgtcgggtagaaacagagtactcctttctggactatgtgatgggaggctgtcagatcaacttcactgtgggcgtggacttcactggctccaatggagacccctcctcacctgactccctacactacctgagtccaacaggggtcaatgagtacctgatggcactgtggagtgtgggcagcgtggttcaggactatgactcagacaagctgttccctgcatttggatttggggcccaggttccccctgactggcaggtctcgcatgaatttgccttgaatttcaaccccagtaacccctactgtgcaggcatccagggcattgtggatgcctaccgccaagccctgccccaagttcgcctctatggccctaccaactttgcacccatcatcaaccatgtggccaggtttgcagcccaggctgcacatcaggggactgcctcgcaatacttcatgctgttgctgctgactgatggtgctgtgacggatgtggaagccacacgtgaggctgtggtgcgtgcctcgaacctgcccatgtcagtgatcattgtgggtgtgggtggtgctgactttgaggccatggagcagctggacgctgatggtggacccctgcatacacgttctgggcaggctgctgcccgcgacattgtgcagtttgtaccctaccgccggttccagaatgcccctcgggaggcattggcacagaccgtgctcgcagaagtgcccacacaactggtctcatacttcagggcccagggttgggccccgctcaagccacttccaccctcagccaaggatcctgcacaggccccccaggcctaggttcccttggaggctgtggcaagtcctcaatcctgtgtcccagaggtccctctgggccacaacccaacccttctcactctcctcagtgctagcactttgtattttttgatacttttatacttgtttctgcttttgctgctcttgatcccacctttgctcctgacaaccctcattcaataaagaccagtgaagaccaatgctttgccacca

SEQ ID NO: 9660 - protein, 537 aa, Homo sapiens; identical to SEQ ID NO: 1223

SEQ ID NO: 9661 - DNA, 2219 bp, Homo sapiens
cggagccgctgagcgggccgacggccattttgtgaagcggcgaaggaggtggtggctgcgttgggctccgggaagccgttcgggctggggctgtcggccgcggggcggaggcactcgcgcggggggtaattcggggtctgggttctggtgccgcgcagctttccccgtctaaaagttggttttaattggttgcccacaggattgacttggcctctacttcttgttaaggaaattcatctcttgttttatcaggtgtgtgtggtttcagcgcagcatggctgtggtcatccgtttgcaaggtctcccaattgtggcggggaccatggacattcgccacttcttctctggattgaccattcctgatgggggcgtgcatattgtagggggtgaactggatggcccactgcgtgaccttggttcagctgtccatttcctgtgaccatctcattgacaaggacatcggctccaagtctgacccactctgcgtccttttacaggatgtgggagggggcagctgggctgagcttggccggactgaacgggtgcggaactgctcaagccctgagttctccaagactctacagcttgagtaccgctttgagacagtccagaagctacgctttggaatctatgacatagacaacaagacgccagagctgagggatgatgacttcctagggggtgctgagtgttccctaggacagattgtgtccagccaggtactgactctccccttgatgctgaagcctggaaaacctgctgggcgggggaccatcacggtctcagctcaggaattaaaggacaatcgtgtagtaaccatggaggtagaggccagaaacctagataagaaggacttcctgggaaaatcagatccatttctggagttcttccgccagggtgatgggaaatggcacctggtgtacagatctgaggtcatcaagaacaacctgaaccctacatggaagcgtttctcagtccccgttcagcatttctgtggtgggaaccccagcacacccatccaggtgcaatgctccgattatgacagtgacgggtcacatgatctcatcggtaccttccacaccagcttggcccagctgcaggcagtcccggctgagtttgaatgcatccaccctgagaagcagcagaaaaagaaaagctacaagaactctggaactatccgtgtcaagatttgtcgggtagaaacagagtactcctttctggactatgtgatgggaggctgtcagatcaacttcactgtgggcgtggacttcactggctccaatggagacccctcctcacctgactccctacactacctgagtccaacaggggtcaatgagtacctgatggcactgtggagtgtgggcagcgtggttcaggactatgactcagacaagctgttccctgcatttggatttggggcccaggttccccctgactggcaggtctcgcatgaatttgccttgaatttcaaccccagtaacccctactgtgcaggcatccagggcattgtggatgcctaccgccaagccctgccccaagttcgcctctatggccctaccaactttgcacccatcatcaaccatgtggccaggtttgcagcccaggctgcacatcaggggactgcctcgcaatacttcatgctgttgctgctgactgatggtgctgtgacggatgtggaagccacacgtgaggctgtggtgcgtgcctcgaacctgcccatgtcagtgatcattgtgggtgtgggtggtgctgactttgaggccatggagcagctggacgctgatggtggacccctgcatacacgttctgggcaggctgctgcccgcgacattgtgcagtttgtaccctaccgccggttccagaatgcccctcgggaggcattggcacagaccgtgctcgcagaagtgcccacacaactggtctcatacttcagggcccagggttgggccccgctcaagccacttccaccctcagccaaggatcctgcacaggccccccaggcctaggttcccttggaggctgtggcaagtcctcaatcctgtgtcccagaggtccctctgggccacaacccaacccttctcactctcctcagtgctagcactttgtattttttgatacttttatacttgtttctgcttttgctgctcttgatcccacctttgctcctgacaaccctcattcaataaagaccagtgaagaccaatgctttgccacca

SEQ ID NO: 9662 - protein, 537 aa, Homo sapiens; identical to SEQ ID NO: 1223

SEQ ID NO: 9663 - DNA, 2092 bp, Homo sapiens
cggagccgctgagcgggccgacggccattttgtgaagcggcgaaggaggtggtggctgcgttgggctccgggaagccgttcgggctggggctgtcggccgcggggcggaggcactcgcgcggggggtgtgtgtggtttcagcgcagcatggctgtggtcatccgtttgcaaggtctcccaattgtggcggggaccatggacattcgccacttcttctctggattgaccattcctgatgggggcgtgcatattgtagggggtgaactggatggcccactgcgtgaccttggttcagctgtccatttcctgtgaccatctcattgacaaggacatcggctccaagtctgacccactctgcgtccttttacaggatgtgggagggggcagctgggctgagcttggccggactgaacgggtgcggaactgctcaagccctgagttctccaagactctacagcttgagtaccgctttgagacagtccagaagctacgctttggaatctatgacatagacaacaagacgccagagctgagggatgatgacttcctagggggtgctgagtgttccctaggacagattgtgtccagccaggtactgactctccccttgatgctgaagcctggaaaacctgctgggcgggggaccatcacggtctcagctcaggaattaaaggacaatcgtgtagtaaccatggaggtagaggccagaaacctagataagaaggacttcctgggaaaatcagatccatttctggagttcttccgccagggtgatgggaaatggcacctggtgtacagatctgaggtcatcaagaacaacctgaaccctacatggaagcgtttctcagtccccgttcagcatttctgtggtgggaaccccagcacacccatccaggtgcaatgctccgattatgacagtgacgggtcacatgatctcatcggtaccttccacaccagcttggcccagctgcaggcagtcccggctgagtttgaatgcatccaccctgagaagcagcagaaaaagaaaagctacaagaactctggaactatccgtgtcaagatttgtcgggtagaaacagagtactcctttctggactatgtgatgggaggctgtcagatcaacttcactgtgggcgtggacttcactggctccaatggagacccctcctcacctgactccctacactacctgagtccaacaggggtcaatgagtacctgatggcactgtggagtgtgggcagcgtggttcaggactatgactcagacaagctgttccctgcatttggatttggggcccaggttccccctgactggcaggtctcgcatgaatttgccttgaatttcaaccccagtaacccctactgtgcaggcatccagggcattgtggatgcctaccgccaagccctgccccaagttcgcctctatggccctaccaactttgcacccatcatcaaccatgtggccaggtttgcagcccaggctgcacatcaggggactgcctcgcaatacttcatgctgttgctgctgactgatggtgctgtgacggatgtggaagccacacgtgaggctgtggtgcgtgcctcgaacctgcccatgtcagtgatcattgtgggtgtgggtggtgctgactttgaggccatggagcagctggacgctgatggtggacccctgcatacacgttctgggcaggctgctgcccgcgacattgtgcagtttgtaccctaccgccggttccagaatgcccctcgggaggcattggcacagaccgtgctcgcagaagtgcccacacaactggtctcatacttcagggcccagggttgggccccgctcaagccacttccaccctcagccaaggatcctgcacaggccccccaggcctaggttcccttggaggctgtggcaagtcctcaatcctgtgtcccagaggtccctctgggccacaacccaacccttctcactctcctcagtgctagcactttgtattttttgatacttttatacttgtttctgcttttgctgctcttgatcccacctttgctcctgacaaccctcattcaataaagaccagtgaagaccaatgctttgccacca

SEQ ID NO: 9664 - protein, 537 aa, Homo sapiens; identical to SEQ ID NO: 1223

SEQ ID NO: 9665 - DNA, 1979 bp, Homo sapiens
aaccacgccgttcctcccccttctggaacgcggagccgctgagcgggccgacggccattttgtgaagcggcgaaggaggtggtggctgcgttgggctccgggaagccgttcgggctggggctgtcggccgcggggcggaggcactcgcgcgggggatggcccactgcgtgaccttggttcagctgtccatttcctgtgaccatctcattgacaaggacatcggctccaagtctgacccactctgcgtccttttacaggatgtgggagggggcagctgggctgagcttggccggactgaacgggtgcggaactgctcaagccctgagttctccaagactctacagcttgagtaccgctttgagacagtccagaagctacgctttggaatctatgacatagacaacaagacgccagagctgagggatgatgacttcctagggggtgctgagtgttccctaggacagattgtgtccagccaggtactgactctccccttgatgctgaagcctggaaaacctgctgggcgggggaccatcacggtctcagctcaggaattaaaggacaatcgtgtagtaaccatggaggtagaggccagaaacctagataagaaggacttcctgggaaaatcagatccatttctggagttcttccgccagggtgatgggaaatggcacctggtgtacagatctgaggtcatcaagaacaacctgaaccctacatggaagcgtttctcagtccccgttcagcatttctgtggtgggaaccccagcacacccatccaggtgcaatgctccgattatgacagtgacgggtcacatgatctcatcggtaccttccacaccagcttggcccagctgcaggcagtcccggctgagtttgaatgcatccaccctgagaagcagcagaaaaagaaaagctacaagaactctggaactatccgtgtcaagatttgtcgggtagaaacagagtactcctttctggactatgtgatgggaggctgtcagatcaacttcactgtgggcgtggacttcactggctccaatggagacccctcctcacctgactccctacactacctgagtccaacaggggtcaatgagtacctgatggcactgtggagtgtgggcagcgtggttcaggactatgactcagacaagctgttccctgcatttggatttggggcccaggttccccctgactggcaggtctcgcatgaatttgccttgaatttcaaccccagtaacccctactgtgcaggcatccagggcattgtggatgcctaccgccaagccctgccccaagttcgcctctatggccctaccaactttgcacccatcatcaaccatgtggccaggtttgcagcccaggctgcacatcaggggactgcctcgcaatacttcatgctgttgctgctgactgatggtgctgtgacggatgtggaagccacacgtgaggctgtggtgcgtgcctcgaacctgcccatgtcagtgatcattgtgggtgtgggtggtgctgactttgaggccatggagcagctggacgctgatggtggacccctgcatacacgttctgggcaggctgctgcccgcgacattgtgcagtttgtaccctaccgccggttccagaatgcccctcgggaggcattggcacagaccgtgctcgcagaagtgcccacacaactggtctcatacttcagggcccagggttgggccccgctcaagccacttccaccctcagccaaggatcctgcacaggccccccaggcctaggttcccttggaggctgtggcaagtcctcaatcctgtgtcccagaggtccctctgggccacaacccaacccttctcactctcctcagtgctagcactttgtattttttgatacttttatacttgtttctgcttttgctgctcttgatcccacctttgctcctgacaaccctcattcaataaagaccagtgaagaccaatgctttgccacca

SEQ ID NO: 9666 - protein, 537 aa, Homo sapiens; identical to SEQ ID NO: 1223

SEQ ID NO: 9667 - DNA, 1737 bp, Homo sapiens
ctatgttgcctaagctggccttgaacccctgggctcaagcagtcctcccacctcagcctcgtgagtagctgggactacaggcacatgccactgtgcctggctatactctctagttttaacatccattgatgatccttgcctgaatcagtcatttctgtgattgtcaaatgattgtgtaattcttccttttacatttattaggagctttcccttctccctcagtaattaatccatagtacggatccttattgtatcaaatggatcattattaaataggttataatctgatgctcaaactctcctggatttgtccaggagaatccctctcatctgggtgctaattcaagctgtgatttagggcaagtcccctcctctctttgaaccttagtttcctcatgtgtaggagacagttaagtaccctggtttacaagggtgaatgaatgaaatgcacccaggttccgagatctcctgggctgggatggggtgatttcaggactggtgtagtcctgagaggtccaggattttacggtatttcttgctctcctctgcaggcatccagggcattgtggatgcctaccgccaagccctgccccaagttcgcctctatggccctaccaactttgcacccatcatcaaccatgtggccaggtttgcagcccaggctgcacatcaggggactgcctcggtgagagtcgtgggtggcagtggcagtggtggcaatcaagggcttccttgagggttatggaacaaaggacttttttttttttttttttttttgagatggactcttgctctgtcacccaggctggagtgcagtgacgcgatctcagctcactgcaacctgcacctcctgggttcaagtgattctcctgcctcagccttcctagtagcttggattacaggcgtgtgccaccatgcccagctaatttttatatttttagtagagacgggctttcaccatgttggctggggtggtcacaaactcctgacctcaagtgatccgcctgccttagcctcccaaagtgctgggattacaggtgtgagccatcgcacccggcctgtaacaagggacttcttatgagtgtggggatgtgtggctggggtgtttgcaggggtttaggaggaggatctgcttcaggacatgaatgggcttgtccccagcaatacttcatgctgttgctgctgactgatggtgctgtgacggatgtggaagccacacgtgaggctgtggtgcgtgcctcgaacctgcccatgtcagtgatcattgtgggtgtgggtggtgctgactttgaggccatggagcagctggacgctgatggtggacccctgcatacacgttctgggcaggctgctgcccgcgacattgtgcagtttgtaccctaccgccggttccagaatgcccctcgggaggcattggcacagaccgtgctcgcagaagtgcccacacaactggtctcatacttcagggcccagggttgggccccgctcaagccacttccaccctcagccaaggatcctgcacaggccccccaggcctaggttcccttggaggctgtggcaagtcctcaatcctgtgtcccagaggtccctctgggccacaacccaacccttctcactctcctcagtgctagcactttgtattttttgatacttttatacttgtttctgcttttgctgctcttgatcccacctttgctcctgacaaccctcattcaataaagaccagtgaagaccaat

SEQ ID NO: 9668 - protein, 153 aa, Homo sapiens [sequence omitted]

SEQ ID NO: 9669 - DNA, 1799 bp, Homo sapiens
aaccacgccgttcctcccccttctggaacgcggagccgctgagcgggccgacggccattttgtgaagcggcgaaggaggtggtggctgcgttgggctccgggaagccgttcgggctggggctgtcggccgcggggcggaggcactcgcgcgggggatggcccactgcgtgaccttggttcagctgtccatttcctgtgaccatctcattgacaaggacatcggctccaagtctgacccactctgcgtccttttacaggatgtgggagggggcagctgggctgagcttggccggactgaacgggtgcggaactgctcaagccctgagttctccaagactctacagcttgagtaccgctttgagacagtccagaagctacgctttggaatctatgacatagacaacaagacgccagagctgagggatgatgacttcctagggggtgctgagtgttccctaggacagattgtgtccagccaggtactgactctccccttgatgctgaagcctggaaaacctgctgggcgggggaccatcacggtctcagctcaggaattaaaggacaatcgtgtagtaaccatggaggtagaggccagaaacctagataagaaggacttcctgggaaaatcagatccatttctggagttcttccgccagggtgatgggaaatggcacctggtgtacagatctgaggtcatcaagaacaacctgaaccctacatggaagcgtttctcagtccccgttcagcatttctgtggtgggaaccccagcacacccatccaggtgcaatgctccgattatgacagtgacgggtcacatgatctcatcggtaccttccacaccagcttggcccagctgcaggcagtcccggctgagtttgaatgcatccaccctgagaagcagcagaaaaagaaaagctacaagaactctggaactatccgtgtcaagatttgtcgggtagaaacagagtactcctttctggactatgtgatgggaggctgtcagatcaacttcactgtgggcgtggacttcactggctccaatggagacccctcctcacctgactccctacactacctgagtccaacaggggtcaatgagtacctgatggcactgtggagtgtgggcagcgtggttcaggactatgactcagacaagctgttccctgcatttggatttggggcccaggttccccctgactggcaggtctcgcatgaatttgccttgaatttcaaccccagtaacccctactgtgcaggcatccagggcattgtggatgcctaccgccaagccctgccccaagttcgcctctatggccctaccaactttgcacccatcatcaaccatgtggccaggtttgcagcccaggctgcacatcaggggactgcctcgcaatacttcatgctgttgctgctgactgatggtgctgtgacggatgtggaagccacacgtgaggctgtggcccctcgggaggcattggcacagaccgtgctcgcagaagtgcccacacaactggtctcatacttcagggcccagggttgggccccgctcaagccacttccaccctcagccaaggatcctgcacaggccccccaggcctaggttcccttggaggctgtggcaagtcctcaatcctgtgtcccagaggtccctctgggccacaacccaacccttctcactctcctcagtgctagcactttgtattttttgatacttttatacttgtttctgcttttgctgctcttgatcccacctttgctcctgacaaccctcattcaataaagaccagtgaagaccaat

SEQ ID NO: 9670 - protein, 481 aa, Homo sapiens
MAHCVTLVQLSISCDHLIDKDIGSKSDPLCVLLQDVGGGSWAELGRTERVRNCSSPEFSKTLQLEYRFETVQKLRFGIYDIDNKTPELRDDDFLGGAECSLGQIVSSQVLTLPLMLKPGKPAGRGTITVSAQELKDNRVVTMEVEARNLDKKDFLGKSDPFLEFFRQGDGKWHLVYRSEVIKNNLNPTWKRFSVPVQHFCGGNPSTPIQVQCSDYDSDGSHDLIGTFHTSLAQLQAVPAEFECIHPEKQQKKKSYKNSGTIRVKICRVETEYSFLDYVMGGCQINFTVGVDFTGSNGDPSSPDSLHYLSPTGVNEYLMALWSVGSVVQDYDSDKLFPAFGFGAQVPPDWQVSHEFALNFNPSNPYCAGIQGIVDAYRQALPQVRLYGPTNFAPIINHVARFAAQAAHQGTASQYFMLLLLTDGAVTDVEATREAVAPREALAQTVLAEVPTQLVSYFRAQGWAPLKPLPPSAKDPAQAPQA

SEQ ID NO: 9671 - DNA, 562 bp, Homo sapiens
agtctgaacttatgttgaaatacaaaattaaaattttaaaacccagatcagatcaggtcaggtcagattttccacttcagcttgtgcccccttgggggtactggggagtcaaaaggtttggccctaaacaaaagggcttggtggactctggcaaaatgcaccctgcaaggaggcaaacaaggcttccactgatgctcaagtaagtacctgttagcttctaggcaaagataataacgataatataacagataccatttttcggagaacacttagtaagtaccaggcttactgctttacttgtatcctctccttgagtactcaatttcctatgtttagtcttatgaaaccaaagcacacagagattaagcaacctgccccaagtcatgtggcatcatttttttttttttttgagataggttctcactctatcacccaggtctttctcaaaaaataaattaaactaaaattaaataaaatccaccctctggacaatgaaggcaggtatctgcccccactctcccttttactcatgcaggcttgcccctctttgtgtggacagacc

SEQ ID NO: 9672 - protein, 41 aa, Homo sapiens [sequence omitted]

SEQ ID NO: 9673 - DNA, 581 bp, Homo sapiens
attttgtgaagcggcgaaggaggtggtggctgcgttgggctccgggaagccgttcgggctggggctgtcggccgcggggcggaggcactcgcgcggggggtaattcggggtctgggttctggtgccgcgcagctttccccgatggcccactgcgtgaccttggttcagctgtccatttcctgtgaccatctcattgacaaggacatcggctccaagtctgacccactctgcgtccttttacaggatgtgggagggggcagctgggctgagcttggccggactgaacgggtgcggaactgctcaagccctgagttctccaagactctacagcttgagtaccgctttgagacagtccagaagctacgctttggaatctatgacatagacaacaagacgccagagctgagggatgatgacttcctagggggtgctgagtgttccctaggacagattgtgtccagccaggtactgactctccccttgatgctgaagcctggaaaacctgctgggcgggggaccatcacggtaaggaacccagcaagggttgaggagggacttaacatcaatgaattcatgaggtg

SEQ ID NO: 9674 - protein, 145 aa, Homo sapiens
MAHCVTLVQLSISCDHLIDKDIGSKSDPLCVLLQDVGGGSWAELGRTERVRNCSSPEFSKTLQLEYRFETVQKLRFGIYDIDNKTPELRDDDFLGGAECSLGQIVSSQVLTLPLMLKPGKPAGRGTITVRNPARVEEGLNINEFM

SEQ ID NO: 9675 - DNA, 4759 bp, Homo sapiens
tcctgttaaccctatccagatgaactctcagagcagtgtgaagccactccccatcaaccctgatgatctgtatgtcagtgtgcatggaatgcccttttctgcaatggaaaatgatgtcagagatttttttcatgggctccgtgttgatgcagtgcatttgttgaaagatcatgtaggtcgaaataatgggaatggattggttaagtttctctcccctcaagatacatttgaagctttgaaacgaaacagaatgctgatgattcaacgctatgtggaagttagccctgccacagaaagacagtgggtagctgctggaggccatatcacttttaagcaaaatatgggaccttctggacaaactcatccccctcctcagacacttcccaggtcaaaatcgcccagtgggcagaaaagatcaaggtcaagatcaccacatgaggctggtttttgtgtttacttgaaagggctaccatttgaagcagaaaacaaacatgtcattgatttttttaaaaagctggatattgtggaagatagtatttatatagcttatggacccaatgggaaagcaactggcgaaggctttgtagagttcagaaatgaggctgactataaggctgctctgtgtcgtcataaacagtacatgggcaatcgctttattcaagttcatccaattactaagaaaggtatgctagaaaagatagatatgattcgaaaaagatgtttacagaagactcactcaccaggataaacattgctgtatgttacagtaaagctatctggagagaacacataaatgattttggcataccattagagaaaccatttgtaaaactcaaatgaccacataaagcttatcaaggagtctagattggttttgttttataccatatgggatgaagaaaatagaaatgtcagtagaactcattgagggtgctcttgccagctgctgaaaatagaagttggctactctcagaatttggtttaaagctggacagatttgctttgttatagggtaaagctttgtctaaagtcctcattttcttttaaaattgaataaaatttctgtatacagattcattgtatgtacctttattgcttcttaagggtccttgctgtatagacagtcctgcttcagaagttgctgctttgtttgtctaattgactcatttgtaaatgagcagaactgttttgttggtttttttccctaaatataaaagtccacacttcgtttgtgctataacctcaaactttgatttctaatgtcacacttaaaactgtgtggaataagacttttgccataaaaataaactatggagtcctttatctaccagagcctttttggtttgaccgccacgatttaggttagtcagtttaaaaattgttcatgttgtttggatggtatcgaaaaccagaaaccacttttaataatgtgtttaagatacttgatttgaagtccttttcatatggactaattgtagtatcaatttcctcctgtcccgattatgtgaaattttggcctttaaacaaagaggggcccattcataagaaagtgttatatctaggtttttaaaactgaagttgaaattatctttgttagcagtagtagtatagaataaaagatccgtatgctggttcgtagattgatacgtgttagtcctgttatttggaggctttttggcatagttgttcgatcaggagcctgtttactaaaagtcttcatacagagtacaagtgcagccgccagaggagaaaattgagattcttgaccctttcatactcttttctttggtattcaggacactaaggcaggaggaccacatgagttctggttggtaagtgtccttgtcatgaaaacacttgccttacaaggctctaattatgatttccctagtcagtgctctgaagatgtgtcacattatattataaacaatacggaaggggagataggtgagatgatatgaaaaacaaattttctcactgtcataaaaggctctaattatggttactttccttgtgatgaaaaacttggccttacagggctctagttatggttactttccctagtcaatgctctgaaaatgtgtcacattataaacaatacagaaggagagatagatgagagatcatgaaaaccaaattttatcttttacatggcccctttgtcttcgtttgaaacatccccaacatttcctacaaatcagcgtagttacaaaggggtcagtcttttaaaataagtatttcctattaaactatatatatatacagtgcctttttggtgttgtgagtcagtggaacactgaaatacagcggttgtgtaatttaagagtggcaacagtttcatttgataagatttgaaaaggctttttatcactacaatcttagaggattgacagtacaggatttttgtttaagagaaggattgtttagactcaagaggtgactatgttgtgggtcttttgataattcatgaatacagatttgctttgaccgatcactagatactgcctcctcaatttcaaaagcaatataacgtttgtatatgctgtttaatttaagttaatgttaagtaatcatttctcattccaaagacaatgcaaaaaacttcagcactgcttgagagttgtatttcagccacagatattttctccattggaaagctattttcattttagaaaaatgggttgtttgaagatgaaagtcttttatcttttttcacaatttattttggttatatgttcgtacattcttattaaatatttcatacactttattgcaactactttgttatttctacatcttagataaatgctgaaaaggaaaacgatttcattgttcatctaattaaataaattaaaagagcggtttgtgtagaaattggagagaactatgttttatatgaatcacaacagtgctcgttgtggactgtaattaaatgctttgccctctggaacttgatttttgtgtatctgagatttattaacagtgctaactgctaaggatactgtttatcttgttctgggcattggagtttcagtttttaaaaaattcttgaaaatgtattctgtgaaactactcatacctctcttcctgcgaattttctcctaagaactaggtttggggtagaaatgaattgacattattttctcatttgctttgtatggtatgaaggatttgtaaagctttgctcaaagttgtgtgcatttgtaaacactatcatgatattttcaattttatgtgtaaattttattgtctgtttttggtgactctgacattaatggaagagaatattttccattagatttaattttttttcctctcccttctgattttttttttattggtgttcatttttcttttgatttaaaggattagagaaatctacaaatgtatgtcataaataagcaaatttgtaaacttttctgaactttagtgaaacatttagttcacaagcataatttggaggtgtgttctgtgtttacacagtagtttggatgtacaattattattagtggctttttaaaaaatgaaacagtgttaagtgaaatgtagttcctagctttgtactccaagttgtcaaagcatcaacaatgaaaattcgattaggaaactttatttaaaatttcaggtagtaatattcagtgtagttaaggccagtcttaacccactggatgaaaatctaggactgtatggaagtaagcaaacattacatttttaggtggaaatagtcagccttgcataaaaacaaggatgcgtgaaagccttaaattccagctcccttttactggagtctgtggttgtgtacaggtatgggccaagtgtaaaatctcatcaattttaagaacactcgggaaatgagtaaagaaaatgtaaaattgctgctagtcaaatcttttggaaagaatttctggaagtggtcactttaaaaattattttccacccttgcaaaattgccacatttaaattgttttactggcagttctatagtagtccagactttagaaaccaaacacaacaaaatggcttgttgccaatatggccacaacattgccagcaaatactgccttggcatcactcagcagaggtttttgtttataaagatgaagtcttgaatactgttcaataaacttgtcaaaaaataaaacaggctgatgcttttaatgctttaactgcacaaaagtactttactgagctataatattatcttgtcagggtttttgttttgttttgtttttaaacctgaaaatattttgtgcctttggagaggtagatttggtaatcttggagaggtaaaaattgttgcttatccttgcctgctaatgctgaagtgtcaagagaagaggatacttggaacagcagggaggaaacttgattcaagtccatagtatccaccttttcagaattttatgtgtatgatgtgttggcaaacaaagcccttaaatgttgaaaactttttatcttgaaagagtttagcttgtattagaatttggatacccagtgtgttttagagggggctagacatataattccaggtagtagctgagccattattaaataatcgggatttgactaagcaatggacaaatcactgagtgaaatcagctgcctacagatatccaaaatggcttttaccatctgaaaggggtggactgtgtgataatatgtctccttttcttgttcaggagagatcagttatgtaattcattgttacctgctttccagtgttttacagcaagaaatagtttatcaactatgtgcatca

SEQ ID NO: 9676 - protein, 242 aa, Homo sapiens
MNSQSSVKPLPINPDDLYVSVHGMPFSAMENDVRDFFHGLRVDAVHLLKDHVGRNNGNGLVKFLSPQDTFEALKRNRMLMIQRYVEVSPATERQWVAAGGHITFKQNMGPSGQTHPPPQTLPRSKSPSGQKRSRSRSPHEAGFCVYLKGLPFEAENKHVIDFFKKLDIVEDSIYIAYGPNGKATGEGFVEFRNEADYKAALCRHKQYMGNRFIQVHPITKKGMLEKIDMIRKRCLQKTHSPG

SEQ ID NO: 9677 - DNA, 5988 bp, Homo sapiens
gaatgaatggctctggagcacctatgaatttgaacaataatctgaatcctatgtttcttggtccgttgaatcctgttaaccctatccagatgaactctcagagcagtgtgaagccactccccatcaaccctgatgatctgtatgtcagtgtgcatggaatgcccttttctgcaatggaaaatgatgtcagagatttttttcatgggctccgtgttgatgcagtgcatttgttgaaagatcatgtaggtcgaaataatgggaatggattggttaagtttctctcccctcaagatacatttgaagctttgaaacgaaacagaatgctgatgattcaacgctatgtggaagttagccctgccacagaaagacagtgggtagctgctggaggccatatcacttttaagcaaaatatgggaccttctggacaaactcatccccctcctcagacacttcccaggtcaaaatcgcccagtgggcagaaaagatcaaggtcaagatcaccacatgaggctggtttttgtgtttacttgaaagggctaccatttgaagcagaaaacaaacatgtcattgatttttttaaaaagctggatattgtggaagatagtatttatatagcttatggacccaatgggaaagcaactggcgaaggctttgtagagttcagaaatgaggctgactataaggctgctctgtgtcgtcataaacagtacatgggcaatcgctttattcaagttcatccaattactaagaaaggtatgctagaaaagatagatatgattcgaaaaagactgcagaacttcagctatgaccagagggaaatgatactaaatccagagggggatgtcaactctgccaaattaccctagaagatatgagagagattgagaaaaatccccctgcccaaggaaaaaagggattaaagatgcctgtgccaggtaatcctgcagttccaggaatgcccaatgcgggactgcccggtgtgggactgcccagtgcaggacttcccggtgcaggcctgcccagcacaggactgcctggttcagcaataaccagtgcaggactgcctggtgcgggaatgcccagtgcaggaatacctagtgcaggaggtgaagagcatgccttcctgactgtaggatcaaaggaagccaataatgggcctccatttaactttcctggtaattttggtggatcaaatgcctttgggccaccaatccctcctccaggattaggaggcggggcctttggtgatgctaggcctggtatgccttcagttggaaacagtggtttgcctggtctaggactggatgttccgggttttggaggtggaccaaacaatttaagtgggccatcgggatttggagggggccctcagaattttggaaatggccctggtagcttaggcggtcccccggggtttggaagtggccctcctggtcttggaagtgcccctgggcatttgggtgggccaccagcttttgggcctggccccggccccggccccggccctggcccaatccatattggtggtccccctggctttgcatctagttctggaaaaccaggaccgacagtaattaaagtgcaaaacatgccctttactgtgtctattgatgagattttagatttcttttatggctatcaagtaatcccaggctcagtgtgtttaaaatacaatgaaaaaggtatgcccacaggtgaagccatggtggcctttgagtctcgggatgaagccacagctgctgtcattgacttaaatgacaggcctataggttcaagaaaagtaaaacttgtattagggtagccattcacatcattttttatagggtagatcttcatattgctgtgattaatgcatccagattgttttcctagtatttccaggttagaacctgtggattgtttcaattgcatatagcttggtttccataacatagagcattggttgactgtttacagaagactcactcaccaggataaacattgctgtatgttacagtaaagctatctggagagaacacataaatgattttggcataccattagagaaaccatttgtaaaactcaaatgaccacataaagcttatcaaggagtctagattggttttgttttataccatatgggatgaagaaaatagaaatgtcagtagaactcattgagggtgctcttgccagctgctgaaaatagaagttggctactctcagaatttggtttaaagctggacagatttgctttgttatagggtaaagctttgtctaaagtcctcattttcttttaaaattgaataaaatttctgtatacagattcattgtatgtacctttattgcttcttaagggtccttgctgtatagacagtcctgcttcagaagttgctgctttgtttgtctaattgactcatttgtaaatgagcagaactgttttgttggtttttttccctaaatataaaagtccacacttcgtttgtgctataacctcaaactttgatttctaatgtcacacttaaaactgtgtggaataagacttttgccataaaaataaactatggagtcctttatctaccagagcctttttggtttgaccgccacgatttaggttagtcagtttaaaaattgttcatgttgtttggatggtatcgaaaaccagaaaccacttttaataatgtgtttaagatacttgatttgaagtccttttcatatggactaattgtagtatcaatttcctcctgtcccgattatgtgaaattttggcctttaaacaaagaggggcccattcataagaaagtgttatatctaggtttttaaaactgaagttgaaattatctttgttagcagtagtagtatagaataaaagatccgtatgctggttcgtagattgatacgtgttagtcctgttatttggaggctttttggcatagttgttcgatcaggagcctgtttactaaaagtcttcatacagagtacaagtgcagccgccagaggagaaaattgagattcttgaccctttcatactcttttctttggtattcaggacactaaggcaggaggaccacatgagttctggttggtaagtgtccttgtcatgaaaacacttgccttacaaggctctaattatgatttccctagtcagtgctctgaagatgtgtcacattatattataaacaatacggaaggggagataggtgagatgatatgaaaaacaaattttctcactgtcataaaaggctctaattatggttactttccttgtgatgaaaaacttggccttacagggctctagttatggttactttccctagtcaatgctctgaaaatgtgtcacattataaacaatacagaaggagagatagatgagagatcatgaaaaccaaattttatcttttacatggcccctttgtcttcgtttgaaacatccccaacatttcctacaaatcagcgtagttacaaaggggtcagtcttttaaaataagtatttcctattaaactatatatatatacagtgcctttttggtgttgtgagtcagtggaacactgaaatacagcggttgtgtaatttaagagtggcaacagtttcatttgataagatttgaaaaggctttttatcactacaatcttagaggattgacagtacaggatttttgtttaagagaaggattgtttagactcaagaggtgactatgttgtgggtcttttgataattcatgaatacagatttgctttgaccgatcactagatactgcctcctcaatttcaaaagcaatataacgtttgtatatgctgtttaatttaagttaatgttaagtaatcatttctcattccaaagacaatgcaaaaaacttcagcactgcttgagagttgtatttcagccacagatattttctccattggaaagctattttcattttagaaaaatgggttgtttgaagatgaaagtcttttatcttttttcacaatttattttggttatatgttcgtacattcttattaaatatttcatacactttattgcaactactttgttatttctacatcttagataaatgctgaaaaggaaaacgatttcattgttcatctaattaaataaattaaaagagcggtttgtgtagaaattggagagaactatgttttatatgaatcacaacagtgctcgttgtggactgtaattaaatgctttgccctctggaacttgatttttgtgtatctgagatttattaacagtgctaactgctaaggatactgtttatcttgttctgggcattggagtttcagtttttaaaaaattcttgaaaatgtattctgtgaaactactcatacctctcttcctgcgaattttctcctaagaactaggtttggggtagaaatgaattgacattattttctcatttgctttgtatggtatgaaggatttgtaaagctttgctcaaagttgtgtgcatttgtaaacactatcatgatattttcaattttatgtgtaaattttattgtctgtttttggtgactctgacattaatggaagagaatattttccattagatttaattttttttcctctcccttctgattttttttttattggtgttcatttttcttttgatttaaaggattagagaaatctacaaatgtatgtcataaataagcaaatttgtaaacttttctgaactttagtgaaacatttagttcacaagcataatttggaggtgtgttctgtgtttacacagtagtttggatgtacaattattattagtggctttttaaaaaatgaaacagtgttaagtgaaatgtagttcctagctttgtactccaagttgtcaaagcatcaacaatgaaaattcgattaggaaactttatttaaaatttcaggtagtaatattcagtgtagttaaggccagtcttaacccactggatgaaaatctaggactgtatggaagtaagcaaacattacatttttaggtggaaatagtcagccttgcataaaaacaaggatgcgtgaaagccttaaattccagctcccttttactggagtctgtggttgtgtacaggtatgggccaagtgtaaaatctcatcaattttaagaacactcgggaaatgagtaaagaaaatgtaaaattgctgctagtcaaatcttttggaaagaatttctggaagtggtcactttaaaaattattttccacccttgcaaaattgccacatttaaattgttttactggcagttctatagtagtccagactttagaaaccaaacacaacaaaatggcttgttgccaatatggccacaacattgccagcaaatactgccttggcatcactcagcagaggtttttgtttataaagatgaagtcttgaatactgttcaataaacttgtcaaaaaataaaacaggctgatgcttttaatgctttaactgcacaaaagtactttactgagctataatattatcttgtcagggtttttgttttgttttgtttttaaacctgaaaatattttgtgcctttggagaggtagatttggtaatcttggagaggtaaaaattgttgcttatccttgcctgctaatgctgaagtgtcaagagaagaggatacttggaacagcagggaggaaacttgattcaagtccatagtatccaccttttcagaattttatgtgtatgatgtgttggcaaacaaagcccttaaatgttgaaaactttttatcttgaaagagtttagcttgtattagaatttggatacccagtgtgttttagagggggctagacatataattccaggtagtagctgagccattattaaataatcgggatttgactaagcaatggacaaatcactgagtgaaatcagctgcctacagatatccaaaatggcttttaccatctgaaaggggtggactgtgtgataatatgtctccttttcttgttcaggagagatcagttatgtaattcattgttacctgctttccagtgttttacagcaagaaatagtttatcaactatgtgcatca

SEQ ID NO: 9678 - protein, 287 aa, Homo sapiens
MNGSGAPMNLNNNLNPMFLGPLNPVNPIQMNSQSSVKPLPINPDDLYVSVHGMPFSAMENDVRDFFHGLRVDAVHLLKDHVGRNNGNGLVKFLSPQDTFEALKRNRMLMIQRYVEVSPATERQWVAAGGHITFKQNMGPSGQTHPPPQTLPRSKSPSGQKRSRSRSPHEAGFCVYLKGLPFEAENKHVIDFFKKLDIVEDSIYIAYGPNGKATGEGFVEFRNEADYKAALCRHKQYMGNRFIQVHPITKKGMLEKIDMIRKRLQNFSYDQREMILNPEGDVNSAKLP

SEQ ID NO: 9679 - DNA, 6159 bp, Homo sapiens
ttgcctcctgtgcctcctgtgcccccgattcccccagttccttctgtgccacccatgaccccactgccacccatgtcgggcatgccgcccttgaatccgccacctgtggcacctctacctgctggaatgaatggctctggagcacctatgaatttgaacaataatctgaatcctatgtttcttggtccgttgaatcctgttaaccctatccagatgaactctcagagcagtgtgaagccactccccatcaaccctgatgatctgtatgtcagtgtgcatggaatgcccttttctgcaatggaaaatgatgtcagagatttttttcatgggctccgtgttgatgcagtgcatttgttgaaagatcatgtaggtcgaaataatgggaatggattggttaagtttctctcccctcaagatacatttgaagctttgaaacgaaacagaatgctgatgattcaacgctatgtggaagttagccctgccacagaaagacagtgggtagctgctggaggccatatcacttttaagcaaaatatgggaccttctggacaaactcatccccctcctcagacacttcccaggtcaaaatcgcccagtgggcagaaaagatcaaggtcaagatcaccacatgaggctggtttttgtgtttacttgaaagggctaccatttgaagcagaaaacaaacatgtcattgatttttttaaaaagctggatattgtggaagatagtatttatatagcttatggacccaatgggaaagcaactggcgaaggctttgtagagttcagaaatgaggctgactataaggctgctctgtgtcgtcataaacagtacatgggcaatcgctttattcaagttcatccaattactaagaaaggtatgctagaaaagatagatatgattcgaaaaagactgcagaacttcagctatgaccagagggaaatgatactaaatccagagggggatgtcaactctgccaaagtctgtgcccacataacaaatattccattcagcattacaaagatggatgttcttcagttcctagaaggaatcccagtggatgaaaatgctgtacatgttcttgttgataacaatgggcaaggtctaggacaggcattggttcagaatgcccaatgcgggactgcccggtgtgggactgcccagtgcaggacttcccggtgcaggcctgcccagcacaggactgcctggttcagcaataaccagtgcaggactgcctggtgcgggaatgcccagtgcaggaatacctagtgcaggaggtgaagagcatgccttcctgactgtaggatcaaaggaagccaataatgggcctccatttaactttcctggtaattttggtggatcaaatgcctttgggccaccaatccctcctccaggattaggaggcggggcctttggtgatgctaggcctggtatgccttcagttggaaacagtggtttgcctggtctaggactggatgttccgggttttggaggtggaccaaacaatttaagtgggccatcgggatttggagggggccctcagaattttggaaatggccctggtagcttaggcggtcccccggggtttggaagtggccctcctggtcttggaagtgcccctgggcatttgggtgggccaccagcttttgggcctggccccggccccggccccggccctggcccaatccatattggtggtccccctggctttgcatctagttctggaaaaccaggaccgacagtaattaaagtgcaaaacatgccctttactgtgtctattgatgagattttagatttcttttatggctatcaagtaatcccaggctcagtgtgtttaaaatacaatgaaaaaggtatgcccacaggtgaagccatggtggcctttgagtctcgggatgaagccacagctgctgtcattgacttaaatgacaggcctataggttcaagaaaagtaaaacttgtattagggtagccattcacatcattttttatagggtagatcttcatattgctgtgattaatgcatccagattgttttcctagtatttccaggttagaacctgtggattgtttcaattgcatatagcttggtttccataacatagagcattggttgactgtttacagaagactcactcaccaggataaacattgctgtatgttacagtaaagctatctggagagaacacataaatgattttggcataccattagagaaaccatttgtaaaactcaaatgaccacataaagcttatcaaggagtctagattggttttgttttataccatatgggatgaagaaaatagaaatgtcagtagaactcattgagggtgctcttgccagctgctgaaaatagaagttggctactctcagaatttggtttaaagctggacagatttgctttgttatagggtaaagctttgtctaaagtcctcattttcttttaaaattgaataaaatttctgtatacagattcattgtatgtacctttattgcttcttaagggtccttgctgtatagacagtcctgcttcagaagttgctgctttgtttgtctaattgactcatttgtaaatgagcagaactgttttgttggtttttttccctaaatataaaagtccacacttcgtttgtgctataacctcaaactttgatttctaatgtcacacttaaaactgtgtggaataagacttttgccataaaaataaactatggagtcctttatctaccagagcctttttggtttgaccgccacgatttaggttagtcagtttaaaaattgttcatgttgtttggatggtatcgaaaaccagaaaccacttttaataatgtgtttaagatacttgatttgaagtccttttcatatggactaattgtagtatcaatttcctcctgtcccgattatgtgaaattttggcctttaaacaaagaggggcccattcataagaaagtgttatatctaggtttttaaaactgaagttgaaattatctttgttagcagtagtagtatagaataaaagatccgtatgctggttcgtagattgatacgtgttagtcctgttatttggaggctttttggcatagttgttcgatcaggagcctgtttactaaaagtcttcatacagagtacaagtgcagccgccagaggagaaaattgagattcttgaccctttcatactcttttctttggtattcaggacactaaggcaggaggaccacatgagttctggttggtaagtgtccttgtcatgaaaacacttgccttacaaggctctaattatgatttccctagtcagtgctctgaagatgtgtcacattatattataaacaatacggaaggggagataggtgagatgatatgaaaaacaaattttctcactgtcataaaaggctctaattatggttactttccttgtgatgaaaaacttggccttacagggctctagttatggttactttccctagtcaatgctctgaaaatgtgtcacattataaacaatacagaaggagagatagatgagagatcatgaaaaccaaattttatcttttacatggcccctttgtcttcgtttgaaacatccccaacatttcctacaaatcagcgtagttacaaaggggtcagtcttttaaaataagtatttcctattaaactatatatatatacagtgcctttttggtgttgtgagtcagtggaacactgaaatacagcggttgtgtaatttaagagtggcaacagtttcatttgataagatttgaaaaggctttttatcactacaatcttagaggattgacagtacaggatttttgtttaagagaaggattgtttagactcaagaggtgactatgttgtgggtcttttgataattcatgaatacagatttgctttgaccgatcactagatactgcctcctcaatttcaaaagcaatataacgtttgtatatgctgtttaatttaagttaatgttaagtaatcatttctcattccaaagacaatgcaaaaaacttcagcactgcttgagagttgtatttcagccacagatattttctccattggaaagctattttcattttagaaaaatgggttgtttgaagatgaaagtcttttatcttttttcacaatttattttggttatatgttcgtacattcttattaaatatttcatacactttattgcaactactttgttatttctacatcttagataaatgctgaaaaggaaaacgatttcattgttcatctaattaaataaattaaaagagcggtttgtgtagaaattggagagaactatgttttatatgaatcacaacagtgctcgttgtggactgtaattaaatgctttgccctctggaacttgatttttgtgtatctgagatttattaacagtgctaactgctaaggatactgtttatcttgttctgggcattggagtttcagtttttaaaaaattcttgaaaatgtattctgtgaaactactcatacctctcttcctgcgaattttctcctaagaactaggtttggggtagaaatgaattgacattattttctcatttgctttgtatggtatgaaggatttgtaaagctttgctcaaagttgtgtgcatttgtaaacactatcatgatattttcaattttatgtgtaaattttattgtctgtttttggtgactctgacattaatggaagagaatattttccattagatttaattttttttcctctcccttctgattttttttttattggtgttcatttttcttttgatttaaaggattagagaaatctacaaatgtatgtcataaataagcaaatttgtaaacttttctgaactttagtgaaacatttagttcacaagcataatttggaggtgtgttctgtgtttacacagtagtttggatgtacaattattattagtggctttttaaaaaatgaaacagtgttaagtgaaatgtagttcctagctttgtactccaagttgtcaaagcatcaacaatgaaaattcgattaggaaactttatttaaaatttcaggtagtaatattcagtgtagttaaggccagtcttaacccactggatgaaaatctaggactgtatggaagtaagcaaacattacatttttaggtggaaatagtcagccttgcataaaaacaaggatgcgtgaaagccttaaattccagctcccttttactggagtctgtggttgtgtacaggtatgggccaagtgtaaaatctcatcaattttaagaacactcgggaaatgagtaaagaaaatgtaaaattgctgctagtcaaatcttttggaaagaatttctggaagtggtcactttaaaaattattttccacccttgcaaaattgccacatttaaattgttttactggcagttctatagtagtccagactttagaaaccaaacacaacaaaatggcttgttgccaatatggccacaacattgccagcaaatactgccttggcatcactcagcagaggtttttgtttataaagatgaagtcttgaatactgttcaataaacttgtcaaaaaataaaacaggctgatgcttttaatgctttaactgcacaaaagtactttactgagctataatattatcttgtcagggtttttgttttgttttgtttttaaacctgaaaatattttgtgcctttggagaggtagatttggtaatcttggagaggtaaaaattgttgcttatccttgcctgctaatgctgaagtgtcaagagaagaggatacttggaacagcagggaggaaacttgattcaagtccatagtatccaccttttcagaattttatgtgtatgatgtgttggcaaacaaagcccttaaatgttgaaaactttttatcttgaaagagtttagcttgtattagaatttggatacccagtgtgttttagagggggctagacatataattccaggtagtagctgagccattattaaataatcgggatttgactaagcaatggacaaatcactgagtgaaatcagctgcctacagatatccaaaatggcttttaccatctgaaaggggtggactgtgtgataatatgtctccttttcttgttcaggagagatcagttatgtaattcattgttacctgctttccagtgttttacagcaagaaatagtttatcaactatgtgcatca

SEQ ID NO: 9680 - protein, 404 aa, Homo sapiens
MTPLPPMSGMPPLNPPPVAPLPAGMNGSGAPMNLNNNLNPMFLGPLNPVNPIQMNSQSSVKPLPINPDDLYVSVHGMPFSAMENDVRDFFHGLRVDAVHLLKDHVGRNNGNGLVKFLSPQDTFEALKRNRMLMIQRYVEVSPATERQWVAAGGHITFKQNMGPSGQTHPPPQTLPRSKSPSGQKRSRSRSPHEAGFCVYLKGLPFEAENKHVIDFFKKLDIVEDSIYIAYGPNGKATGEGFVEFRNEADYKAALCRHKQYMGNRFIQVHPITKKGMLEKIDMIRKRLQNFSYDQREMILNPEGDVNSAKVCAHITNIPFSITKMDVLQFLEGIPVDENAVHVLVDNNGQGLGQALVQNAQCGTARCGTAQCRTSRCRPAQHRTAWFSNNQCRTAWCGNAQCRNT

SEQ ID NO: 9681 - DNA, 6915 bp, Homo sapiens
caggtgtgtgtggtttcagcgcagcatggctgtggtcatccgtttgcaaggtctcccaattgtggcggggaccatggacattcgccacttcttctctggattgaccattcctgatgggggcgtgcatattgtagggggtgaactgggtgaggctttcatcgtttttgccactgatgaagatgcaaggcttggtatgatgcgcacaggtggtacaattaaagggtcaaaagtaacactattgttgagtagtaagacggaaatgcagaatatgattgaactgagtcgtaggcgttttgaaactgccaacttagatataccaccagcaaatgccagtagatcaggaccaccacctagctcaggaatgagtagcagggtaaacttgcccacaacagtatccaactttaataatccatcacccagtgtagttactgccaccacttctgttcatgaaagcaacaaaaacatacagacattttccacagccagcgtaggaacagctcctccaaatatgggggcttcctttgggagcccaacgtttagctcaactgttccaagcacagcctctccaatgaacacagtcccgccgccaccaattcctccaattccagcgatgccatcttctgtgccacccatgaccccactgccacccatgtcgggcatgccgcccttgaatccgccacctgtggcacctctacctgctggaatgaatggctctggagcacctatgaatttgaacaataatctgaatcctatgtttcttggtccgttgaatcctgttaaccctatccagatgaactctcagagcagtgtgaagccactccccatcaaccctgatgatctgtatgtcagtgtgcatggaatgcccttttctgcaatggaaaatgatgtcagagatttttttcatgggctccgtgttgatgcagtgcatttgttgaaagatcatgtaggtcgaaataatgggaatggattggttaagtttctctcccctcaagatacatttgaagctttgaaacgaaacagaatgctgatgattcaacgctatgtggaagttagccctgccacagaaagacagtgggtagctgctggaggccatatcacttttaagcaaaatatgggaccttctggacaaactcatccccctcctcagacacttcccaggtcaaaatcgcccagtgggcagaaaagatcaaggtcaagatcaccacatgaggctggtttttgtgtttacttgaaagggctaccatttgaagcagaaaacaaacatgtcattgatttttttaaaaagctggatattgtggaagatagtatttatatagcttatggacccaatgggaaagcaactggcgaaggctttgtagagttcagaaatgaggctgactataaggctgctctgtgtcgtcataaacagtacatgggcaatcgctttattcaagttcatccaattactaagaaaggtatgctagaaaagatagatatgattcgaaaaagactgcagaacttcagctatgaccagagggaaatgatactaaatccagagggggatgtcaactctgccaaagtctgtgcccacataacaaatattccattcagcattacaaagatggatgttcttcagttcctagaaggaatcccagtggatgaaaatgctgtacatgttcttgttgataacaatgggcaaggtctaggacaggcattggttcagtttaaaaatgaagatgatgcacgtaagtctgaacgcttacaccgtaaaaaacttaatgggagagaagcttttgttcatgtagttaccctagaagatatgagagagattgagaaaaatccccctgcccaaggaaaaaagggattaaagatgcctgtgccaggtaatcctgcagttccaggaatgcccaatgcgggactgcccggtgtgggactgcccagtgcaggacttcccggtgcaggcctgcccagcacaggactgcctggttcagcaataaccagtgcaggactgcctggtgcgggaatgcccagtgcaggaatacctagtgcaggaggtgaagagcatgccttcctgactgtaggatcaaaggaagccaataatgggcctccatttaactttcctggtaattttggtggatcaaatgcctttgggccaccaatccctcctccaggattaggaggcggggcctttggtgatgctaggcctggtatgccttcagttggaaacagtggtttgcctggtctaggactggatgttccgggttttggaggtggaccaaacaatttaagtgggccatcgggatttggagggggccctcagaattttggaaatggccctggtagcttaggcggtcccccggggtttggaagtggccctcctggtcttggaagtgcccctgggcatttgggtgggccaccagcttttgggcctggccccggccccggccccggccctggcccaatccatattggtggtccccctggctttgcatctagttctggaaaaccaggaccgacagtaattaaagtgcaaaacatgccctttactgtgtctattgatgagattttagatttcttttatggctatcaagtaatcccaggctcagtgtgtttaaaatacaatgaaaaaggtatgcccacaggtgaagccatggtggcctttgagtctcgggatgaagccacagctgctgtcattgacttaaatgacaggcctataggttcaagaaaagtaaaacttgtattagggtagccattcacatcattttttatagggtagatcttcatattgctgtgattaatgcatccagattgttttcctagtatttccaggttagaacctgtggattgtttcaattgcatatagcttggtttccataacatagagcattggttgactgtttacagaagactcactcaccaggataaacattgctgtatgttacagtaaagctatctggagagaacacataaatgattttggcataccattagagaaaccatttgtaaaactcaaatgaccacataaagcttatcaaggagtctagattggttttgttttataccatatgggatgaagaaaatagaaatgtcagtagaactcattgagggtgctcttgccagctgctgaaaatagaagttggctactctcagaatttggtttaaagctggacagatttgctttgttatagggtaaagctttgtctaaagtcctcattttcttttaaaattgaataaaatttctgtatacagattcattgtatgtacctttattgcttcttaagggtccttgctgtatagacagtcctgcttcagaagttgctgctttgtttgtctaattgactcatttgtaaatgagcagaactgttttgttggtttttttccctaaatataaaagtccacacttcgtttgtgctataacctcaaactttgatttctaatgtcacacttaaaactgtgtggaataagacttttgccataaaaataaactatggagtcctttatctaccagagcctttttggtttgaccgccacgatttaggttagtcagtttaaaaattgttcatgttgtttggatggtatcgaaaaccagaaaccacttttaataatgtgtttaagatacttgatttgaagtccttttcatatggactaattgtagtatcaatttcctcctgtcccgattatgtgaaattttggcctttaaacaaagaggggcccattcataagaaagtgttatatctaggtttttaaaactgaagttgaaattatctttgttagcagtagtagtatagaataaaagatccgtatgctggttcgtagattgatacgtgttagtcctgttatttggaggctttttggcatagttgttcgatcaggagcctgtttactaaaagtcttcatacagagtacaagtgcagccgccagaggagaaaattgagattcttgaccctttcatactcttttctttggtattcaggacactaaggcaggaggaccacatgagttctggttggtaagtgtccttgtcatgaaaacacttgccttacaaggctctaattatgatttccctagtcagtgctctgaagatgtgtcacattatattataaacaatacggaaggggagataggtgagatgatatgaaaaacaaattttctcactgtcataaaaggctctaattatggttactttccttgtgatgaaaaacttggccttacagggctctagttatggttactttccctagtcaatgctctgaaaatgtgtcacattataaacaatacagaaggagagatagatgagagatcatgaaaaccaaattttatcttttacatggcccctttgtcttcgtttgaaacatccccaacatttcctacaaatcagcgtagttacaaaggggtcagtcttttaaaataagtatttcctattaaactatatatatatacagtgcctttttggtgttgtgagtcagtggaacactgaaatacagcggttgtgtaatttaagagtggcaacagtttcatttgataagatttgaaaaggctttttatcactacaatcttagaggattgacagtacaggatttttgtttaagagaaggattgtttagactcaagaggtgactatgttgtgggtcttttgataattcatgaatacagatttgctttgaccgatcactagatactgcctcctcaatttcaaaagcaatataacgtttgtatatgctgtttaatttaagttaatgttaagtaatcatttctcattccaaagacaatgcaaaaaacttcagcactgcttgagagttgtatttcagccacagatattttctccattggaaagctattttcattttagaaaaatgggttgtttgaagatgaaagtcttttatcttttttcacaatttattttggttatatgttcgtacattcttattaaatatttcatacactttattgcaactactttgttatttctacatcttagataaatgctgaaaaggaaaacgatttcattgttcatctaattaaataaattaaaagagcggtttgtgtagaaattggagagaactatgttttatatgaatcacaacagtgctcgttgtggactgtaattaaatgctttgccctctggaacttgatttttgtgtatctgagatttattaacagtgctaactgctaaggatactgtttatcttgttctgggcattggagtttcagtttttaaaaaattcttgaaaatgtattctgtgaaactactcatacctctcttcctgcgaattttctcctaagaactaggtttggggtagaaatgaattgacattattttctcatttgctttgtatggtatgaaggatttgtaaagctttgctcaaagttgtgtgcatttgtaaacactatcatgatattttcaattttatgtgtaaattttattgtctgtttttggtgactctgacattaatggaagagaatattttccattagatttaattttttttcctctcccttctgattttttttttattggtgttcatttttcttttgatttaaaggattagagaaatctacaaatgtatgtcataaataagcaaatttgtaaacttttctgaactttagtgaaacatttagttcacaagcataatttggaggtgtgttctgtgtttacacagtagtttggatgtacaattattattagtggctttttaaaaaatgaaacagtgttaagtgaaatgtagttcctagctttgtactccaagttgtcaaagcatcaacaatgaaaattcgattaggaaactttatttaaaatttcaggtagtaatattcagtgtagttaaggccagtcttaacccactggatgaaaatctaggactgtatggaagtaagcaaacattacatttttaggtggaaatagtcagccttgcataaaaacaaggatgcgtgaaagccttaaattccagctcccttttactggagtctgtggttgtgtacaggtatgggccaagtgtaaaatctcatcaattttaagaacactcgggaaatgagtaaagaaaatgtaaaattgctgctagtcaaatcttttggaaagaatttctggaagtggtcactttaaaaattattttccacccttgcaaaattgccacatttaaattgttttactggcagttctatagtagtccagactttagaaaccaaacacaacaaaatggcttgttgccaatatggccacaacattgccagcaaatactgccttggcatcactcagcagaggtttttgtttataaagatgaagtcttgaatactgttcaataaacttgtcaaaaaataaaacaggctgatgcttttaatgctttaactgcacaaaagtactttactgagctataatattatcttgtcagggtttttgttttgttttgtttttaaacctgaaaatattttgtgcctttggagaggtagatttggtaatcttggagaggtaaaaattgttgcttatccttgcctgctaatgctgaagtgtcaagagaagaggatacttggaacagcagggaggaaacttgattcaagtccatagtatccaccttttcagaattttatgtgtatgatgtgttggcaaacaaagcccttaaatgttgaaaactttttatcttgaaagagtttagcttgtattagaatttggatacccagtgtgttttagagggggctagacatataattccaggtagtagctgagccattattaaataatcgggatttgactaagcaatggacaaatcactgagtgaaatcagctgcctacagatatccaaaatggcttttaccatctgaaaggggtggactgtgtgataatatgtctccttttcttgttcaggagagatcagttatgtaattcattgttacctgctttccagtgttttacagcaagaaatagtttatcaactatgtgcatca

SEQ ID NO: 9682 - protein, 900 aa, Homo sapiens
MAVVIRLQGLPIVAGTMDIRHFFSGLTIPDGGVHIVGGELGEAFIVFATDEDARLGMMRTGGTIKGSKVTLLLSSKTEMQNMIELSRRRFETANLDIPPANASRSGPPPSSGMSSRVNLPTTVSNFNNPSPSVVTATTSVHESNKNIQTFSTASVGTAPPNMGASFGSPTFSSTVPSTASPMNTVPPPPIPPIPAMPSSVPPMTPLPPMSGMPPLNPPPVAPLPAGMNGSGAPMNLNNNLNPMFLGPLNPVNPIQMNSQSSVKPLPINPDDLYVSVHGMPFSAMENDVRDFFHGLRVDAVHLLKDHVGRNNGNGLVKFLSPQDTFEALKRNRMLMIQRYVEVSPATERQWVAAGGHITFKQNMGPSGQTHPPPQTLPRSKSPSGQKRSRSRSPHEAGFCVYLKGLPFEAENKHVIDFFKKLDIVEDSIYIAYGPNGKATGEGFVEFRNEADYKAALCRHKQYMGNRFIQVHPITKKGMLEKIDMIRKRLQNFSYDQREMILNPEGDVNSAKVCAHITNIPFSITKMDVLQFLEGIPVDENAVHVLVDNNGQGLGQALVQFKNEDDARKSERLHRKKLNGREAFVHVVTLEDMREIEKNPPAQGKKGLKMPVPGNPAVPGMPNAGLPGVGLPSAGLPGAGLPSTGLPGSAITSAGLPGAGMPSAGIPSAGGEEHAFLTVGSKEANNGPPFNFPGNFGGSNAFGPPIPPPGLGGGAFGDARPGMPSVGNSGLPGLGLDVPGFGGGPNNLSGPSGFGGGPQNFGNGPGSLGGPPGFGSGPPGLGSAPGHLGGPPAFGPGPGPGPGPGPIHIGGPPGFASSSGKPGPTVIKVQNMPFTVSIDEILDFFYGYQVIPGSVCLKYNEKGMPTGEAMVAFESRDEATAAVIDLNDRPIGSRKVKLVLG

SEQ ID NO: 9683 - DNA, 7177 bp, Homo sapiens
gaaatgcctccgaggtccattgctggggaggggctttactcgagggtgtagcagttttgagaagccggcgtctgaagctaggagtctaaaagttggttttaattggttgcccacaggattgacttggcctctacttcttgttaaggaaattcatctcttgttttatcaggtgtgtgtggtttcagcgcagcatggctgtggtcatccgtttgcaaggtctcccaattgtggcggggaccatggacattcgccacttcttctctggattgaccattcctgatgggggcgtgcatattgtagggggtgaactgggtgaggctttcatcgtttttgccactgatgaagatgcaaggcttggtatgatgcgcacaggtggtacaattaaagggtcaaaagtaacactattgttgagtagtaagacggaaatgcagaatatgattgaactgagtcgtaggcgttttgaaactgccaacttagatataccaccagcaaatgccagtagatcaggaccaccacctagctcaggaatgagtagcagggtaaacttgcccacaacagtatccaactttaataatccatcacccagtgtagttactgccaccacttctgttcatgaaagcaacaaaaacatacagacattttccacagccagcgtaggaacagctcctccaaatatgggggcttcctttgggagcccaacgtttagctcaactgttccaagcacagcctctccaatgaacacagtcccgccgccaccaattcctccaattccagcgatgccatctctgccaccaatgccatccattcccccaattccagttcctcctccagtacctacattgcctcctgtgcctcctgtgcccccgattcccccagttccttctgtgccacccatgaccccactgccacccatgtcgggcatgccgcccttgaatccgccacctgtggcacctctacctgctggaatgaatggctctggagcacctatgaatttgaacaataatctgaatcctatgtttcttggtccgttgaatcctgttaaccctatccagatgaactctcagagcagtgtgaagccactccccatcaaccctgatgatctgtatgtcagtgtgcatggaatgcccttttctgcaatggaaaatgatgtcagagatttttttcatgggctccgtgttgatgcagtgcatttgttgaaagatcatgtaggtcgaaataatgggaatggattggttaagtttctctcccctcaagatacatttgaagctttgaaacgaaacagaatgctgatgattcaacgctatgtggaagttagccctgccacagaaagacagtgggtagctgctggaggccatatcacttttaagcaaaatatgggaccttctggacaaactcatccccctcctcagacacttcccaggtcaaaatcgcccagtgggcagaaaagatcaaggtcaagatcaccacatgaggctggtttttgtgtttacttgaaagggctaccatttgaagcagaaaacaaacatgtcattgatttttttaaaaagctggatattgtggaagatagtatttatatagcttatggacccaatgggaaagcaactggcgaaggctttgtagagttcagaaatgaggctgactataaggctgctctgtgtcgtcataaacagtacatgggcaatcgctttattcaagttcatccaattactaagaaaggtatgctagaaaagatagatatgattcgaaaaagactgcagaacttcagctatgaccagagggaaatgatactaaatccagagggggatgtcaactctgccaaagtctgtgcccacataacaaatattccattcagcattacaaagatggatgttcttcagttcctagaaggaatcccagtggatgaaaatgctgtacatgttcttgttgataacaatgggcaaggtctaggacaggcattggttcagtttaaaaatgaagatgatgcacgtaagtctgaacgcttacaccgtaaaaaacttaatgggagagaagcttttgttcatgtagttaccctagaagatatgagagagattgagaaaaatccccctgcccaaggaaaaaagggattaaagatgcctgtgccaggtaatcctgcagttccaggaatgcccaatgcgggactgcccggtgtgggactgcccagtgcaggacttcccggtgcaggcctgcccagcacaggactgcctggttcagcaataaccagtgcaggactgcctggtgcgggaatgcccagtgcaggaatacctagtgcaggaggtgaagagcatgccttcctgactgtaggatcaaaggaagccaataatgggcctccatttaactttcctggtaattttggtggatcaaatgcctttgggccaccaatccctcctccaggattaggaggcggggcctttggtgatgctaggcctggtatgccttcagttggaaacagtggtttgcctggtctaggactggatgttccgggttttggaggtggaccaaacaatttaagtgggccatcgggatttggagggggccctcagaattttggaaatggccctggtagcttaggcggtcccccggggtttggaagtggccctcctggtcttggaagtgcccctgggcatttgggtgggccaccagcttttgggcctggccccggccccggccccggccctggcccaatccatattggtggtccccctggctttgcatctagttctggaaaaccaggaccgacagtaattaaagtgcaaaacatgccctttactgtgtctattgatgagattttagatttcttttatggctatcaagtaatcccaggctcagtgtgtttaaaatacaatgaaaaaggtatgcccacaggtgaagccatggtggcctttgagtctcgggatgaagccacagctgctgtcattgacttaaatgacaggcctataggttcaagaaaagtaaaacttgtattagggtagccattcacatcattttttatagggtagatcttcatattgctgtgattaatgcatccagattgttttcctagtatttccaggttagaacctgtggattgtttcaattgcatatagcttggtttccataacatagagcattggttgactgtttacagaagactcactcaccaggataaacattgctgtatgttacagtaaagctatctggagagaacacataaatgattttggcataccattagagaaaccatttgtaaaactcaaatgaccacataaagcttatcaaggagtctagattggttttgttttataccatatgggatgaagaaaatagaaatgtcagtagaactcattgagggtgctcttgccagctgctgaaaatagaagttggctactctcagaatttggtttaaagctggacagatttgctttgttatagggtaaagctttgtctaaagtcctcattttcttttaaaattgaataaaatttctgtatacagattcattgtatgtacctttattgcttcttaagggtccttgctgtatagacagtcctgcttcagaagttgctgctttgtttgtctaattgactcatttgtaaatgagcagaactgttttgttggtttttttccctaaatataaaagtccacacttcgtttgtgctataacctcaaactttgatttctaatgtcacacttaaaactgtgtggaataagacttttgccataaaaataaactatggagtcctttatctaccagagcctttttggtttgaccgccacgatttaggttagtcagtttaaaaattgttcatgttgtttggatggtatcgaaaaccagaaaccacttttaataatgtgtttaagatacttgatttgaagtccttttcatatggactaattgtagtatcaatttcctcctgtcccgattatgtgaaattttggcctttaaacaaagaggggcccattcataagaaagtgttatatctaggtttttaaaactgaagttgaaattatctttgttagcagtagtagtatagaataaaagatccgtatgctggttcgtagattgatacgtgttagtcctgttatttggaggctttttggcatagttgttcgatcaggagcctgtttactaaaagtcttcatacagagtacaagtgcagccgccagaggagaaaattgagattcttgaccctttcatactcttttctttggtattcaggacactaaggcaggaggaccacatgagttctggttggtaagtgtccttgtcatgaaaacacttgccttacaaggctctaattatgatttccctagtcagtgctctgaagatgtgtcacattatattataaacaatacggaaggggagataggtgagatgatatgaaaaacaaattttctcactgtcataaaaggctctaattatggttactttccttgtgatgaaaaacttggccttacagggctctagttatggttactttccctagtcaatgctctgaaaatgtgtcacattataaacaatacagaaggagagatagatgagagatcatgaaaaccaaattttatcttttacatggcccctttgtcttcgtttgaaacatccccaacatttcctacaaatcagcgtagttacaaaggggtcagtcttttaaaataagtatttcctattaaactatatatatatacagtgcctttttggtgttgtgagtcagtggaacactgaaatacagcggttgtgtaatttaagagtggcaacagtttcatttgataagatttgaaaaggctttttatcactacaatcttagaggattgacagtacaggatttttgtttaagagaaggattgtttagactcaagaggtgactatgttgtgggtcttttgataattcatgaatacagatttgctttgaccgatcactagatactgcctcctcaatttcaaaagcaatataacgtttgtatatgctgtttaatttaagttaatgttaagtaatcatttctcattccaaagacaatgcaaaaaacttcagcactgcttgagagttgtatttcagccacagatattttctccattggaaagctattttcattttagaaaaatgggttgtttgaagatgaaagtcttttatcttttttcacaatttattttggttatatgttcgtacattcttattaaatatttcatacactttattgcaactactttgttatttctacatcttagataaatgctgaaaaggaaaacgatttcattgttcatctaattaaataaattaaaagagcggtttgtgtagaaattggagagaactatgttttatatgaatcacaacagtgctcgttgtggactgtaattaaatgctttgccctctggaacttgatttttgtgtatctgagatttattaacagtgctaactgctaaggatactgtttatcttgttctgggcattggagtttcagtttttaaaaaattcttgaaaatgtattctgtgaaactactcatacctctcttcctgcgaattttctcctaagaactaggtttggggtagaaatgaattgacattattttctcatttgctttgtatggtatgaaggatttgtaaagctttgctcaaagttgtgtgcatttgtaaacactatcatgatattttcaattttatgtgtaaattttattgtctgtttttggtgactctgacattaatggaagagaatattttccattagatttaattttttttcctctcccttctgattttttttttattggtgttcatttttcttttgatttaaaggattagagaaatctacaaatgtatgtcataaataagcaaatttgtaaacttttctgaactttagtgaaacatttagttcacaagcataatttggaggtgtgttctgtgtttacacagtagtttggatgtacaattattattagtggctttttaaaaaatgaaacagtgttaagtgaaatgtagttcctagctttgtactccaagttgtcaaagcatcaacaatgaaaattcgattaggaaactttatttaaaatttcaggtagtaatattcagtgtagttaaggccagtcttaacccactggatgaaaatctaggactgtatggaagtaagcaaacattacatttttaggtggaaatagtcagccttgcataaaaacaaggatgcgtgaaagccttaaattccagctcccttttactggagtctgtggttgtgtacaggtatgggccaagtgtaaaatctcatcaattttaagaacactcgggaaatgagtaaagaaaatgtaaaattgctgctagtcaaatcttttggaaagaatttctggaagtggtcactttaaaaattattttccacccttgcaaaattgccacatttaaattgttttactggcagttctatagtagtccagactttagaaaccaaacacaacaaaatggcttgttgccaatatggccacaacattgccagcaaatactgccttggcatcactcagcagaggtttttgtttataaagatgaagtcttgaatactgttcaataaacttgtcaaaaaataaaacaggctgatgcttttaatgctttaactgcacaaaagtactttactgagctataatattatcttgtcagggtttttgttttgttttgtttttaaacctgaaaatattttgtgcctttggagaggtagatttggtaatcttggagaggtaaaaattgttgcttatccttgcctgctaatgctgaagtgtcaagagaagaggatacttggaacagcagggaggaaacttgattcaagtccatagtatccaccttttcagaattttatgtgtatgatgtgttggcaaacaaagcccttaaatgttgaaaactttttatcttgaaagagtttagcttgtattagaatttggatacccagtgtgttttagagggggctagacatataattccaggtagtagctgagccattattaaataatcgggatttgactaagcaatggacaaatcactgagtgaaatcagctgcctacagatatccaaaatggcttttaccatctgaaaggggtggactgtgtgataatatgtctccttttcttgttcaggagagatcagttatgtaattcattgttacctgctttccagtgttttacagcaagaaatagtttatcaactatgtgcatca

SEQ ID NO: 9684 - protein, 932 aa, Homo sapiens; identical to SEQ ID NO: 1239

SEQ ID NO: 9685 - DNA, 6661 bp, Homo sapiens
gtgaagcggcgaaggaggtggtggctgcgttgggctccgggaagccgttcgggctggggctgtcggccgcggggcggaggcactcgcgcggggggtaattcggggtctgggttctggtgccgcgcagctttccccgcgtaggaacagctcctccaaatatgggggcttcctttgggagcccaacgtttagctcaactgttccaagcacagcctctccaatgaacacagtcccgccgccaccaattcctccaattccagcgatgccatctctgccaccaatgccatccattcccccaattccagttcctcctccagtacctacattgcctcctgtgcctcctgtgcccccgattcccccagttccttctgtgccacccatgaccccactgccacccatgtcgggcatgccgcccttgaatccgccacctgtggcacctctacctgctggaatgaatggctctggagcacctatgaatttgaacaataatctgaatcctatgtttcttggtccgttgaatcctgttaaccctatccagatgaactctcagagcagtgtgaagccactccccatcaaccctgatgatctgtatgtcagtgtgcatggaatgcccttttctgcaatggaaaatgatgtcagagatttttttcatgggctccgtgttgatgcagtgcatttgttgaaagatcatgtaggtcgaaataatgggaatggattggttaagtttctctcccctcaagatacatttgaagctttgaaacgaaacagaatgctgatgattcaacgctatgtggaagttagccctgccacagaaagacagtgggtagctgctggaggccatatcacttttaagcaaaatatgggaccttctggacaaactcatccccctcctcagacacttcccaggtcaaaatcgcccagtgggcagaaaagatcaaggtcaagatcaccacatgaggctggtttttgtgtttacttgaaagggctaccatttgaagcagaaaacaaacatgtcattgatttttttaaaaagctggatattgtggaagatagtatttatatagcttatggacccaatgggaaagcaactggcgaaggctttgtagagttcagaaatgaggctgactataaggctgctctgtgtcgtcataaacagtacatgggcaatcgctttattcaagttcatccaattactaagaaaggtatgctagaaaagatagatatgattcgaaaaagactgcagaacttcagctatgaccagagggaaatgatactaaatccagagggggatgtcaactctgccaaagtctgtgcccacataacaaatattccattcagcattacaaagatggatgttcttcagttcctagaaggaatcccagtggatgaaaatgctgtacatgttcttgttgataacaatgggcaaggtctaggacaggcattggttcagtttaaaaatgaagatgatgcacgtaagtctgaacgcttacaccgtaaaaaacttaatgggagagaagcttttgttcatgtagttaccctagaagatatgagagagattgagaaaaatccccctgcccaaggaaaaaagggattaaagatgcctgtgccaggtaatcctgcagttccaggaatgcccaatgcgggactgcccggtgtgggactgcccagtgcaggacttcccggtgcaggcctgcccagcacaggactgcctggttcagcaataaccagtgcaggactgcctggtgcgggaatgcccagtgcaggaatacctagtgcaggaggtgaagagcatgccttcctgactgtaggatcaaaggaagccaataatgggcctccatttaactttcctggtaattttggtggatcaaatgcctttgggccaccaatccctcctccaggattaggaggcggggcctttggtgatgctaggcctggtatgccttcagttggaaacagtggtttgcctggtctaggactggatgttccgggttttggaggtggaccaaacaatttaagtgggccatcgggatttggagggggccctcagaattttggaaatggccctggtagcttaggcggtcccccggggtttggaagtggccctcctggtcttggaagtgcccctgggcatttgggtgggccaccagcttttgggcctggccccggccccggccccggccctggcccaatccatattggtggtccccctggctttgcatctagttctggaaaaccaggaccgacagtaattaaagtgcaaaacatgccctttactgtgtctattgatgagattttagatttcttttatggctatcaagtaatcccaggctcagtgtgtttaaaatacaatgaaaaaggtatgcccacaggtgaagccatggtggcctttgagtctcgggatgaagccacagctgctgtcattgacttaaatgacaggcctataggttcaagaaaagtaaaacttgtattagggtagccattcacatcattttttatagggtagatcttcatattgctgtgattaatgcatccagattgttttcctagtatttccaggttagaacctgtggattgtttcaattgcatatagcttggtttccataacatagagcattggttgactgtttacagaagactcactcaccaggataaacattgctgtatgttacagtaaagctatctggagagaacacataaatgattttggcataccattagagaaaccatttgtaaaactcaaatgaccacataaagcttatcaaggagtctagattggttttgttttataccatatgggatgaagaaaatagaaatgtcagtagaactcattgagggtgctcttgccagctgctgaaaatagaagttggctactctcagaatttggtttaaagctggacagatttgctttgttatagggtaaagctttgtctaaagtcctcattttcttttaaaattgaataaaatttctgtatacagattcattgtatgtacctttattgcttcttaagggtccttgctgtatagacagtcctgcttcagaagttgctgctttgtttgtctaattgactcatttgtaaatgagcagaactgttttgttggtttttttccctaaatataaaagtccacacttcgtttgtgctataacctcaaactttgatttctaatgtcacacttaaaactgtgtggaataagacttttgccataaaaataaactatggagtcctttatctaccagagcctttttggtttgaccgccacgatttaggttagtcagtttaaaaattgttcatgttgtttggatggtatcgaaaaccagaaaccacttttaataatgtgtttaagatacttgatttgaagtccttttcatatggactaattgtagtatcaatttcctcctgtcccgattatgtgaaattttggcctttaaacaaagaggggcccattcataagaaagtgttatatctaggtttttaaaactgaagttgaaattatctttgttagcagtagtagtatagaataaaagatccgtatgctggttcgtagattgatacgtgttagtcctgttatttggaggctttttggcatagttgttcgatcaggagcctgtttactaaaagtcttcatacagagtacaagtgcagccgccagaggagaaaattgagattcttgaccctttcatactcttttctttggtattcaggacactaaggcaggaggaccacatgagttctggttggtaagtgtccttgtcatgaaaacacttgccttacaaggctctaattatgatttccctagtcagtgctctgaagatgtgtcacattatattataaacaatacggaaggggagataggtgagatgatatgaaaaacaaattttctcactgtcataaaaggctctaattatggttactttccttgtgatgaaaaacttggccttacagggctctagttatggttactttccctagtcaatgctctgaaaatgtgtcacattataaacaatacagaaggagagatagatgagagatcatgaaaaccaaattttatcttttacatggcccctttgtcttcgtttgaaacatccccaacatttcctacaaatcagcgtagttacaaaggggtcagtcttttaaaataagtatttcctattaaactatatatatatacagtgcctttttggtgttgtgagtcagtggaacactgaaatacagcggttgtgtaatttaagagtggcaacagtttcatttgataagatttgaaaaggctttttatcactacaatcttagaggattgacagtacaggatttttgtttaagagaaggattgtttagactcaagaggtgactatgttgtgggtcttttgataattcatgaatacagatttgctttgaccgatcactagatactgcctcctcaatttcaaaagcaatataacgtttgtatatgctgtttaatttaagttaatgttaagtaatcatttctcattccaaagacaatgcaaaaaacttcagcactgcttgagagttgtatttcagccacagatattttctccattggaaagctattttcattttagaaaaatgggttgtttgaagatgaaagtcttttatcttttttcacaatttattttggttatatgttcgtacattcttattaaatatttcatacactttattgcaactactttgttatttctacatcttagataaatgctgaaaaggaaaacgatttcattgttcatctaattaaataaattaaaagagcggtttgtgtagaaattggagagaactatgttttatatgaatcacaacagtgctcgttgtggactgtaattaaatgctttgccctctggaacttgatttttgtgtatctgagatttattaacagtgctaactgctaaggatactgtttatcttgttctgggcattggagtttcagtttttaaaaaattcttgaaaatgtattctgtgaaactactcatacctctcttcctgcgaattttctcctaagaactaggtttggggtagaaatgaattgacattattttctcatttgctttgtatggtatgaaggatttgtaaagctttgctcaaagttgtgtgcatttgtaaacactatcatgatattttcaattttatgtgtaaattttattgtctgtttttggtgactctgacattaatggaagagaatattttccattagatttaattttttttcctctcccttctgattttttttttattggtgttcatttttcttttgatttaaaggattagagaaatctacaaatgtatgtcataaataagcaaatttgtaaacttttctgaactttagtgaaacatttagttcacaagcataatttggaggtgtgttctgtgtttacacagtagtttggatgtacaattattattagtggctttttaaaaaatgaaacagtgttaagtgaaatgtagttcctagctttgtactccaagttgtcaaagcatcaacaatgaaaattcgattaggaaactttatttaaaatttcaggtagtaatattcagtgtagttaaggccagtcttaacccactggatgaaaatctaggactgtatggaagtaagcaaacattacatttttaggtggaaatagtcagccttgcataaaaacaaggatgcgtgaaagccttaaattccagctcccttttactggagtctgtggttgtgtacaggtatgggccaagtgtaaaatctcatcaattttaagaacactcgggaaatgagtaaagaaaatgtaaaattgctgctagtcaaatcttttggaaagaatttctggaagtggtcactttaaaaattattttccacccttgcaaaattgccacatttaaattgttttactggcagttctatagtagtccagactttagaaaccaaacacaacaaaatggcttgttgccaatatggccacaacattgccagcaaatactgccttggcatcactcagcagaggtttttgtttataaagatgaagtcttgaatactgttcaataaacttgtcaaaaaataaaacaggctgatgcttttaatgctttaactgcacaaaagtactttactgagctataatattatcttgtcagggtttttgttttgttttgtttttaaacctgaaaatattttgtgcctttggagaggtagatttggtaatcttggagaggtaaaaattgttgcttatccttgcctgctaatgctgaagtgtcaagagaagaggatacttggaacagcagggaggaaacttgattcaagtccatagtatccaccttttcagaattttatgtgtatgatgtgttggcaaacaaagcccttaaatgttgaaaactttttatcttgaaagagtttagcttgtattagaatttggatacccagtgtgttttagagggggctagacatataattccaggtagtagctgagccattattaaataatcgggatttgactaagcaatggacaaatcactgagtgaaatcagctgcctacagatatccaaaatggcttttaccatctgaaaggggtggactgtgtgataatatgtctccttttcttgttcaggagagatcagttatgtaattcattgttacctgctttccagtgttttacagcaagaaatagtttatcaactatgtgcatca

SEQ ID NO: 9686 - protein, 771 aa, Homo sapiens
MGASFGSPTFSSTVPSTASPMNTVPPPPIPPIPAMPSLPPMPSIPPIPVPPPVPTLPPVPPVPPIPPVPSVPPMTPLPPMSGMPPLNPPPVAPLPAGMNGSGAPMNLNNNLNPMFLGPLNPVNPIQMNSQSSVKPLPINPDDLYVSVHGMPFSAMENDVRDFFHGLRVDAVHLLKDHVGRNNGNGLVKFLSPQDTFEALKRNRMLMIQRYVEVSPATERQWVAAGGHITFKQNMGPSGQTHPPPQTLPRSKSPSGQKRSRSRSPHEAGFCVYLKGLPFEAENKHVIDFFKKLDIVEDSIYIAYGPNGKATGEGFVEFRNEADYKAALCRHKQYMGNRFIQVHPITKKGMLEKIDMIRKRLQNFSYDQREMILNPEGDVNSAKVCAHITNIPFSITKMDVLQFLEGIPVDENAVHVLVDNNGQGLGQALVQFKNEDDARKSERLHRKKLNGREAFVHVVTLEDMREIEKNPPAQGKKGLKMPVPGNPAVPGMPNAGLPGVGLPSAGLPGAGLPSTGLPGSAITSAGLPGAGMPSAGIPSAGGEEHAFLTVGSKEANNGPPFNFPGNFGGSNAFGPPIPPPGLGGGAFGDARPGMPSVGNSGLPGLGLDVPGFGGGPNNLSGPSGFGGGPQNFGNGPGSLGGPPGFGSGPPGLGSAPGHLGGPPAFGPGPGPGPGPGPIHIGGPPGFASSSGKPGPTVIKVQNMPFTVSIDEILDFFYGYQVIPGSVCLKYNEKGMPTGEAMVAFESRDEATAAVIDLNDRPIGSRKVKLVLG

SEQ ID NO: 9687 - DNA, 7086 bp, Homo sapiens
gtgaagcggcgaaggaggtggtggctgcgttgggctccgggaagccgttcgggctggggctgtcggccgcggggcggaggcactcgcgcggggggtaattcggggtctgggttctggtgccgcgcagctttccccgtctaaaagttggttttaattggttgcccacaggattgacttggccattcctgatgggggcgtgcatattgtagggggtgaactgggtgaggctttcatcgtttttgccactgatgaagatgcaaggcttggtatgatgcgcacaggtggtacaattaaagggtcaaaagtaacactattgttgagtagtaagacggaaatgcagaatatgattgaactgagtcgtaggcgttttgaaactgccaacttagatataccaccagcaaatgccagtagatcaggaccaccacctagctcaggaatgagtagcagggtaaacttgcccacaacagtatccaactttaataatccatcacccagtgtagttactgccaccacttctgttcatgaaagcaacaaaaacatacagacattttccacagccagcgtaggaacagctcctccaaatatgggggcttcctttgggagcccaacgtttagctcaactgttccaagcacagcctctccaatgaacacagtcccgccgccaccaattcctccaattccagcgatgccatctctgccaccaatgccatccattcccccaattccagttcctcctccagtacctacattgcctcctgtgcctcctgtgcccccgattcccccagttccttctgtgccacccatgaccccactgccacccatgtcgggcatgccgcccttgaatccgccacctgtggcacctctacctgctggaatgaatggctctggagcacctatgaatttgaacaataatctgaatcctatgtttcttggtccgttgaatcctgttaaccctatccagatgaactctcagagcagtgtgaagccactccccatcaaccctgatgatctgtatgtcagtgtgcatggaatgcccttttctgcaatggaaaatgatgtcagagatttttttcatgggctccgtgttgatgcagtgcatttgttgaaagatcatgtaggtcgaaataatgggaatggattggttaagtttctctcccctcaagatacatttgaagctttgaaacgaaacagaatgctgatgattcaacgctatgtggaagttagccctgccacagaaagacagtgggtagctgctggaggccatatcacttttaagcaaaatatgggaccttctggacaaactcatccccctcctcagacacttcccaggtcaaaatcgcccagtgggcagaaaagatcaaggtcaagatcaccacatgaggctggtttttgtgtttacttgaaagggctaccatttgaagcagaaaacaaacatgtcattgatttttttaaaaagctggatattgtggaagatagtatttatatagcttatggacccaatgggaaagcaactggcgaaggctttgtagagttcagaaatgaggctgactataaggctgctctgtgtcgtcataaacagtacatgggcaatcgctttattcaagttcatccaattactaagaaaggtatgctagaaaagatagatatgattcgaaaaagactgcagaacttcagctatgaccagagggaaatgatactaaatccagagggggatgtcaactctgccaaagtctgtgcccacataacaaatattccattcagcattacaaagatggatgttcttcagttcctagaaggaatcccagtggatgaaaatgctgtacatgttcttgttgataacaatgggcaaggtctaggacaggcattggttcagtttaaaaatgaagatgatgcacgtaagtctgaacgcttacaccgtaaaaaacttaatgggagagaagcttttgttcatgtagttaccctagaagatatgagagagattgagaaaaatccccctgcccaaggaaaaaagggattaaagatgcctgtgccaggtaatcctgcagttccaggaatgcccaatgcgggactgcccggtgtgggactgcccagtgcaggacttcccggtgcaggcctgcccagcacaggactgcctggttcagcaataaccagtgcaggactgcctggtgcgggaatgcccagtgcaggaatacctagtgcaggaggtgaagagcatgccttcctgactgtaggatcaaaggaagccaataatgggcctccatttaactttcctggtaattttggtggatcaaatgcctttgggccaccaatccctcctccaggattaggaggcggggcctttggtgatgctaggcctggtatgccttcagttggaaacagtggtttgcctggtctaggactggatgttccgggttttggaggtggaccaaacaatttaagtgggccatcgggatttggagggggccctcagaattttggaaatggccctggtagcttaggcggtcccccggggtttggaagtggccctcctggtcttggaagtgcccctgggcatttgggtgggccaccagcttttgggcctggccccggccccggccccggccctggcccaatccatattggtggtccccctggctttgcatctagttctggaaaaccaggaccgacagtaattaaagtgcaaaacatgccctttactgtgtctattgatgagattttagatttcttttatggctatcaagtaatcccaggctcagtgtgtttaaaatacaatgaaaaaggtatgcccacaggtgaagccatggtggcctttgagtctcgggatgaagccacagctgctgtcattgacttaaatgacaggcctataggttcaagaaaagtaaaacttgtattagggtagccattcacatcattttttatagggtagatcttcatattgctgtgattaatgcatccagattgttttcctagtatttccaggttagaacctgtggattgtttcaattgcatatagcttggtttccataacatagagcattggttgactgtttacagaagactcactcaccaggataaacattgctgtatgttacagtaaagctatctggagagaacacataaatgattttggcataccattagagaaaccatttgtaaaactcaaatgaccacataaagcttatcaaggagtctagattggttttgttttataccatatgggatgaagaaaatagaaatgtcagtagaactcattgagggtgctcttgccagctgctgaaaatagaagttggctactctcagaatttggtttaaagctggacagatttgctttgttatagggtaaagctttgtctaaagtcctcattttcttttaaaattgaataaaatttctgtatacagattcattgtatgtacctttattgcttcttaagggtccttgctgtatagacagtcctgcttcagaagttgctgctttgtttgtctaattgactcatttgtaaatgagcagaactgttttgttggtttttttccctaaatataaaagtccacacttcgtttgtgctataacctcaaactttgatttctaatgtcacacttaaaactgtgtggaataagacttttgccataaaaataaactatggagtcctttatctaccagagcctttttggtttgaccgccacgatttaggttagtcagtttaaaaattgttcatgttgtttggatggtatcgaaaaccagaaaccacttttaataatgtgtttaagatacttgatttgaagtccttttcatatggactaattgtagtatcaatttcctcctgtcccgattatgtgaaattttggcctttaaacaaagaggggcccattcataagaaagtgttatatctaggtttttaaaactgaagttgaaattatctttgttagcagtagtagtatagaataaaagatccgtatgctggttcgtagattgatacgtgttagtcctgttatttggaggctttttggcatagttgttcgatcaggagcctgtttactaaaagtcttcatacagagtacaagtgcagccgccagaggagaaaattgagattcttgaccctttcatactcttttctttggtattcaggacactaaggcaggaggaccacatgagttctggttggtaagtgtccttgtcatgaaaacacttgccttacaaggctctaattatgatttccctagtcagtgctctgaagatgtgtcacattatattataaacaatacggaaggggagataggtgagatgatatgaaaaacaaattttctcactgtcataaaaggctctaattatggttactttccttgtgatgaaaaacttggccttacagggctctagttatggttactttccctagtcaatgctctgaaaatgtgtcacattataaacaatacagaaggagagatagatgagagatcatgaaaaccaaattttatcttttacatggcccctttgtcttcgtttgaaacatccccaacatttcctacaaatcagcgtagttacaaaggggtcagtcttttaaaataagtatttcctattaaactatatatatatacagtgcctttttggtgttgtgagtcagtggaacactgaaatacagcggttgtgtaatttaagagtggcaacagtttcatttgataagatttgaaaaggctttttatcactacaatcttagaggattgacagtacaggatttttgtttaagagaaggattgtttagactcaagaggtgactatgttgtgggtcttttgataattcatgaatacagatttgctttgaccgatcactagatactgcctcctcaatttcaaaagcaatataacgtttgtatatgctgtttaatttaagttaatgttaagtaatcatttctcattccaaagacaatgcaaaaaacttcagcactgcttgagagttgtatttcagccacagatattttctccattggaaagctattttcattttagaaaaatgggttgtttgaagatgaaagtcttttatcttttttcacaatttattttggttatatgttcgtacattcttattaaatatttcatacactttattgcaactactttgttatttctacatcttagataaatgctgaaaaggaaaacgatttcattgttcatctaattaaataaattaaaagagcggtttgtgtagaaattggagagaactatgttttatatgaatcacaacagtgctcgttgtggactgtaattaaatgctttgccctctggaacttgatttttgtgtatctgagatttattaacagtgctaactgctaaggatactgtttatcttgttctgggcattggagtttcagtttttaaaaaattcttgaaaatgtattctgtgaaactactcatacctctcttcctgcgaattttctcctaagaactaggtttggggtagaaatgaattgacattattttctcatttgctttgtatggtatgaaggatttgtaaagctttgctcaaagttgtgtgcatttgtaaacactatcatgatattttcaattttatgtgtaaattttattgtctgtttttggtgactctgacattaatggaagagaatattttccattagatttaattttttttcctctcccttctgattttttttttattggtgttcatttttcttttgatttaaaggattagagaaatctacaaatgtatgtcataaataagcaaatttgtaaacttttctgaactttagtgaaacatttagttcacaagcataatttggaggtgtgttctgtgtttacacagtagtttggatgtacaattattattagtggctttttaaaaaatgaaacagtgttaagtgaaatgtagttcctagctttgtactccaagttgtcaaagcatcaacaatgaaaattcgattaggaaactttatttaaaatttcaggtagtaatattcagtgtagttaaggccagtcttaacccactggatgaaaatctaggactgtatggaagtaagcaaacattacatttttaggtggaaatagtcagccttgcataaaaacaaggatgcgtgaaagccttaaattccagctcccttttactggagtctgtggttgtgtacaggtatgggccaagtgtaaaatctcatcaattttaagaacactcgggaaatgagtaaagaaaatgtaaaattgctgctagtcaaatcttttggaaagaatttctggaagtggtcactttaaaaattattttccacccttgcaaaattgccacatttaaattgttttactggcagttctatagtagtccagactttagaaaccaaacacaacaaaatggcttgttgccaatatggccacaacattgccagcaaatactgccttggcatcactcagcagaggtttttgtttataaagatgaagtcttgaatactgttcaataaacttgtcaaaaaataaaacaggctgatgcttttaatgctttaactgcacaaaagtactttactgagctataatattatcttgtcagggtttttgttttgttttgtttttaaacctgaaaatattttgtgcctttggagaggtagatttggtaatcttggagaggtaaaaattgttgcttatccttgcctgctaatgctgaagtgtcaagagaagaggatacttggaacagcagggaggaaacttgattcaagtccatagtatccaccttttcagaattttatgtgtatgatgtgttggcaaacaaagcccttaaatgttgaaaactttttatcttgaaagagtttagcttgtattagaatttggatacccagtgtgttttagagggggctagacatataattccaggtagtagctgagccattattaaataatcgggatttgactaagcaatggacaaatcactgagtgaaatcagctgcctacagatatccaaaatggcttttaccatctgaaaggggtggactgtgtgataatatgtctccttttcttgttcaggagagatcagttatgtaattcattgttacctgctttccagtgttttacagcaagaaatagtttatcaactatgtgcatca

SEQ ID NO: 9688 - protein, 876 aa, Homo sapiens
MMRTGGTIKGSKVTLLLSSKTEMQNMIELSRRRFETANLDIPPANASRSGPPPSSGMSSRVNLPTTVSNFNNPSPSVVTATTSVHESNKNIQTFSTASVGTAPPNMGASFGSPTFSSTVPSTASPMNTVPPPPIPPIPAMPSLPPMPSIPPIPVPPPVPTLPPVPPVPPIPPVPSVPPMTPLPPMSGMPPLNPPPVAPLPAGMNGSGAPMNLNNNLNPMFLGPLNPVNPIQMNSQSSVKPLPINPDDLYVSVHGMPFSAMENDVRDFFHGLRVDAVHLLKDHVGRNNGNGLVKFLSPQDTFEALKRNRMLMIQRYVEVSPATERQWVAAGGHITFKQNMGPSGQTHPPPQTLPRSKSPSGQKRSRSRSPHEAGFCVYLKGLPFEAENKHVIDFFKKLDIVEDSIYIAYGPNGKATGEGFVEFRNEADYKAALCRHKQYMGNRFIQVHPITKKGMLEKIDMIRKRLQNFSYDQREMILNPEGDVNSAKVCAHITNIPFSITKMDVLQFLEGIPVDENAVHVLVDNNGQGLGQALVQFKNEDDARKSERLHRKKLNGREAFVHVVTLEDMREIEKNPPAQGKKGLKMPVPGNPAVPGMPNAGLPGVGLPSAGLPGAGLPSTGLPGSAITSAGLPGAGMPSAGIPSAGGEEHAFLTVGSKEANNGPPFNFPGNFGGSNAFGPPIPPPGLGGGAFGDARPGMPSVGNSGLPGLGLDVPGFGGGPNNLSGPSGFGGGPQNFGNGPGSLGGPPGFGSGPPGLGSAPGHLGGPPAFGPGPGPGPGPGPIHIGGPPGFASSSGKPGPTVIKVQNMPFTVSIDEILDFFYGYQVIPGSVCLKYNEKGMPTGEAMVAFESRDEATAAVIDLNDRPIGSRKVKLVLG

SEQ ID NO: 9689 - DNA, 6770 bp, Homo sapiens
gtgaagcggcgaaggaggtggtggctgcgttgggctccgggaagccgttcgggctggggctgtcggccgcggggcggaggcactcgcgcggggggtaattcggggtctgggttctggtgccgcgcagctttccccgtctaaaagttggttttaattggttgcccacaggattgacttggcctctacttcttgttaaggaaattcatctcttgttttatcaggtgtgtgtggtttcagcgcaccagcgtaggaacagctcctccaaatatgggggcttcctttgggagcccaacgtttagctcaactgttccaagcacagcctctccaatgaacacagtcccgccgccaccaattcctccaattccagcgatgccatctctgccaccaatgccatccattcccccaattccagttcctcctccagtacctacattgcctcctgtgcctcctgtgcccccgattcccccagttccttctgtgccacccatgaccccactgccacccatgtcgggcatgccgcccttgaatccgccacctgtggcacctctacctgctggaatgaatggctctggagcacctatgaatttgaacaataatctgaatcctatgtttcttggtccgttgaatcctgttaaccctatccagatgaactctcagagcagtgtgaagccactccccatcaaccctgatgatctgtatgtcagtgtgcatggaatgcccttttctgcaatggaaaatgatgtcagagatttttttcatgggctccgtgttgatgcagtgcatttgttgaaagatcatgtaggtcgaaataatgggaatggattggttaagtttctctcccctcaagatacatttgaagctttgaaacgaaacagaatgctgatgattcaacgctatgtggaagttagccctgccacagaaagacagtgggtagctgctggaggccatatcacttttaagcaaaatatgggaccttctggacaaactcatccccctcctcagacacttcccaggtcaaaatcgcccagtgggcagaaaagatcaaggtcaagatcaccacatgaggctggtttttgtgtttacttgaaagggctaccatttgaagcagaaaacaaacatgtcattgatttttttaaaaagctggatattgtggaagatagtatttatatagcttatggacccaatgggaaagcaactggcgaaggctttgtagagttcagaaatgaggctgactataaggctgctctgtgtcgtcataaacagtacatgggcaatcgctttattcaagttcatccaattactaagaaaggtatgctagaaaagatagatatgattcgaaaaagactgcagaacttcagctatgaccagagggaaatgatactaaatccagagggggatgtcaactctgccaaagtctgtgcccacataacaaatattccattcagcattacaaagatggatgttcttcagttcctagaaggaatcccagtggatgaaaatgctgtacatgttcttgttgataacaatgggcaaggtctaggacaggcattggttcagtttaaaaatgaagatgatgcacgtaagtctgaacgcttacaccgtaaaaaacttaatgggagagaagcttttgttcatgtagttaccctagaagatatgagagagattgagaaaaatccccctgcccaaggaaaaaagggattaaagatgcctgtgccaggtaatcctgcagttccaggaatgcccaatgcgggactgcccggtgtgggactgcccagtgcaggacttcccggtgcaggcctgcccagcacaggactgcctggttcagcaataaccagtgcaggactgcctggtgcgggaatgcccagtgcaggaatacctagtgcaggaggtgaagagcatgccttcctgactgtaggatcaaaggaagccaataatgggcctccatttaactttcctggtaattttggtggatcaaatgcctttgggccaccaatccctcctccaggattaggaggcggggcctttggtgatgctaggcctggtatgccttcagttggaaacagtggtttgcctggtctaggactggatgttccgggttttggaggtggaccaaacaatttaagtgggccatcgggatttggagggggccctcagaattttggaaatggccctggtagcttaggcggtcccccggggtttggaagtggccctcctggtcttggaagtgcccctgggcatttgggtgggccaccagcttttgggcctggccccggccccggccccggccctggcccaatccatattggtggtccccctggctttgcatctagttctggaaaaccaggaccgacagtaattaaagtgcaaaacatgccctttactgtgtctattgatgagattttagatttcttttatggctatcaagtaatcccaggctcagtgtgtttaaaatacaatgaaaaaggtatgcccacaggtgaagccatggtggcctttgagtctcgggatgaagccacagctgctgtcattgacttaaatgacaggcctataggttcaagaaaagtaaaacttgtattagggtagccattcacatcattttttatagggtagatcttcatattgctgtgattaatgcatccagattgttttcctagtatttccaggttagaacctgtggattgtttcaattgcatatagcttggtttccataacatagagcattggttgactgtttacagaagactcactcaccaggataaacattgctgtatgttacagtaaagctatctggagagaacacataaatgattttggcataccattagagaaaccatttgtaaaactcaaatgaccacataaagcttatcaaggagtctagattggttttgttttataccatatgggatgaagaaaatagaaatgtcagtagaactcattgagggtgctcttgccagctgctgaaaatagaagttggctactctcagaatttggtttaaagctggacagatttgctttgttatagggtaaagctttgtctaaagtcctcattttcttttaaaattgaataaaatttctgtatacagattcattgtatgtacctttattgcttcttaagggtccttgctgtatagacagtcctgcttcagaagttgctgctttgtttgtctaattgactcatttgtaaatgagcagaactgttttgttggtttttttccctaaatataaaagtccacacttcgtttgtgctataacctcaaactttgatttctaatgtcacacttaaaactgtgtggaataagacttttgccataaaaataaactatggagtcctttatctaccagagcctttttggtttgaccgccacgatttaggttagtcagtttaaaaattgttcatgttgtttggatggtatcgaaaaccagaaaccacttttaataatgtgtttaagatacttgatttgaagtccttttcatatggactaattgtagtatcaatttcctcctgtcccgattatgtgaaattttggcctttaaacaaagaggggcccattcataagaaagtgttatatctaggtttttaaaactgaagttgaaattatctttgttagcagtagtagtatagaataaaagatccgtatgctggttcgtagattgatacgtgttagtcctgttatttggaggctttttggcatagttgttcgatcaggagcctgtttactaaaagtcttcatacagagtacaagtgcagccgccagaggagaaaattgagattcttgaccctttcatactcttttctttggtattcaggacactaaggcaggaggaccacatgagttctggttggtaagtgtccttgtcatgaaaacacttgccttacaaggctctaattatgatttccctagtcagtgctctgaagatgtgtcacattatattataaacaatacggaaggggagataggtgagatgatatgaaaaacaaattttctcactgtcataaaaggctctaattatggttactttccttgtgatgaaaaacttggccttacagggctctagttatggttactttccctagtcaatgctctgaaaatgtgtcacattataaacaatacagaaggagagatagatgagagatcatgaaaaccaaattttatcttttacatggcccctttgtcttcgtttgaaacatccccaacatttcctacaaatcagcgtagttacaaaggggtcagtcttttaaaataagtatttcctattaaactatatatatatacagtgcctttttggtgttgtgagtcagtggaacactgaaatacagcggttgtgtaatttaagagtggcaacagtttcatttgataagatttgaaaaggctttttatcactacaatcttagaggattgacagtacaggatttttgtttaagagaaggattgtttagactcaagaggtgactatgttgtgggtcttttgataattcatgaatacagatttgctttgaccgatcactagatactgcctcctcaatttcaaaagcaatataacgtttgtatatgctgtttaatttaagttaatgttaagtaatcatttctcattccaaagacaatgcaaaaaacttcagcactgcttgagagttgtatttcagccacagatattttctccattggaaagctattttcattttagaaaaatgggttgtttgaagatgaaagtcttttatcttttttcacaatttattttggttatatgttcgtacattcttattaaatatttcatacactttattgcaactactttgttatttctacatcttagataaatgctgaaaaggaaaacgatttcattgttcatctaattaaataaattaaaagagcggtttgtgtagaaattggagagaactatgttttatatgaatcacaacagtgctcgttgtggactgtaattaaatgctttgccctctggaacttgatttttgtgtatctgagatttattaacagtgctaactgctaaggatactgtttatcttgttctgggcattggagtttcagtttttaaaaaattcttgaaaatgtattctgtgaaactactcatacctctcttcctgcgaattttctcctaagaactaggtttggggtagaaatgaattgacattattttctcatttgctttgtatggtatgaaggatttgtaaagctttgctcaaagttgtgtgcatttgtaaacactatcatgatattttcaattttatgtgtaaattttattgtctgtttttggtgactctgacattaatggaagagaatattttccattagatttaattttttttcctctcccttctgattttttttttattggtgttcatttttcttttgatttaaaggattagagaaatctacaaatgtatgtcataaataagcaaatttgtaaacttttctgaactttagtgaaacatttagttcacaagcataatttggaggtgtgttctgtgtttacacagtagtttggatgtacaattattattagtggctttttaaaaaatgaaacagtgttaagtgaaatgtagttcctagctttgtactccaagttgtcaaagcatcaacaatgaaaattcgattaggaaactttatttaaaatttcaggtagtaatattcagtgtagttaaggccagtcttaacccactggatgaaaatctaggactgtatggaagtaagcaaacattacatttttaggtggaaatagtcagccttgcataaaaacaaggatgcgtgaaagccttaaattccagctcccttttactggagtctgtggttgtgtacaggtatgggccaagtgtaaaatctcatcaattttaagaacactcgggaaatgagtaaagaaaatgtaaaattgctgctagtcaaatcttttggaaagaatttctggaagtggtcactttaaaaattattttccacccttgcaaaattgccacatttaaattgttttactggcagttctatagtagtccagactttagaaaccaaacacaacaaaatggcttgttgccaatatggccacaacattgccagcaaatactgccttggcatcactcagcagaggtttttgtttataaagatgaagtcttgaatactgttcaataaacttgtcaaaaaataaaacaggctgatgcttttaatgctttaactgcacaaaagtactttactgagctataatattatcttgtcagggtttttgttttgttttgtttttaaacctgaaaatattttgtgcctttggagaggtagatttggtaatcttggagaggtaaaaattgttgcttatccttgcctgctaatgctgaagtgtcaagagaagaggatacttggaacagcagggaggaaacttgattcaagtccatagtatccaccttttcagaattttatgtgtatgatgtgttggcaaacaaagcccttaaatgttgaaaactttttatcttgaaagagtttagcttgtattagaatttggatacccagtgtgttttagagggggctagacatataattccaggtagtagctgagccattattaaataatcgggatttgactaagcaatggacaaatcactgagtgaaatcagctgcctacagatatccaaaatggcttttaccatctgaaaggggtggactgtgtgataatatgtctccttttcttgttcaggagagatcagttatgtaattcattgttacctgctttccagtgttttacagcaagaaatagtttatcaactatgtgcatca

SEQ ID NO: 9690 - protein, 771 aa, Homo sapiens; identical to SEQ ID NO: 9686

SEQ ID NO: 9691 - DNA, 6601 bp, Homo sapiens
gtgaagcggcgaaggaggtggtggctgcgttgggctccgggaagccgttcgggctggggctgtcggccgcggggcggaggcactcgcgcggggggtaattcggggtctgggttctggtgccgcgcagctttccccgtctaaaagttggttttaattggttgcccacaggattgacttggcctctacttcttgttaaggaaattcatcttctgccaccaatgccatccattcccccaattccagttcctcctccagtacctacattgcctcctgtgcctcctgtgcccccgattcccccagttccttctgtgccacccatgaccccactgccacccatgtcgggcatgccgcccttgaatccgccacctgtggcacctctacctgctggaatgaatggctctggagcacctatgaatttgaacaataatctgaatcctatgtttcttggtccgttgaatcctgttaaccctatccagatgaactctcagagcagtgtgaagccactccccatcaaccctgatgatctgtatgtcagtgtgcatggaatgcccttttctgcaatggaaaatgatgtcagagatttttttcatgggctccgtgttgatgcagtgcatttgttgaaagatcatgtaggtcgaaataatgggaatggattggttaagtttctctcccctcaagatacatttgaagctttgaaacgaaacagaatgctgatgattcaacgctatgtggaagttagccctgccacagaaagacagtgggtagctgctggaggccatatcacttttaagcaaaatatgggaccttctggacaaactcatccccctcctcagacacttcccaggtcaaaatcgcccagtgggcagaaaagatcaaggtcaagatcaccacatgaggctggtttttgtgtttacttgaaagggctaccatttgaagcagaaaacaaacatgtcattgatttttttaaaaagctggatattgtggaagatagtatttatatagcttatggacccaatgggaaagcaactggcgaaggctttgtagagttcagaaatgaggctgactataaggctgctctgtgtcgtcataaacagtacatgggcaatcgctttattcaagttcatccaattactaagaaaggtatgctagaaaagatagatatgattcgaaaaagactgcagaacttcagctatgaccagagggaaatgatactaaatccagagggggatgtcaactctgccaaagtctgtgcccacataacaaatattccattcagcattacaaagatggatgttcttcagttcctagaaggaatcccagtggatgaaaatgctgtacatgttcttgttgataacaatgggcaaggtctaggacaggcattggttcagtttaaaaatgaagatgatgcacgtaagtctgaacgcttacaccgtaaaaaacttaatgggagagaagcttttgttcatgtagttaccctagaagatatgagagagattgagaaaaatccccctgcccaaggaaaaaagggattaaagatgcctgtgccaggtaatcctgcagttccaggaatgcccaatgcgggactgcccggtgtgggactgcccagtgcaggacttcccggtgcaggcctgcccagcacaggactgcctggttcagcaataaccagtgcaggactgcctggtgcgggaatgcccagtgcaggaatacctagtgcaggaggtgaagagcatgccttcctgactgtaggatcaaaggaagccaataatgggcctccatttaactttcctggtaattttggtggatcaaatgcctttgggccaccaatccctcctccaggattaggaggcggggcctttggtgatgctaggcctggtatgccttcagttggaaacagtggtttgcctggtctaggactggatgttccgggttttggaggtggaccaaacaatttaagtgggccatcgggatttggagggggccctcagaattttggaaatggccctggtagcttaggcggtcccccggggtttggaagtggccctcctggtcttggaagtgcccctgggcatttgggtgggccaccagcttttgggcctggccccggccccggccccggccctggcccaatccatattggtggtccccctggctttgcatctagttctggaaaaccaggaccgacagtaattaaagtgcaaaacatgccctttactgtgtctattgatgagattttagatttcttttatggctatcaagtaatcccaggctcagtgtgtttaaaatacaatgaaaaaggtatgcccacaggtgaagccatggtggcctttgagtctcgggatgaagccacagctgctgtcattgacttaaatgacaggcctataggttcaagaaaagtaaaacttgtattagggtagccattcacatcattttttatagggtagatcttcatattgctgtgattaatgcatccagattgttttcctagtatttccaggttagaacctgtggattgtttcaattgcatatagcttggtttccataacatagagcattggttgactgtttacagaagactcactcaccaggataaacattgctgtatgttacagtaaagctatctggagagaacacataaatgattttggcataccattagagaaaccatttgtaaaactcaaatgaccacataaagcttatcaaggagtctagattggttttgttttataccatatgggatgaagaaaatagaaatgtcagtagaactcattgagggtgctcttgccagctgctgaaaatagaagttggctactctcagaatttggtttaaagctggacagatttgctttgttatagggtaaagctttgtctaaagtcctcattttcttttaaaattgaataaaatttctgtatacagattcattgtatgtacctttattgcttcttaagggtccttgctgtatagacagtcctgcttcagaagttgctgctttgtttgtctaattgactcatttgtaaatgagcagaactgttttgttggtttttttccctaaatataaaagtccacacttcgtttgtgctataacctcaaactttgatttctaatgtcacacttaaaactgtgtggaataagacttttgccataaaaataaactatggagtcctttatctaccagagcctttttggtttgaccgccacgatttaggttagtcagtttaaaaattgttcatgttgtttggatggtatcgaaaaccagaaaccacttttaataatgtgtttaagatacttgatttgaagtccttttcatatggactaattgtagtatcaatttcctcctgtcccgattatgtgaaattttggcctttaaacaaagaggggcccattcataagaaagtgttatatctaggtttttaaaactgaagttgaaattatctttgttagcagtagtagtatagaataaaagatccgtatgctggttcgtagattgatacgtgttagtcctgttatttggaggctttttggcatagttgttcgatcaggagcctgtttactaaaagtcttcatacagagtacaagtgcagccgccagaggagaaaattgagattcttgaccctttcatactcttttctttggtattcaggacactaaggcaggaggaccacatgagttctggttggtaagtgtccttgtcatgaaaacacttgccttacaaggctctaattatgatttccctagtcagtgctctgaagatgtgtcacattatattataaacaatacggaaggggagataggtgagatgatatgaaaaacaaattttctcactgtcataaaaggctctaattatggttactttccttgtgatgaaaaacttggccttacagggctctagttatggttactttccctagtcaatgctctgaaaatgtgtcacattataaacaatacagaaggagagatagatgagagatcatgaaaaccaaattttatcttttacatggcccctttgtcttcgtttgaaacatccccaacatttcctacaaatcagcgtagttacaaaggggtcagtcttttaaaataagtatttcctattaaactatatatatatacagtgcctttttggtgttgtgagtcagtggaacactgaaatacagcggttgtgtaatttaagagtggcaacagtttcatttgataagatttgaaaaggctttttatcactacaatcttagaggattgacagtacaggatttttgtttaagagaaggattgtttagactcaagaggtgactatgttgtgggtcttttgataattcatgaatacagatttgctttgaccgatcactagatactgcctcctcaatttcaaaagcaatataacgtttgtatatgctgtttaatttaagttaatgttaagtaatcatttctcattccaaagacaatgcaaaaaacttcagcactgcttgagagttgtatttcagccacagatattttctccattggaaagctattttcattttagaaaaatgggttgtttgaagatgaaagtcttttatcttttttcacaatttattttggttatatgttcgtacattcttattaaatatttcatacactttattgcaactactttgttatttctacatcttagataaatgctgaaaaggaaaacgatttcattgttcatctaattaaataaattaaaagagcggtttgtgtagaaattggagagaactatgttttatatgaatcacaacagtgctcgttgtggactgtaattaaatgctttgccctctggaacttgatttttgtgtatctgagatttattaacagtgctaactgctaaggatactgtttatcttgttctgggcattggagtttcagtttttaaaaaattcttgaaaatgtattctgtgaaactactcatacctctcttcctgcgaattttctcctaagaactaggtttggggtagaaatgaattgacattattttctcatttgctttgtatggtatgaaggatttgtaaagctttgctcaaagttgtgtgcatttgtaaacactatcatgatattttcaattttatgtgtaaattttattgtctgtttttggtgactctgacattaatggaagagaatattttccattagatttaattttttttcctctcccttctgattttttttttattggtgttcatttttcttttgatttaaaggattagagaaatctacaaatgtatgtcataaataagcaaatttgtaaacttttctgaactttagtgaaacatttagttcacaagcataatttggaggtgtgttctgtgtttacacagtagtttggatgtacaattattattagtggctttttaaaaaatgaaacagtgttaagtgaaatgtagttcctagctttgtactccaagttgtcaaagcatcaacaatgaaaattcgattaggaaactttatttaaaatttcaggtagtaatattcagtgtagttaaggccagtcttaacccactggatgaaaatctaggactgtatggaagtaagcaaacattacatttttaggtggaaatagtcagccttgcataaaaacaaggatgcgtgaaagccttaaattccagctcccttttactggagtctgtggttgtgtacaggtatgggccaagtgtaaaatctcatcaattttaagaacactcgggaaatgagtaaagaaaatgtaaaattgctgctagtcaaatcttttggaaagaatttctggaagtggtcactttaaaaattattttccacccttgcaaaattgccacatttaaattgttttactggcagttctatagtagtccagactttagaaaccaaacacaacaaaatggcttgttgccaatatggccacaacattgccagcaaatactgccttggcatcactcagcagaggtttttgtttataaagatgaagtcttgaatactgttcaataaacttgtcaaaaaataaaacaggctgatgcttttaatgctttaactgcacaaaagtactttactgagctataatattatcttgtcagggtttttgttttgttttgtttttaaacctgaaaatattttgtgcctttggagaggtagatttggtaatcttggagaggtaaaaattgttgcttatccttgcctgctaatgctgaagtgtcaagagaagaggatacttggaacagcagggaggaaacttgattcaagtccatagtatccaccttttcagaattttatgtgtatgatgtgttggcaaacaaagcccttaaatgttgaaaactttttatcttgaaagagtttagcttgtattagaatttggatacccagtgtgttttagagggggctagacatataattccaggtagtagctgagccattattaaataatcgggatttgactaagcaatggacaaatcactgagtgaaatcagctgcctacagatatccaaaatggcttttaccatctgaaaggggtggactgtgtgataatatgtctccttttcttgttcaggagagatcagttatgtaattcattgttacctgctttccagtgttttacagcaagaaatagtttatcaactatgtgcatca

SEQ ID NO: 9692 - protein, 731 aa, Homo sapiens
MPSIPPIPVPPPVPTLPPVPPVPPIPPVPSVPPMTPLPPMSGMPPLNPPPVAPLPAGMNGSGAPMNLNNNLNPMFLGPLNPVNPIQMNSQSSVKPLPINPDDLYVSVHGMPFSAMENDVRDFFHGLRVDAVHLLKDHVGRNNGNGLVKFLSPQDTFEALKRNRMLMIQRYVEVSPATERQWVAAGGHITFKQNMGPSGQTHPPPQTLPRSKSPSGQKRSRSRSPHEAGFCVYLKGLPFEAENKHVIDFFKKLDIVEDSIYIAYGPNGKATGEGFVEFRNEADYKAALCRHKQYMGNRFIQVHPITKKGMLEKIDMIRKRLQNFSYDQREMILNPEGDVNSAKVCAHITNIPFSITKMDVLQFLEGIPVDENAVHVLVDNNGQGLGQALVQFKNEDDARKSERLHRKKLNGREAFVHVVTLEDMREIEKNPPAQGKKGLKMPVPGNPAVPGMPNAGLPGVGLPSAGLPGAGLPSTGLPGSAITSAGLPGAGMPSAGIPSAGGEEHAFLTVGSKEANNGPPFNFPGNFGGSNAFGPPIPPPGLGGGAFGDARPGMPSVGNSGLPGLGLDVPGFGGGPNNLSGPSGFGGGPQNFGNGPGSLGGPPGFGSGPPGLGSAPGHLGGPPAFGPGPGPGPGPGPIHIGGPPGFASSSGKPGPTVIKVQNMPFTVSIDEILDFFYGYQVIPGSVCLKYNEKGMPTGEAMVAFESRDEATAAVIDLNDRPIGSRKVKLVLG

SEQ ID NO: 9693 - DNA, 6695 bp, Homo sapiens
gtgaagcggcgaaggaggtggtggctgcgttgggctccgggaagccgttcgggctggggctgtcggccgcggggcggaggcactcgcgcggggggtaattcggggtctgggttctggtgccgcgcagctttccccgtctaaaagttggttttaattggttgcccacaggattgacttggcctctacttcttgttaaggaaattcatctcttgttttatcaggtgtgtgtgtgttccaagcacagcctctccaatgaacacagtcccgccgccaccaattcctccaattccagcgatgccatctctgccaccaatgccatccattcccccaattccagttcctcctccagtacctacattgcctcctgtgcctcctgtgcccccgattcccccagttccttctgtgccacccatgaccccactgccacccatgtcgggcatgccgcccttgaatccgccacctgtggcacctctacctgctggaatgaatggctctggagcacctatgaatttgaacaataatctgaatcctatgtttcttggtccgttgaatcctgttaaccctatccagatgaactctcagagcagtgtgaagccactccccatcaaccctgatgatctgtatgtcagtgtgcatggaatgcccttttctgcaatggaaaatgatgtcagagatttttttcatgggctccgtgttgatgcagtgcatttgttgaaagatcatgtaggtcgaaataatgggaatggattggttaagtttctctcccctcaagatacatttgaagctttgaaacgaaacagaatgctgatgattcaacgctatgtggaagttagccctgccacagaaagacagtgggtagctgctggaggccatatcacttttaagcaaaatatgggaccttctggacaaactcatccccctcctcagacacttcccaggtcaaaatcgcccagtgggcagaaaagatcaaggtcaagatcaccacatgaggctggtttttgtgtttacttgaaagggctaccatttgaagcagaaaacaaacatgtcattgatttttttaaaaagctggatattgtggaagatagtatttatatagcttatggacccaatgggaaagcaactggcgaaggctttgtagagttcagaaatgaggctgactataaggctgctctgtgtcgtcataaacagtacatgggcaatcgctttattcaagttcatccaattactaagaaaggtatgctagaaaagatagatatgattcgaaaaagactgcagaacttcagctatgaccagagggaaatgatactaaatccagagggggatgtcaactctgccaaagtctgtgcccacataacaaatattccattcagcattacaaagatggatgttcttcagttcctagaaggaatcccagtggatgaaaatgctgtacatgttcttgttgataacaatgggcaaggtctaggacaggcattggttcagtttaaaaatgaagatgatgcacgtaagtctgaacgcttacaccgtaaaaaacttaatgggagagaagcttttgttcatgtagttaccctagaagatatgagagagattgagaaaaatccccctgcccaaggaaaaaagggattaaagatgcctgtgccaggtaatcctgcagttccaggaatgcccaatgcgggactgcccggtgtgggactgcccagtgcaggacttcccggtgcaggcctgcccagcacaggactgcctggttcagcaataaccagtgcaggactgcctggtgcgggaatgcccagtgcaggaatacctagtgcaggaggtgaagagcatgccttcctgactgtaggatcaaaggaagccaataatgggcctccatttaactttcctggtaattttggtggatcaaatgcctttgggccaccaatccctcctccaggattaggaggcggggcctttggtgatgctaggcctggtatgccttcagttggaaacagtggtttgcctggtctaggactggatgttccgggttttggaggtggaccaaacaatttaagtgggccatcgggatttggagggggccctcagaattttggaaatggccctggtagcttaggcggtcccccggggtttggaagtggccctcctggtcttggaagtgcccctgggcatttgggtgggccaccagcttttgggcctggccccggccccggccccggccctggcccaatccatattggtggtccccctggctttgcatctagttctggaaaaccaggaccgacagtaattaaagtgcaaaacatgccctttactgtgtctattgatgagattttagatttcttttatggctatcaagtaatcccaggctcagtgtgtttaaaatacaatgaaaaaggtatgcccacaggtgaagccatggtggcctttgagtctcgggatgaagccacagctgctgtcattgacttaaatgacaggcctataggttcaagaaaagtaaaacttgtattagggtagccattcacatcattttttatagggtagatcttcatattgctgtgattaatgcatccagattgttttcctagtatttccaggttagaacctgtggattgtttcaattgcatatagcttggtttccataacatagagcattggttgactgtttacagaagactcactcaccaggataaacattgctgtatgttacagtaaagctatctggagagaacacataaatgattttggcataccattagagaaaccatttgtaaaactcaaatgaccacataaagcttatcaaggagtctagattggttttgttttataccatatgggatgaagaaaatagaaatgtcagtagaactcattgagggtgctcttgccagctgctgaaaatagaagttggctactctcagaatttggtttaaagctggacagatttgctttgttatagggtaaagctttgtctaaagtcctcattttcttttaaaattgaataaaatttctgtatacagattcattgtatgtacctttattgcttcttaagggtccttgctgtatagacagtcctgcttcagaagttgctgctttgtttgtctaattgactcatttgtaaatgagcagaactgttttgttggtttttttccctaaatataaaagtccacacttcgtttgtgctataacctcaaactttgatttctaatgtcacacttaaaactgtgtggaataagacttttgccataaaaataaactatggagtcctttatctaccagagcctttttggtttgaccgccacgatttaggttagtcagtttaaaaattgttcatgttgtttggatggtatcgaaaaccagaaaccacttttaataatgtgtttaagatacttgatttgaagtccttttcatatggactaattgtagtatcaatttcctcctgtcccgattatgtgaaattttggcctttaaacaaagaggggcccattcataagaaagtgttatatctaggtttttaaaactgaagttgaaattatctttgttagcagtagtagtatagaataaaagatccgtatgctggttcgtagattgatacgtgttagtcctgttatttggaggctttttggcatagttgttcgatcaggagcctgtttactaaaagtcttcatacagagtacaagtgcagccgccagaggagaaaattgagattcttgaccctttcatactcttttctttggtattcaggacactaaggcaggaggaccacatgagttctggttggtaagtgtccttgtcatgaaaacacttgccttacaaggctctaattatgatttccctagtcagtgctctgaagatgtgtcacattatattataaacaatacggaaggggagataggtgagatgatatgaaaaacaaattttctcactgtcataaaaggctctaattatggttactttccttgtgatgaaaaacttggccttacagggctctagttatggttactttccctagtcaatgctctgaaaatgtgtcacattataaacaatacagaaggagagatagatgagagatcatgaaaaccaaattttatcttttacatggcccctttgtcttcgtttgaaacatccccaacatttcctacaaatcagcgtagttacaaaggggtcagtcttttaaaataagtatttcctattaaactatatatatatacagtgcctttttggtgttgtgagtcagtggaacactgaaatacagcggttgtgtaatttaagagtggcaacagtttcatttgataagatttgaaaaggctttttatcactacaatcttagaggattgacagtacaggatttttgtttaagagaaggattgtttagactcaagaggtgactatgttgtgggtcttttgataattcatgaatacagatttgctttgaccgatcactagatactgcctcctcaatttcaaaagcaatataacgtttgtatatgctgtttaatttaagttaatgttaagtaatcatttctcattccaaagacaatgcaaaaaacttcagcactgcttgagagttgtatttcagccacagatattttctccattggaaagctattttcattttagaaaaatgggttgtttgaagatgaaagtcttttatcttttttcacaatttattttggttatatgttcgtacattcttattaaatatttcatacactttattgcaactactttgttatttctacatcttagataaatgctgaaaaggaaaacgatttcattgttcatctaattaaataaattaaaagagcggtttgtgtagaaattggagagaactatgttttatatgaatcacaacagtgctcgttgtggactgtaattaaatgctttgccctctggaacttgatttttgtgtatctgagatttattaacagtgctaactgctaaggatactgtttatcttgttctgggcattggagtttcagtttttaaaaaattcttgaaaatgtattctgtgaaactactcatacctctcttcctgcgaattttctcctaagaactaggtttggggtagaaatgaattgacattattttctcatttgctttgtatggtatgaaggatttgtaaagctttgctcaaagttgtgtgcatttgtaaacactatcatgatattttcaattttatgtgtaaattttattgtctgtttttggtgactctgacattaatggaagagaatattttccattagatttaattttttttcctctcccttctgattttttttttattggtgttcatttttcttttgatttaaaggattagagaaatctacaaatgtatgtcataaataagcaaatttgtaaacttttctgaactttagtgaaacatttagttcacaagcataatttggaggtgtgttctgtgtttacacagtagtttggatgtacaattattattagtggctttttaaaaaatgaaacagtgttaagtgaaatgtagttcctagctttgtactccaagttgtcaaagcatcaacaatgaaaattcgattaggaaactttatttaaaatttcaggtagtaatattcagtgtagttaaggccagtcttaacccactggatgaaaatctaggactgtatggaagtaagcaaacattacatttttaggtggaaatagtcagccttgcataaaaacaaggatgcgtgaaagccttaaattccagctcccttttactggagtctgtggttgtgtacaggtatgggccaagtgtaaaatctcatcaattttaagaacactcgggaaatgagtaaagaaaatgtaaaattgctgctagtcaaatcttttggaaagaatttctggaagtggtcactttaaaaattattttccacccttgcaaaattgccacatttaaattgttttactggcagttctatagtagtccagactttagaaaccaaacacaacaaaatggcttgttgccaatatggccacaacattgccagcaaatactgccttggcatcactcagcagaggtttttgtttataaagatgaagtcttgaatactgttcaataaacttgtcaaaaaataaaacaggctgatgcttttaatgctttaactgcacaaaagtactttactgagctataatattatcttgtcagggtttttgttttgttttgtttttaaacctgaaaatattttgtgcctttggagaggtagatttggtaatcttggagaggtaaaaattgttgcttatccttgcctgctaatgctgaagtgtcaagagaagaggatacttggaacagcagggaggaaacttgattcaagtccatagtatccaccttttcagaattttatgtgtatgatgtgttggcaaacaaagcccttaaatgttgaaaactttttatcttgaaagagtttagcttgtattagaatttggatacccagtgtgttttagagggggctagacatataattccaggtagtagctgagccattattaaataatcgggatttgactaagcaatggacaaatcactgagtgaaatcagctgcctacagatatccaaaatggcttttaccatctgaaaggggtggactgtgtgataatatgtctccttttcttgttcaggagagatcagttatgtaattcattgttacctgctttccagtgttttacagcaagaaatagtttatcaactatgtgcatca

SEQ ID NO: 9694 - protein, 751 aa, Homo sapiens
MNTVPPPPIPPIPAMPSLPPMPSIPPIPVPPPVPTLPPVPPVPPIPPVPSVPPMTPLPPMSGMPPLNPPPVAPLPAGMNGSGAPMNLNNNLNPMFLGPLNPVNPIQMNSQSSVKPLPINPDDLYVSVHGMPFSAMENDVRDFFHGLRVDAVHLLKDHVGRNNGNGLVKFLSPQDTFEALKRNRMLMIQRYVEVSPATERQWVAAGGHITFKQNMGPSGQTHPPPQTLPRSKSPSGQKRSRSRSPHEAGFCVYLKGLPFEAENKHVIDFFKKLDIVEDSIYIAYGPNGKATGEGFVEFRNEADYKAALCRHKQYMGNRFIQVHPITKKGMLEKIDMIRKRLQNFSYDQREMILNPEGDVNSAKVCAHITNIPFSITKMDVLQFLEGIPVDENAVHVLVDNNGQGLGQALVQFKNEDDARKSERLHRKKLNGREAFVHVVTLEDMREIEKNPPAQGKKGLKMPVPGNPAVPGMPNAGLPGVGLPSAGLPGAGLPSTGLPGSAITSAGLPGAGMPSAGIPSAGGEEHAFLTVGSKEANNGPPFNFPGNFGGSNAFGPPIPPPGLGGGAFGDARPGMPSVGNSGLPGLGLDVPGFGGGPNNLSGPSGFGGGPQNFGNGPGSLGGPPGFGSGPPGLGSAPGHLGGPPAFGPGPGPGPGPGPIHIGGPPGFASSSGKPGPTVIKVQNMPFTVSIDEILDFFYGYQVIPGSVCLKYNEKGMPTGEAMVAFESRDEATAAVIDLNDRPIGSRKVKLVLG

SEQ ID NO: 9695 - DNA, 7153 bp, Homo sapiens
ggccattttgtgaagcggcgaaggaggtggtggctgcgttgggctccgggaagccgttcgggctggggctgtcggccgcggggcggaggcactcgcgcggggggtaattcggggtctgggttctggtgccgcgcagctttccccggtgtgtgtggtttcagcgcagcatggctgtggtcatccgtttgcaaggtctcccaattgtggcggggaccatggacattcgccacttcttctctggattgaccattcctgatgggggcgtgcatattgtagggggtgaactgggtgaggctttcatcgtttttgccactgatgaagatgcaaggcttggtatgatgcgcacaggtggtacaattaaagggtcaaaagtaacactattgttgagtagtaagacggaaatgcagaatatgattgaactgagtcgtaggcgttttgaaactgccaacttagatataccaccagcaaatgccagtagatcaggaccaccacctagctcaggaatgagtagcagggtaaacttgcccacaacagtatccaactttaataatccatcacccagtgtagttactgccaccacttctgttcatgaaagcaacaaaaacatacagacattttccacagccagcgtaggaacagctcctccaaatatgggggcttcctttgggagcccaacgtttagctcaactgttccaagcacagcctctccaatgaacacagtcccgccgccaccaattcctccaattccagcgatgccatctctgccaccaatgccatccattcccccaattccagttcctcctccagtacctacattgcctcctgtgcctcctgtgcccccgattcccccagttccttctgtgccacccatgaccccactgccacccatgtcgggcatgccgcccttgaatccgccacctgtggcacctctacctgctggaatgaatggctctggagcacctatgaatttgaacaataatctgaatcctatgtttcttggtccgttgaatcctgttaaccctatccagatgaactctcagagcagtgtgaagccactccccatcaaccctgatgatctgtatgtcagtgtgcatggaatgcccttttctgcaatggaaaatgatgtcagagatttttttcatgggctccgtgttgatgcagtgcatttgttgaaagatcatgtaggtcgaaataatgggaatggattggttaagtttctctcccctcaagatacatttgaagctttgaaacgaaacagaatgctgatgattcaacgctatgtggaagttagccctgccacagaaagacagtgggtagctgctggaggccatatcacttttaagcaaaatatgggaccttctggacaaactcatccccctcctcagacacttcccaggtcaaaatcgcccagtgggcagaaaagatcaaggtcaagatcaccacatgaggctggtttttgtgtttacttgaaagggctaccatttgaagcagaaaacaaacatgtcattgatttttttaaaaagctggatattgtggaagatagtatttatatagcttatggacccaatgggaaagcaactggcgaaggctttgtagagttcagaaatgaggctgactataaggctgctctgtgtcgtcataaacagtacatgggcaatcgctttattcaagttcatccaattactaagaaaggtatgctagaaaagatagatatgattcgaaaaagactgcagaacttcagctatgaccagagggaaatgatactaaatccagagggggatgtcaactctgccaaagtctgtgcccacataacaaatattccattcagcattacaaagatggatgttcttcagttcctagaaggaatcccagtggatgaaaatgctgtacatgttcttgttgataacaatgggcaaggtctaggacaggcattggttcagtttaaaaatgaagatgatgcacgtaagtctgaacgcttacaccgtaaaaaacttaatgggagagaagcttttgttcatgtagttaccctagaagatatgagagagattgagaaaaatccccctgcccaaggaaaaaagggattaaagatgcctgtgccaggtaatcctgcagttccaggaatgcccaatgcgggactgcccggtgtgggactgcccagtgcaggacttcccggtgcaggcctgcccagcacaggactgcctggttcagcaataaccagtgcaggactgcctggtgcgggaatgcccagtgcaggaatacctagtgcaggaggtgaagagcatgccttcctgactgtaggatcaaaggaagccaataatgggcctccatttaactttcctggtaattttggtggatcaaatgcctttgggccaccaatccctcctccaggattaggaggcggggcctttggtgatgctaggcctggtatgccttcagttggaaacagtggtttgcctggtctaggactggatgttccgggttttggaggtggaccaaacaatttaagtgggccatcgggatttggagggggccctcagaattttggaaatggccctggtagcttaggcggtcccccggggtttggaagtggccctcctggtcttggaagtgcccctgggcatttgggtgggccaccagcttttgggcctggccccggccccggccccggccctggcccaatccatattggtggtccccctggctttgcatctagttctggaaaaccaggaccgacagtaattaaagtgcaaaacatgccctttactgtgtctattgatgagattttagatttcttttatggctatcaagtaatcccaggctcagtgtgtttaaaatacaatgaaaaaggtatgcccacaggtgaagccatggtggcctttgagtctcgggatgaagccacagctgctgtcattgacttaaatgacaggcctataggttcaagaaaagtaaaacttgtattagggtagccattcacatcattttttatagggtagatcttcatattgctgtgattaatgcatccagattgttttcctagtatttccaggttagaacctgtggattgtttcaattgcatatagcttggtttccataacatagagcattggttgactgtttacagaagactcactcaccaggataaacattgctgtatgttacagtaaagctatctggagagaacacataaatgattttggcataccattagagaaaccatttgtaaaactcaaatgaccacataaagcttatcaaggagtctagattggttttgttttataccatatgggatgaagaaaatagaaatgtcagtagaactcattgagggtgctcttgccagctgctgaaaatagaagttggctactctcagaatttggtttaaagctggacagatttgctttgttatagggtaaagctttgtctaaagtcctcattttcttttaaaattgaataaaatttctgtatacagattcattgtatgtacctttattgcttcttaagggtccttgctgtatagacagtcctgcttcagaagttgctgctttgtttgtctaattgactcatttgtaaatgagcagaactgttttgttggtttttttccctaaatataaaagtccacacttcgtttgtgctataacctcaaactttgatttctaatgtcacacttaaaactgtgtggaataagacttttgccataaaaataaactatggagtcctttatctaccagagcctttttggtttgaccgccacgatttaggttagtcagtttaaaaattgttcatgttgtttggatggtatcgaaaaccagaaaccacttttaataatgtgtttaagatacttgatttgaagtccttttcatatggactaattgtagtatcaatttcctcctgtcccgattatgtgaaattttggcctttaaacaaagaggggcccattcataagaaagtgttatatctaggtttttaaaactgaagttgaaattatctttgttagcagtagtagtatagaataaaagatccgtatgctggttcgtagattgatacgtgttagtcctgttatttggaggctttttggcatagttgttcgatcaggagcctgtttactaaaagtcttcatacagagtacaagtgcagccgccagaggagaaaattgagattcttgaccctttcatactcttttctttggtattcaggacactaaggcaggaggaccacatgagttctggttggtaagtgtccttgtcatgaaaacacttgccttacaaggctctaattatgatttccctagtcagtgctctgaagatgtgtcacattatattataaacaatacggaaggggagataggtgagatgatatgaaaaacaaattttctcactgtcataaaaggctctaattatggttactttccttgtgatgaaaaacttggccttacagggctctagttatggttactttccctagtcaatgctctgaaaatgtgtcacattataaacaatacagaaggagagatagatgagagatcatgaaaaccaaattttatcttttacatggcccctttgtcttcgtttgaaacatccccaacatttcctacaaatcagcgtagttacaaaggggtcagtcttttaaaataagtatttcctattaaactatatatatatacagtgcctttttggtgttgtgagtcagtggaacactgaaatacagcggttgtgtaatttaagagtggcaacagtttcatttgataagatttgaaaaggctttttatcactacaatcttagaggattgacagtacaggatttttgtttaagagaaggattgtttagactcaagaggtgactatgttgtgggtcttttgataattcatgaatacagatttgctttgaccgatcactagatactgcctcctcaatttcaaaagcaatataacgtttgtatatgctgtttaatttaagttaatgttaagtaatcatttctcattccaaagacaatgcaaaaaacttcagcactgcttgagagttgtatttcagccacagatattttctccattggaaagctattttcattttagaaaaatgggttgtttgaagatgaaagtcttttatcttttttcacaatttattttggttatatgttcgtacattcttattaaatatttcatacactttattgcaactactttgttatttctacatcttagataaatgctgaaaaggaaaacgatttcattgttcatctaattaaataaattaaaagagcggtttgtgtagaaattggagagaactatgttttatatgaatcacaacagtgctcgttgtggactgtaattaaatgctttgccctctggaacttgatttttgtgtatctgagatttattaacagtgctaactgctaaggatactgtttatcttgttctgggcattggagtttcagtttttaaaaaattcttgaaaatgtattctgtgaaactactcatacctctcttcctgcgaattttctcctaagaactaggtttggggtagaaatgaattgacattattttctcatttgctttgtatggtatgaaggatttgtaaagctttgctcaaagttgtgtgcatttgtaaacactatcatgatattttcaattttatgtgtaaattttattgtctgtttttggtgactctgacattaatggaagagaatattttccattagatttaattttttttcctctcccttctgattttttttttattggtgttcatttttcttttgatttaaaggattagagaaatctacaaatgtatgtcataaataagcaaatttgtaaacttttctgaactttagtgaaacatttagttcacaagcataatttggaggtgtgttctgtgtttacacagtagtttggatgtacaattattattagtggctttttaaaaaatgaaacagtgttaagtgaaatgtagttcctagctttgtactccaagttgtcaaagcatcaacaatgaaaattcgattaggaaactttatttaaaatttcaggtagtaatattcagtgtagttaaggccagtcttaacccactggatgaaaatctaggactgtatggaagtaagcaaacattacatttttaggtggaaatagtcagccttgcataaaaacaaggatgcgtgaaagccttaaattccagctcccttttactggagtctgtggttgtgtacaggtatgggccaagtgtaaaatctcatcaattttaagaacactcgggaaatgagtaaagaaaatgtaaaattgctgctagtcaaatcttttggaaagaatttctggaagtggtcactttaaaaattattttccacccttgcaaaattgccacatttaaattgttttactggcagttctatagtagtccagactttagaaaccaaacacaacaaaatggcttgttgccaatatggccacaacattgccagcaaatactgccttggcatcactcagcagaggtttttgtttataaagatgaagtcttgaatactgttcaataaacttgtcaaaaaataaaacaggctgatgcttttaatgctttaactgcacaaaagtactttactgagctataatattatcttgtcagggtttttgttttgttttgtttttaaacctgaaaatattttgtgcctttggagaggtagatttggtaatcttggagaggtaaaaattgttgcttatccttgcctgctaatgctgaagtgtcaagagaagaggatacttggaacagcagggaggaaacttgattcaagtccatagtatccaccttttcagaattttatgtgtatgatgtgttggcaaacaaagcccttaaatgttgaaaactttttatcttgaaagagtttagcttgtattagaatttggatacccagtgtgttttagagggggctagacatataattccaggtagtagctgagccattattaaataatcgggatttgactaagcaatggacaaatcactgagtgaaatcagctgcctacagatatccaaaatggcttttaccatctgaaaggggtggactgtgtgataatatgtctccttttcttgttcaggagagatcagttatgtaattcattgttacctgctttccagtgttttacagcaagaaatagtttatcaactatgtgcatca

SEQ ID NO: 9696 - protein, 932 aa, Homo sapiens; identical to SEQ ID NO: 1239

SEQ ID NO: 9697 - DNA, 6415 bp, Homo sapiens
ggccattttgtgaagcggcgaaggaggtggtggctgcgttgggctccgggaagccgttcgggctggggctgtcggccgcggggcggaggcactcgcgcggggggtaattcggggtctgggttctggtgccgcgcagctttccccgtctaaaagttggttttaattggttgcccacaggattgacttggcctctacctgctggaatgaatggctctggagcacctatgaatttgaacaataatctgaatcctatgtttcttggtccgttgaatcctgttaaccctatccagatgaactctcagagcagtgtgaagccactccccatcaaccctgatgatctgtatgtcagtgtgcatggaatgcccttttctgcaatggaaaatgatgtcagagatttttttcatgggctccgtgttgatgcagtgcatttgttgaaagatcatgtaggtcgaaataatgggaatggattggttaagtttctctcccctcaagatacatttgaagctttgaaacgaaacagaatgctgatgattcaacgctatgtggaagttagccctgccacagaaagacagtgggtagctgctggaggccatatcacttttaagcaaaatatgggaccttctggacaaactcatccccctcctcagacacttcccaggtcaaaatcgcccagtgggcagaaaagatcaaggtcaagatcaccacatgaggctggtttttgtgtttacttgaaagggctaccatttgaagcagaaaacaaacatgtcattgatttttttaaaaagctggatattgtggaagatagtatttatatagcttatggacccaatgggaaagcaactggcgaaggctttgtagagttcagaaatgaggctgactataaggctgctctgtgtcgtcataaacagtacatgggcaatcgctttattcaagttcatccaattactaagaaaggtatgctagaaaagatagatatgattcgaaaaagactgcagaacttcagctatgaccagagggaaatgatactaaatccagagggggatgtcaactctgccaaagtctgtgcccacataacaaatattccattcagcattacaaagatggatgttcttcagttcctagaaggaatcccagtggatgaaaatgctgtacatgttcttgttgataacaatgggcaaggtctaggacaggcattggttcagtttaaaaatgaagatgatgcacgtaagtctgaacgcttacaccgtaaaaaacttaatgggagagaagcttttgttcatgtagttaccctagaagatatgagagagattgagaaaaatccccctgcccaaggaaaaaagggattaaagatgcctgtgccaggtaatcctgcagttccaggaatgcccaatgcgggactgcccggtgtgggactgcccagtgcaggacttcccggtgcaggcctgcccagcacaggactgcctggttcagcaataaccagtgcaggactgcctggtgcgggaatgcccagtgcaggaatacctagtgcaggaggtgaagagcatgccttcctgactgtaggatcaaaggaagccaataatgggcctccatttaactttcctggtaattttggtggatcaaatgcctttgggccaccaatccctcctccaggattaggaggcggggcctttggtgatgctaggcctggtatgccttcagttggaaacagtggtttgcctggtctaggactggatgttccgggttttggaggtggaccaaacaatttaagtgggccatcgggatttggagggggccctcagaattttggaaatggccctggtagcttaggcggtcccccggggtttggaagtggccctcctggtcttggaagtgcccctgggcatttgggtgggccaccagcttttgggcctggccccggccccggccccggccctggcccaatccatattggtggtccccctggctttgcatctagttctggaaaaccaggaccgacagtaattaaagtgcaaaacatgccctttactgtgtctattgatgagattttagatttcttttatggctatcaagtaatcccaggctcagtgtgtttaaaatacaatgaaaaaggtatgcccacaggtgaagccatggtggcctttgagtctcgggatgaagccacagctgctgtcattgacttaaatgacaggcctataggttcaagaaaagtaaaacttgtattagggtagccattcacatcattttttatagggtagatcttcatattgctgtgattaatgcatccagattgttttcctagtatttccaggttagaacctgtggattgtttcaattgcatatagcttggtttccataacatagagcattggttgactgtttacagaagactcactcaccaggataaacattgctgtatgttacagtaaagctatctggagagaacacataaatgattttggcataccattagagaaaccatttgtaaaactcaaatgaccacataaagcttatcaaggagtctagattggttttgttttataccatatgggatgaagaaaatagaaatgtcagtagaactcattgagggtgctcttgccagctgctgaaaatagaagttggctactctcagaatttggtttaaagctggacagatttgctttgttatagggtaaagctttgtctaaagtcctcattttcttttaaaattgaataaaatttctgtatacagattcattgtatgtacctttattgcttcttaagggtccttgctgtatagacagtcctgcttcagaagttgctgctttgtttgtctaattgactcatttgtaaatgagcagaactgttttgttggtttttttccctaaatataaaagtccacacttcgtttgtgctataacctcaaactttgatttctaatgtcacacttaaaactgtgtggaataagacttttgccataaaaataaactatggagtcctttatctaccagagcctttttggtttgaccgccacgatttaggttagtcagtttaaaaattgttcatgttgtttggatggtatcgaaaaccagaaaccacttttaataatgtgtttaagatacttgatttgaagtccttttcatatggactaattgtagtatcaatttcctcctgtcccgattatgtgaaattttggcctttaaacaaagaggggcccattcataagaaagtgttatatctaggtttttaaaactgaagttgaaattatctttgttagcagtagtagtatagaataaaagatccgtatgctggttcgtagattgatacgtgttagtcctgttatttggaggctttttggcatagttgttcgatcaggagcctgtttactaaaagtcttcatacagagtacaagtgcagccgccagaggagaaaattgagattcttgaccctttcatactcttttctttggtattcaggacactaaggcaggaggaccacatgagttctggttggtaagtgtccttgtcatgaaaacacttgccttacaaggctctaattatgatttccctagtcagtgctctgaagatgtgtcacattatattataaacaatacggaaggggagataggtgagatgatatgaaaaacaaattttctcactgtcataaaaggctctaattatggttactttccttgtgatgaaaaacttggccttacagggctctagttatggttactttccctagtcaatgctctgaaaatgtgtcacattataaacaatacagaaggagagatagatgagagatcatgaaaaccaaattttatcttttacatggcccctttgtcttcgtttgaaacatccccaacatttcctacaaatcagcgtagttacaaaggggtcagtcttttaaaataagtatttcctattaaactatatatatatacagtgcctttttggtgttgtgagtcagtggaacactgaaatacagcggttgtgtaatttaagagtggcaacagtttcatttgataagatttgaaaaggctttttatcactacaatcttagaggattgacagtacaggatttttgtttaagagaaggattgtttagactcaagaggtgactatgttgtgggtcttttgataattcatgaatacagatttgctttgaccgatcactagatactgcctcctcaatttcaaaagcaatataacgtttgtatatgctgtttaatttaagttaatgttaagtaatcatttctcattccaaagacaatgcaaaaaacttcagcactgcttgagagttgtatttcagccacagatattttctccattggaaagctattttcattttagaaaaatgggttgtttgaagatgaaagtcttttatcttttttcacaatttattttggttatatgttcgtacattcttattaaatatttcatacactttattgcaactactttgttatttctacatcttagataaatgctgaaaaggaaaacgatttcattgttcatctaattaaataaattaaaagagcggtttgtgtagaaattggagagaactatgttttatatgaatcacaacagtgctcgttgtggactgtaattaaatgctttgccctctggaacttgatttttgtgtatctgagatttattaacagtgctaactgctaaggatactgtttatcttgttctgggcattggagtttcagtttttaaaaaattcttgaaaatgtattctgtgaaactactcatacctctcttcctgcgaattttctcctaagaactaggtttggggtagaaatgaattgacattattttctcatttgctttgtatggtatgaaggatttgtaaagctttgctcaaagttgtgtgcatttgtaaacactatcatgatattttcaattttatgtgtaaattttattgtctgtttttggtgactctgacattaatggaagagaatattttccattagatttaattttttttcctctcccttctgattttttttttattggtgttcatttttcttttgatttaaaggattagagaaatctacaaatgtatgtcataaataagcaaatttgtaaacttttctgaactttagtgaaacatttagttcacaagcataatttggaggtgtgttctgtgtttacacagtagtttggatgtacaattattattagtggctttttaaaaaatgaaacagtgttaagtgaaatgtagttcctagctttgtactccaagttgtcaaagcatcaacaatgaaaattcgattaggaaactttatttaaaatttcaggtagtaatattcagtgtagttaaggccagtcttaacccactggatgaaaatctaggactgtatggaagtaagcaaacattacatttttaggtggaaatagtcagccttgcataaaaacaaggatgcgtgaaagccttaaattccagctcccttttactggagtctgtggttgtgtacaggtatgggccaagtgtaaaatctcatcaattttaagaacactcgggaaatgagtaaagaaaatgtaaaattgctgctagtcaaatcttttggaaagaatttctggaagtggtcactttaaaaattattttccacccttgcaaaattgccacatttaaattgttttactggcagttctatagtagtccagactttagaaaccaaacacaacaaaatggcttgttgccaatatggccacaacattgccagcaaatactgccttggcatcactcagcagaggtttttgtttataaagatgaagtcttgaatactgttcaataaacttgtcaaaaaataaaacaggctgatgcttttaatgctttaactgcacaaaagtactttactgagctataatattatcttgtcagggtttttgttttgttttgtttttaaacctgaaaatattttgtgcctttggagaggtagatttggtaatcttggagaggtaaaaattgttgcttatccttgcctgctaatgctgaagtgtcaagagaagaggatacttggaacagcagggaggaaacttgattcaagtccatagtatccaccttttcagaattttatgtgtatgatgtgttggcaaacaaagcccttaaatgttgaaaactttttatcttgaaagagtttagcttgtattagaatttggatacccagtgtgttttagagggggctagacatataattccaggtagtagctgagccattattaaataatcgggatttgactaagcaatggacaaatcactgagtgaaatcagctgcctacagatatccaaaatggcttttaccatctgaaaggggtggactgtgtgataatatgtctccttttcttgttcaggagagatcagttatgtaattcattgttacctgctttccagtgttttacagcaagaaatagtttatcaactatgtgcatca

SEQ ID NO: 9698 - protein, 674 aa, Homo sapiens
MNGSGAPMNLNNNLNPMFLGPLNPVNPIQMNSQSSVKPLPINPDDLYVSVHGMPFSAMENDVRDFFHGLRVDAVHLLKDHVGRNNGNGLVKFLSPQDTFEALKRNRMLMIQRYVEVSPATERQWVAAGGHITFKQNMGPSGQTHPPPQTLPRSKSPSGQKRSRSRSPHEAGFCVYLKGLPFEAENKHVIDFFKKLDIVEDSIYIAYGPNGKATGEGFVEFRNEADYKAALCRHKQYMGNRFIQVHPITKKGMLEKIDMIRKRLQNFSYDQREMILNPEGDVNSAKVCAHITNIPFSITKMDVLQFLEGIPVDENAVHVLVDNNGQGLGQALVQFKNEDDARKSERLHRKKLNGREAFVHVVTLEDMREIEKNPPAQGKKGLKMPVPGNPAVPGMPNAGLPGVGLPSAGLPGAGLPSTGLPGSAITSAGLPGAGMPSAGIPSAGGEEHAFLTVGSKEANNGPPFNFPGNFGGSNAFGPPIPPPGLGGGAFGDARPGMPSVGNSGLPGLGLDVPGFGGGPNNLSGPSGFGGGPQNFGNGPGSLGGPPGFGSGPPGLGSAPGHLGGPPAFGPGPGPGPGPGPIHIGGPPGFASSSGKPGPTVIKVQNMPFTVSIDEILDFFYGYQVIPGSVCLKYNEKGMPTGEAMVAFESRDEATAAVIDLNDRPIGSRKVKLVLG

SEQ ID NO: 9699 - DNA, 6136 bp, Homo sapiens
ggaacgcggagccgctgagcgggccgacggccattttgtgaagcggcgaaggaggtggtggctgcgttgggctccgggaagccgttcgggctggggctgtcggccgcggggcggaggcactcgcgcgggggtctaaaagttggttttaattggttgcccacaggattgacttggcctctacttcttgttaaggaaattcatctcttgttttatcaggtgtgtgtggtttcagcgcagcatggctgtggtcatccgtttgcaaggtctcccaattgtggcggggaccatggacattcgccacttcttctctggattgaccattcctgatgggggcgtgcatattgtagggggtgaactgggtgaggctttcatcgtttttgccactgatgaagatgcaaggcttggtatgatgcgcacaggtggtacaattaaagggtcaaaagtaacactattgttgagtagtaagacggaaatgcagaatatgattgaactgattttttaaaaagctggatattgtggaagatagtatttatatagcttatggacccaatgggaaagcaactggcgaaggctttgtagagttcagaaatgaggctgactataaggctgctctgtgtcgtcataaacagtacatgggcaatcgctttattcaagttcatccaattactaagaaaggtatgctagaaaagatagatatgattcgaaaaagactgcagaacttcagctatgaccagagggaaatgatactaaatccagagggggatgtcaactctgccaaagtctgtgcccacataacaaatattccattcagcattacaaagatggatgttcttcagttcctagaaggaatcccagtggatgaaaatgctgtacatgttcttgttgataacaatgggcaaggtctaggacaggcattggttcagtttaaaaatgaagatgatgcacgtaagtctgaacgcttacaccgtaaaaaacttaatgggagagaagcttttgttcatgtagttaccctagaagatatgagagagattgagaaaaatccccctgcccaaggaaaaaagggattaaagatgcctgtgccaggtaatcctgcagttccaggaatgcccaatgcgggactgcccggtgtgggactgcccagtgcaggacttcccggtgcaggcctgcccagcacaggactgcctggttcagcaataaccagtgcaggactgcctggtgcgggaatgcccagtgcaggaatacctagtgcaggaggtgaagagcatgccttcctgactgtaggatcaaaggaagccaataatgggcctccatttaactttcctggtaattttggtggatcaaatgcctttgggccaccaatccctcctccaggattaggaggcggggcctttggtgatgctaggcctggtatgccttcagttggaaacagtggtttgcctggtctaggactggatgttccgggttttggaggtggaccaaacaatttaagtgggccatcgggatttggagggggccctcagaattttggaaatggccctggtagcttaggcggtcccccggggtttggaagtggccctcctggtcttggaagtgcccctgggcatttgggtgggccaccagcttttgggcctggccccggccccggccccggccctggcccaatccatattggtggtccccctggctttgcatctagttctggaaaaccaggaccgacagtaattaaagtgcaaaacatgccctttactgtgtctattgatgagattttagatttcttttatggctatcaagtaatcccaggctcagtgtgtttaaaatacaatgaaaaaggtatgcccacaggtgaagccatggtggcctttgagtctcgggatgaagccacagctgctgtcattgacttaaatgacaggcctataggttcaagaaaagtaaaacttgtattagggtagccattcacatcattttttatagggtagatcttcatattgctgtgattaatgcatccagattgttttcctagtatttccaggttagaacctgtggattgtttcaattgcatatagcttggtttccataacatagagcattggttgactgtttacagaagactcactcaccaggataaacattgctgtatgttacagtaaagctatctggagagaacacataaatgattttggcataccattagagaaaccatttgtaaaactcaaatgaccacataaagcttatcaaggagtctagattggttttgttttataccatatgggatgaagaaaatagaaatgtcagtagaactcattgagggtgctcttgccagctgctgaaaatagaagttggctactctcagaatttggtttaaagctggacagatttgctttgttatagggtaaagctttgtctaaagtcctcattttcttttaaaattgaataaaatttctgtatacagattcattgtatgtacctttattgcttcttaagggtccttgctgtatagacagtcctgcttcagaagttgctgctttgtttgtctaattgactcatttgtaaatgagcagaactgttttgttggtttttttccctaaatataaaagtccacacttcgtttgtgctataacctcaaactttgatttctaatgtcacacttaaaactgtgtggaataagacttttgccataaaaataaactatggagtcctttatctaccagagcctttttggtttgaccgccacgatttaggttagtcagtttaaaaattgttcatgttgtttggatggtatcgaaaaccagaaaccacttttaataatgtgtttaagatacttgatttgaagtccttttcatatggactaattgtagtatcaatttcctcctgtcccgattatgtgaaattttggcctttaaacaaagaggggcccattcataagaaagtgttatatctaggtttttaaaactgaagttgaaattatctttgttagcagtagtagtatagaataaaagatccgtatgctggttcgtagattgatacgtgttagtcctgttatttggaggctttttggcatagttgttcgatcaggagcctgtttactaaaagtcttcatacagagtacaagtgcagccgccagaggagaaaattgagattcttgaccctttcatactcttttctttggtattcaggacactaaggcaggaggaccacatgagttctggttggtaagtgtccttgtcatgaaaacacttgccttacaaggctctaattatgatttccctagtcagtgctctgaagatgtgtcacattatattataaacaatacggaaggggagataggtgagatgatatgaaaaacaaattttctcactgtcataaaaggctctaattatggttactttccttgtgatgaaaaacttggccttacagggctctagttatggttactttccctagtcaatgctctgaaaatgtgtcacattataaacaatacagaaggagagatagatgagagatcatgaaaaccaaattttatcttttacatggcccctttgtcttcgtttgaaacatccccaacatttcctacaaatcagcgtagttacaaaggggtcagtcttttaaaataagtatttcctattaaactatatatatatacagtgcctttttggtgttgtgagtcagtggaacactgaaatacagcggttgtgtaatttaagagtggcaacagtttcatttgataagatttgaaaaggctttttatcactacaatcttagaggattgacagtacaggatttttgtttaagagaaggattgtttagactcaagaggtgactatgttgtgggtcttttgataattcatgaatacagatttgctttgaccgatcactagatactgcctcctcaatttcaaaagcaatataacgtttgtatatgctgtttaatttaagttaatgttaagtaatcatttctcattccaaagacaatgcaaaaaacttcagcactgcttgagagttgtatttcagccacagatattttctccattggaaagctattttcattttagaaaaatgggttgtttgaagatgaaagtcttttatcttttttcacaatttattttggttatatgttcgtacattcttattaaatatttcatacactttattgcaactactttgttatttctacatcttagataaatgctgaaaaggaaaacgatttcattgttcatctaattaaataaattaaaagagcggtttgtgtagaaattggagagaactatgttttatatgaatcacaacagtgctcgttgtggactgtaattaaatgctttgccctctggaacttgatttttgtgtatctgagatttattaacagtgctaactgctaaggatactgtttatcttgttctgggcattggagtttcagtttttaaaaaattcttgaaaatgtattctgtgaaactactcatacctctcttcctgcgaattttctcctaagaactaggtttggggtagaaatgaattgacattattttctcatttgctttgtatggtatgaaggatttgtaaagctttgctcaaagttgtgtgcatttgtaaacactatcatgatattttcaattttatgtgtaaattttattgtctgtttttggtgactctgacattaatggaagagaatattttccattagatttaattttttttcctctcccttctgattttttttttattggtgttcatttttcttttgatttaaaggattagagaaatctacaaatgtatgtcataaataagcaaatttgtaaacttttctgaactttagtgaaacatttagttcacaagcataatttggaggtgtgttctgtgtttacacagtagtttggatgtacaattattattagtggctttttaaaaaatgaaacagtgttaagtgaaatgtagttcctagctttgtactccaagttgtcaaagcatcaacaatgaaaattcgattaggaaactttatttaaaatttcaggtagtaatattcagtgtagttaaggccagtcttaacccactggatgaaaatctaggactgtatggaagtaagcaaacattacatttttaggtggaaatagtcagccttgcataaaaacaaggatgcgtgaaagccttaaattccagctcccttttactggagtctgtggttgtgtacaggtatgggccaagtgtaaaatctcatcaattttaagaacactcgggaaatgagtaaagaaaatgtaaaattgctgctagtcaaatcttttggaaagaatttctggaagtggtcactttaaaaattattttccacccttgcaaaattgccacatttaaattgttttactggcagttctatagtagtccagactttagaaaccaaacacaacaaaatggcttgttgccaatatggccacaacattgccagcaaatactgccttggcatcactcagcagaggtttttgtttataaagatgaagtcttgaatactgttcaataaacttgtcaaaaaataaaacaggctgatgcttttaatgctttaactgcacaaaagtactttactgagctataatattatcttgtcagggtttttgttttgttttgtttttaaacctgaaaatattttgtgcctttggagaggtagatttggtaatcttggagaggtaaaaattgttgcttatccttgcctgctaatgctgaagtgtcaagagaagaggatacttggaacagcagggaggaaacttgattcaagtccatagtatccaccttttcagaattttatgtgtatgatgtgttggcaaacaaagcccttaaatgttgaaaactttttatcttgaaagagtttagcttgtattagaatttggatacccagtgtgttttagagggggctagacatataattccaggtagtagctgagccattattaaataatcgggatttgactaagcaatggacaaatcactgagtgaaatcagctgcctacagatatccaaaatggcttttaccatctgaaaggggtggactgtgtgataatatgtctccttttcttgttcaggagagatcagttatgtaattcattgttacctgctttccagtgttttacagcaagaaatagtttatcaactatgtgcatca

SEQ ID NO: 9700 - protein, 87 aa, Homo sapiens
MAVVIRLQGLPIVAGTMDIRHFFSGLTIPDGGVHIVGGELGEAFIVFATDEDARLGMMRTGGTIKGSKVTLLLSSKTEMQNMIELIF

SEQ ID NO: 9701 - DNA, 7225 bp, Homo sapiens
tggaacgcggagccgctgagcgggccgacggccattttgtgaagcggcgaaggaggtggtggctgcgttgggctccgggaagccgttcgggctggggctgtcggccgcggggcggaggcactcgcgcgggggtctaaaagttggttttaattggttgcccacaggattgacttggcctctacttcttgttaaggaaattcatctcttgttttatcaggtgtgtgtggtttcagcgcagcatggctgtggtcatccgtttgcaaggtctcccaattgtggcggggaccatggacattcgccacttcttctctggattgaccattcctgatgggggcgtgcatattgtagggggtgaactgggtgaggctttcatcgtttttgccactgatgaagatgcaaggcttggtatgatgcgcacaggtggtacaattaaagggtcaaaagtaacactattgttgagtagtaagacggaaatgcagaatatgattgaactgagtcgtaggcgttttgaaactgccaacttagatataccaccagcaaatgccagtagatcaggaccaccacctagctcaggaatgagtagcagggtaaacttgcccacaacagtatccaactttaataatccatcacccagtgtagttactgccaccacttctgttcatgaaagcaacaaaaacatacagacattttccacagccagcgtaggaacagctcctccaaatatgggggcttcctttgggagcccaacgtttagctcaactgttccaagcacagcctctccaatgaacacagtcccgccgccaccaattcctccaattccagcgatgccatctctgccaccaatgccatccattcccccaattccagttcctcctccagtacctacattgcctcctgtgcctcctgtgcccccgattcccccagttccttctgtgccacccatgaccccactgccacccatgtcgggcatgccgcccttgaatccgccacctgtggcacctctacctgctggaatgaatggctctggagcacctatgaatttgaacaataatctgaatcctatgtttcttggtccgttgaatcctgttaaccctatccagatgaactctcagagcagtgtgaagccactccccatcaaccctgatgatctgtatgtcagtgtgcatggaatgcccttttctgcaatggaaaatgatgtcagagatttttttcatgggctccgtgttgatgcagtgcatttgttgaaagatcatgtaggtcgaaataatgggaatggattggttaagtttctctcccctcaagatacatttgaagctttgaaacgaaacagaatgctgatgattcaacgctatgtggaagttagccctgccacagaaagacagtgggtagctgctggaggccatatcacttttaagcaaaatatgggaccttctggacaaactcatccccctcctcagacacttcccaggtcaaaatcgcccagtgggcagaaaagatcaaggtcaagatcaccacatgaggctggtttttgtgtttacttgaaagggctaccatttgaagcagaaaacaaacatgtcattgatttttttaaaaagctggatattgtggaagatagtatttatatagcttatggacccaatgggaaagcaactggcgaaggctttgtagagttcagaaatgaggctgactataaggctgctctgtgtcgtcataaacagtacatgggcaatcgctttattcaagttcatccaattactaagaaaggtatgctagaaaagatagatatgattcgaaaaagactgcagaacttcagctatgaccagagggaaatgatactaaatccagagggggatgtcaactctgccaaagtctgtgcccacataacaaatattccattcagcattacaaagatggatgttcttcagttcctagaaggaatcccagtggatgaaaatgctgtacatgttcttgttgataacaatgggcaaggtctaggacaggcattggttcagtttaaaaatgaagatgatgcacgtaagtctgaacgcttacaccgtaaaaaacttaatgggagagaagcttttgttcatgtagttaccctagaagatatgagagagattgagaaaaatccccctgcccaaggaaaaaagggattaaagatgcctgtgccaggtaatcctgcagttccaggaatgcccaatgcgggactgcccggtgtgggactgcccagtgcaggacttcccggtgcaggcctgcccagcacaggactgcctggttcagcaataaccagtgcaggactgcctggtgcgggaatgcccagtgcaggaatacctagtgcaggaggtgaagagcatgccttcctgactgtaggatcaaaggaagccaataatgggcctccatttaactttcctggtaattttggtggatcaaatgcctttgggccaccaatccctcctccaggattaggaggcggggcctttggtgatgctaggcctggtatgccttcagttggaaacagtggtttgcctggtctaggactggatgttccgggttttggaggtggaccaaacaatttaagtgggccatcgggatttggagggggccctcagaattttggaaatggccctggtagcttaggcggtcccccggggtttggaagtggccctcctggtcttggaagtgcccctgggcatttgggtgggccaccagcttttgggcctggccccggccccggccccggccctggcccaatccatattggtggtccccctggctttgcatctagttctggaaaaccaggaccgacagtaattaaagtgcaaaacatgccctttactgtgtctattgatgagattttagatttcttttatggctatcaagtaatcccaggctcagtgtgtttaaaatacaatgaaaaaggtatgcccacaggtgaagccatggtggcctttgagtctcgggatgaagccacagctgctgtcattgacttaaatgacaggcctataggttcaagaaaagtaaaacttgtattagggtagccattcacatcattttttatagggtagatcttcatattgctgtgattaatgcatccagattgttttcctagtatttccaggttagaacctgtggattgtttcaattgcatatagcttggtttccataacatagagcattggttgactgtttacagaagactcactcaccaggataaacattgctgtatgttacagtaaagctatctggagagaacacataaatgattttggcataccattagagaaaccatttgtaaaactcaaatgaccacataaagcttatcaaggagtctagattggttttgttttataccatatgggatgaagaaaatagaaatgtcagtagaactcattgagggtgctcttgccagctgctgaaaatagaagttggctactctcagaatttggtttaaagctggacagatttgctttgttatagggtaaagctttgtctaaagtcctcattttcttttaaaattgaataaaatttctgtatacagattcattgtatgtacctttattgcttcttaagggtccttgctgtatagacagtcctgcttcagaagttgctgctttgtttgtctaattgactcatttgtaaatgagcagaactgttttgttggtttttttccctaaatataaaagtccacacttcgtttgtgctataacctcaaactttgatttctaatgtcacacttaaaactgtgtggaataagacttttgccataaaaataaactatggagtcctttatctaccagagcctttttggtttgaccgccacgatttaggttagtcagtttaaaaattgttcatgttgtttggatggtatcgaaaaccagaaaccacttttaataatgtgtttaagatacttgatttgaagtccttttcatatggactaattgtagtatcaatttcctcctgtcccgattatgtgaaattttggcctttaaacaaagaggggcccattcataagaaagtgttatatctaggtttttaaaactgaagttgaaattatctttgttagcagtagtagtatagaataaaagatccgtatgctggttcgtagattgatacgtgttagtcctgttatttggaggctttttggcatagttgttcgatcaggagcctgtttactaaaagtcttcatacagagtacaagtgcagccgccagaggagaaaattgagattcttgaccctttcatactcttttctttggtattcaggacactaaggcaggaggaccacatgagttctggttggtaagtgtccttgtcatgaaaacacttgccttacaaggctctaattatgatttccctagtcagtgctctgaagatgtgtcacattatattataaacaatacggaaggggagataggtgagatgatatgaaaaacaaattttctcactgtcataaaaggctctaattatggttactttccttgtgatgaaaaacttggccttacagggctctagttatggttactttccctagtcaatgctctgaaaatgtgtcacattataaacaatacagaaggagagatagatgagagatcatgaaaaccaaattttatcttttacatggcccctttgtcttcgtttgaaacatccccaacatttcctacaaatcagcgtagttacaaaggggtcagtcttttaaaataagtatttcctattaaactatatatatatacagtgcctttttggtgttgtgagtcagtggaacactgaaatacagcggttgtgtaatttaagagtggcaacagtttcatttgataagatttgaaaaggctttttatcactacaatcttagaggattgacagtacaggatttttgtttaagagaaggattgtttagactcaagaggtgactatgttgtgggtcttttgataattcatgaatacagatttgctttgaccgatcactagatactgcctcctcaatttcaaaagcaatataacgtttgtatatgctgtttaatttaagttaatgttaagtaatcatttctcattccaaagacaatgcaaaaaacttcagcactgcttgagagttgtatttcagccacagatattttctccattggaaagctattttcattttagaaaaatgggttgtttgaagatgaaagtcttttatcttttttcacaatttattttggttatatgttcgtacattcttattaaatatttcatacactttattgcaactactttgttatttctacatcttagataaatgctgaaaaggaaaacgatttcattgttcatctaattaaataaattaaaagagcggtttgtgtagaaattggagagaactatgttttatatgaatcacaacagtgctcgttgtggactgtaattaaatgctttgccctctggaacttgatttttgtgtatctgagatttattaacagtgctaactgctaaggatactgtttatcttgttctgggcattggagtttcagtttttaaaaaattcttgaaaatgtattctgtgaaactactcatacctctcttcctgcgaattttctcctaagaactaggtttggggtagaaatgaattgacattattttctcatttgctttgtatggtatgaaggatttgtaaagctttgctcaaagttgtgtgcatttgtaaacactatcatgatattttcaattttatgtgtaaattttattgtctgtttttggtgactctgacattaatggaagagaatattttccattagatttaattttttttcctctcccttctgattttttttttattggtgttcatttttcttttgatttaaaggattagagaaatctacaaatgtatgtcataaataagcaaatttgtaaacttttctgaactttagtgaaacatttagttcacaagcataatttggaggtgtgttctgtgtttacacagtagtttggatgtacaattattattagtggctttttaaaaaatgaaacagtgttaagtgaaatgtagttcctagctttgtactccaagttgtcaaagcatcaacaatgaaaattcgattaggaaactttatttaaaatttcaggtagtaatattcagtgtagttaaggccagtcttaacccactggatgaaaatctaggactgtatggaagtaagcaaacattacatttttaggtggaaatagtcagccttgcataaaaacaaggatgcgtgaaagccttaaattccagctcccttttactggagtctgtggttgtgtacaggtatgggccaagtgtaaaatctcatcaattttaagaacactcgggaaatgagtaaagaaaatgtaaaattgctgctagtcaaatcttttggaaagaatttctggaagtggtcactttaaaaattattttccacccttgcaaaattgccacatttaaattgttttactggcagttctatagtagtccagactttagaaaccaaacacaacaaaatggcttgttgccaatatggccacaacattgccagcaaatactgccttggcatcactcagcagaggtttttgtttataaagatgaagtcttgaatactgttcaataaacttgtcaaaaaataaaacaggctgatgcttttaatgctttaactgcacaaaagtactttactgagctataatattatcttgtcagggtttttgttttgttttgtttttaaacctgaaaatattttgtgcctttggagaggtagatttggtaatcttggagaggtaaaaattgttgcttatccttgcctgctaatgctgaagtgtcaagagaagaggatacttggaacagcagggaggaaacttgattcaagtccatagtatccaccttttcagaattttatgtgtatgatgtgttggcaaacaaagcccttaaatgttgaaaactttttatcttgaaagagtttagcttgtattagaatttggatacccagtgtgttttagagggggctagacatataattccaggtagtagctgagccattattaaataatcgggatttgactaagcaatggacaaatcactgagtgaaatcagctgcctacagatatccaaaatggcttttaccatctgaaaggggtggactgtgtgataatatgtctccttttcttgttcaggagagatcagttatgtaattcattgttacctgctttccagtgttttacagcaagaaatagtttatcaactatgtgcatca

SEQ ID NO: 9702 - protein, 932 aa, Homo sapiens; identical to SEQ ID NO: 1239

SEQ ID NO: 9703 - DNA, 7271 bp, Homo sapiens
cttctggaacgcggagccgctgagcgggccgacggccattttgtgaagcggcgaaggaggtggtggctgcgttgggctccgggaagccgttcgggctggggctgtcggccgcggggcggaggcactcgcgcggggggtaattcggggtctgggttctggtgccgcgcagctttccccgtctaaaagttggttttaattggttgcccacaggattgacttggcctctacttcttgttaaggaaattcatctcttgttttatcaggtgtgtgtggtttcagcgcagcatggctgtggtcatccgtttgcaaggtctcccaattgtggcggggaccatggacattcgccacttcttctctggattgaccattcctgatgggggcgtgcatattgtagggggtgaactgggtgaggctttcatcgtttttgccactgatgaagatgcaaggcttggtatgatgcgcacaggtggtacaattaaagggtcaaaagtaacactattgttgagtagtaagacggaaatgcagaatatgattgaactgagtcgtaggcgttttgaaactgccaacttagatataccaccagcaaatgccagtagatcaggaccaccacctagctcaggaatgagtagcagggtaaacttgcccacaacagtatccaactttaataatccatcacccagtgtagttactgccaccacttctgttcatgaaagcaacaaaaacatacagacattttccacagccagcgtaggaacagctcctccaaatatgggggcttcctttgggagcccaacgtttagctcaactgttccaagcacagcctctccaatgaacacagtcccgccgccaccaattcctccaattccagcgatgccatctctgccaccaatgccatccattcccccaattccagttcctcctccagtacctacattgcctcctgtgcctcctgtgcccccgattcccccagttccttctgtgccacccatgaccccactgccacccatgtcgggcatgccgcccttgaatccgccacctgtggcacctctacctgctggaatgaatggctctggagcacctatgaatttgaacaataatctgaatcctatgtttcttggtccgttgaatcctgttaaccctatccagatgaactctcagagcagtgtgaagccactccccatcaaccctgatgatctgtatgtcagtgtgcatggaatgcccttttctgcaatggaaaatgatgtcagagatttttttcatgggctccgtgttgatgcagtgcatttgttgaaagatcatgtaggtcgaaataatgggaatggattggttaagtttctctcccctcaagatacatttgaagctttgaaacgaaacagaatgctgatgattcaacgctatgtggaagttagccctgccacagaaagacagtgggtagctgctggaggccatatcacttttaagcaaaatatgggaccttctggacaaactcatccccctcctcagacacttcccaggtcaaaatcgcccagtgggcagaaaagatcaaggtcaagatcaccacatgaggctggtttttgtgtttacttgaaagggctaccatttgaagcagaaaacaaacatgtcattgatttttttaaaaagctggatattgtggaagatagtatttatatagcttatggacccaatgggaaagcaactggcgaaggctttgtagagttcagaaatgaggctgactataaggctgctctgtgtcgtcataaacagtacatgggcaatcgctttattcaagttcatccaattactaagaaaggtatgctagaaaagatagatatgattcgaaaaagactgcagaacttcagctatgaccagagggaaatgatactaaatccagagggggatgtcaactctgccaaagtctgtgcccacataacaaatattccattcagcattacaaagatggatgttcttcagttcctagaaggaatcccagtggatgaaaatgctgtacatgttcttgttgataacaatgggcaaggtctaggacaggcattggttcagtttaaaaatgaagatgatgcacgtaagtctgaacgcttacaccgtaaaaaacttaatgggagagaagcttttgttcatgtagttaccctagaagatatgagagagattgagaaaaatccccctgcccaaggaaaaaagggattaaagatgcctgtgccaggtaatcctgcagttccaggaatgcccaatgcgggactgcccggtgtgggactgcccagtgcaggacttcccggtgcaggcctgcccagcacaggactgcctggttcagcaataaccagtgcaggactgcctggtgcgggaatgcccagtgcaggaatacctagtgcaggaggtgaagagcatgccttcctgactgtaggatcaaaggaagccaataatgggcctccatttaactttcctggtaattttggtggatcaaatgcctttgggccaccaatccctcctccaggattaggaggcggggcctttggtgatgctaggcctggtatgccttcagttggaaacagtggtttgcctggtctaggactggatgttccgggttttggaggtggaccaaacaatttaagtgggccatcgggatttggagggggccctcagaattttggaaatggccctggtagcttaggcggtcccccggggtttggaagtggccctcctggtcttggaagtgcccctgggcatttgggtgggccaccagcttttgggcctggccccggccccggccccggccctggcccaatccatattggtggtccccctggctttgcatctagttctggaaaaccaggaccgacagtaattaaagtgcaaaacatgccctttactgtgtctattgatgagattttagatttcttttatggctatcaagtaatcccaggctcagtgtgtttaaaatacaatgaaaaaggtatgcccacaggtgaagccatggtggcctttgagtctcgggatgaagccacagctgctgtcattgacttaaatgacaggcctataggttcaagaaaagtaaaacttgtattagggtagccattcacatcattttttatagggtagatcttcatattgctgtgattaatgcatccagattgttttcctagtatttccaggttagaacctgtggattgtttcaattgcatatagcttggtttccataacatagagcattggttgactgtttacagaagactcactcaccaggataaacattgctgtatgttacagtaaagctatctggagagaacacataaatgattttggcataccattagagaaaccatttgtaaaactcaaatgaccacataaagcttatcaaggagtctagattggttttgttttataccatatgggatgaagaaaatagaaatgtcagtagaactcattgagggtgctcttgccagctgctgaaaatagaagttggctactctcagaatttggtttaaagctggacagatttgctttgttatagggtaaagctttgtctaaagtcctcattttcttttaaaattgaataaaatttctgtatacagattcattgtatgtacctttattgcttcttaagggtccttgctgtatagacagtcctgcttcagaagttgctgctttgtttgtctaattgactcatttgtaaatgagcagaactgttttgttggtttttttccctaaatataaaagtccacacttcgtttgtgctataacctcaaactttgatttctaatgtcacacttaaaactgtgtggaataagacttttgccataaaaataaactatggagtcctttatctaccagagcctttttggtttgaccgccacgatttaggttagtcagtttaaaaattgttcatgttgtttggatggtatcgaaaaccagaaaccacttttaataatgtgtttaagatacttgatttgaagtccttttcatatggactaattgtagtatcaatttcctcctgtcccgattatgtgaaattttggcctttaaacaaagaggggcccattcataagaaagtgttatatctaggtttttaaaactgaagttgaaattatctttgttagcagtagtagtatagaataaaagatccgtatgctggttcgtagattgatacgtgttagtcctgttatttggaggctttttggcatagttgttcgatcaggagcctgtttactaaaagtcttcatacagagtacaagtgcagccgccagaggagaaaattgagattcttgaccctttcatactcttttctttggtattcaggacactaaggcaggaggaccacatgagttctggttggtaagtgtccttgtcatgaaaacacttgccttacaaggctctaattatgatttccctagtcagtgctctgaagatgtgtcacattatattataaacaatacggaaggggagataggtgagatgatatgaaaaacaaattttctcactgtcataaaaggctctaattatggttactttccttgtgatgaaaaacttggccttacagggctctagttatggttactttccctagtcaatgctctgaaaatgtgtcacattataaacaatacagaaggagagatagatgagagatcatgaaaaccaaattttatcttttacatggcccctttgtcttcgtttgaaacatccccaacatttcctacaaatcagcgtagttacaaaggggtcagtcttttaaaataagtatttcctattaaactatatatatatacagtgcctttttggtgttgtgagtcagtggaacactgaaatacagcggttgtgtaatttaagagtggcaacagtttcatttgataagatttgaaaaggctttttatcactacaatcttagaggattgacagtacaggatttttgtttaagagaaggattgtttagactcaagaggtgactatgttgtgggtcttttgataattcatgaatacagatttgctttgaccgatcactagatactgcctcctcaatttcaaaagcaatataacgtttgtatatgctgtttaatttaagttaatgttaagtaatcatttctcattccaaagacaatgcaaaaaacttcagcactgcttgagagttgtatttcagccacagatattttctccattggaaagctattttcattttagaaaaatgggttgtttgaagatgaaagtcttttatcttttttcacaatttattttggttatatgttcgtacattcttattaaatatttcatacactttattgcaactactttgttatttctacatcttagataaatgctgaaaaggaaaacgatttcattgttcatctaattaaataaattaaaagagcggtttgtgtagaaattggagagaactatgttttatatgaatcacaacagtgctcgttgtggactgtaattaaatgctttgccctctggaacttgatttttgtgtatctgagatttattaacagtgctaactgctaaggatactgtttatcttgttctgggcattggagtttcagtttttaaaaaattcttgaaaatgtattctgtgaaactactcatacctctcttcctgcgaattttctcctaagaactaggtttggggtagaaatgaattgacattattttctcatttgctttgtatggtatgaaggatttgtaaagctttgctcaaagttgtgtgcatttgtaaacactatcatgatattttcaattttatgtgtaaattttattgtctgtttttggtgactctgacattaatggaagagaatattttccattagatttaattttttttcctctcccttctgattttttttttattggtgttcatttttcttttgatttaaaggattagagaaatctacaaatgtatgtcataaataagcaaatttgtaaacttttctgaactttagtgaaacatttagttcacaagcataatttggaggtgtgttctgtgtttacacagtagtttggatgtacaattattattagtggctttttaaaaaatgaaacagtgttaagtgaaatgtagttcctagctttgtactccaagttgtcaaagcatcaacaatgaaaattcgattaggaaactttatttaaaatttcaggtagtaatattcagtgtagttaaggccagtcttaacccactggatgaaaatctaggactgtatggaagtaagcaaacattacatttttaggtggaaatagtcagccttgcataaaaacaaggatgcgtgaaagccttaaattccagctcccttttactggagtctgtggttgtgtacaggtatgggccaagtgtaaaatctcatcaattttaagaacactcgggaaatgagtaaagaaaatgtaaaattgctgctagtcaaatcttttggaaagaatttctggaagtggtcactttaaaaattattttccacccttgcaaaattgccacatttaaattgttttactggcagttctatagtagtccagactttagaaaccaaacacaacaaaatggcttgttgccaatatggccacaacattgccagcaaatactgccttggcatcactcagcagaggtttttgtttataaagatgaagtcttgaatactgttcaataaacttgtcaaaaaataaaacaggctgatgcttttaatgctttaactgcacaaaagtactttactgagctataatattatcttgtcagggtttttgttttgttttgtttttaaacctgaaaatattttgtgcctttggagaggtagatttggtaatcttggagaggtaaaaattgttgcttatccttgcctgctaatgctgaagtgtcaagagaagaggatacttggaacagcagggaggaaacttgattcaagtccatagtatccaccttttcagaattttatgtgtatgatgtgttggcaaacaaagcccttaaatgttgaaaactttttatcttgaaagagtttagcttgtattagaatttggatacccagtgtgttttagagggggctagacatataattccaggtagtagctgagccattattaaataatcgggatttgactaagcaatggacaaatcactgagtgaaatcagctgcctacagatatccaaaatggcttttaccatctgaaaggggtggactgtgtgataatatgtctccttttcttgttcaggagagatcagttatgtaattcattgttacctgctttccagtgttttacagcaagaaatagtttatcaactatgtgcatca

SEQ ID NO: 9704 - protein, 932 aa, Homo sapiens; identical to SEQ ID NO: 1239

SEQ ID NO: 9705 - DNA, 7139 bp, Homo sapiens
aaccacgccgttcctcccccttctggaacgcggagccgctgagcgggccgacggccattttgtgaagcggcgaaggaggattgacttggcctctacttcttgttaaggaaattcatctcttgttttatcaggtgtgtgtggtttcagcgcagcatggctgtggtcatccgtttgcaaggtctcccaattgtggcggggaccatggacattcgccacttcttctctggattgaccattcctgatgggggcgtgcatattgtagggggtgaactgggtgaggctttcatcgtttttgccactgatgaagatgcaaggcttggtatgatgcgcacaggtggtacaattaaagggtcaaaagtaacactattgttgagtagtaagacggaaatgcagaatatgattgaactgagtcgtaggcgttttgaaactgccaacttagatataccaccagcaaatgccagtagatcaggaccaccacctagctcaggaatgagtagcagggtaaacttgcccacaacagtatccaactttaataatccatcacccagtgtagttactgccaccacttctgttcatgaaagcaacaaaaacatacagacattttccacagccagcgtaggaacagctcctccaaatatgggggcttcctttgggagcccaacgtttagctcaactgttccaagcacagcctctccaatgaacacagtcccgccgccaccaattcctccaattccagcgatgccatctctgccaccaatgccatccattcccccaattccagttcctcctccagtacctacattgcctcctgtgcctcctgtgcccccgattcccccagttccttctgtgccacccatgaccccactgccacccatgtcgggcatgccgcccttgaatccgccacctgtggcacctctacctgctggaatgaatggctctggagcacctatgaatttgaacaataatctgaatcctatgtttcttggtccgttgaatcctgttaaccctatccagatgaactctcagagcagtgtgaagccactccccatcaaccctgatgatctgtatgtcagtgtgcatggaatgcccttttctgcaatggaaaatgatgtcagagatttttttcatgggctccgtgttgatgcagtgcatttgttgaaagatcatgtaggtcgaaataatgggaatggattggttaagtttctctcccctcaagatacatttgaagctttgaaacgaaacagaatgctgatgattcaacgctatgtggaagttagccctgccacagaaagacagtgggtagctgctggaggccatatcacttttaagcaaaatatgggaccttctggacaaactcatccccctcctcagacacttcccaggtcaaaatcgcccagtgggcagaaaagatcaaggtcaagatcaccacatgaggctggtttttgtgtttacttgaaagggctaccatttgaagcagaaaacaaacatgtcattgatttttttaaaaagctggatattgtggaagatagtatttatatagcttatggacccaatgggaaagcaactggcgaaggctttgtagagttcagaaatgaggctgactataaggctgctctgtgtcgtcataaacagtacatgggcaatcgctttattcaagttcatccaattactaagaaaggtatgctagaaaagatagatatgattcgaaaaagactgcagaacttcagctatgaccagagggaaatgatactaaatccagagggggatgtcaactctgccaaagtctgtgcccacataacaaatattccattcagcattacaaagatggatgttcttcagttcctagaaggaatcccagtggatgaaaatgctgtacatgttcttgttgataacaatgggcaaggtctaggacaggcattggttcagtttaaaaatgaagatgatgcacgtaagtctgaacgcttacaccgtaaaaaacttaatgggagagaagcttttgttcatgtagttaccctagaagatatgagagagattgagaaaaatccccctgcccaaggaaaaaagggattaaagatgcctgtgccaggtaatcctgcagttccaggaatgcccaatgcgggactgcccggtgtgggactgcccagtgcaggacttcccggtgcaggcctgcccagcacaggactgcctggttcagcaataaccagtgcaggactgcctggtgcgggaatgcccagtgcaggaatacctagtgcaggaggtgaagagcatgccttcctgactgtaggatcaaaggaagccaataatgggcctccatttaactttcctggtaattttggtggatcaaatgcctttgggccaccaatccctcctccaggattaggaggcggggcctttggtgatgctaggcctggtatgccttcagttggaaacagtggtttgcctggtctaggactggatgttccgggttttggaggtggaccaaacaatttaagtgggccatcgggatttggagggggccctcagaattttggaaatggccctggtagcttaggcggtcccccggggtttggaagtggccctcctggtcttggaagtgcccctgggcatttgggtgggccaccagcttttgggcctggccccggccccggccccggccctggcccaatccatattggtggtccccctggctttgcatctagttctggaaaaccaggaccgacagtaattaaagtgcaaaacatgccctttactgtgtctattgatgagattttagatttcttttatggctatcaagtaatcccaggctcagtgtgtttaaaatacaatgaaaaaggtatgcccacaggtgaagccatggtggcctttgagtctcgggatgaagccacagctgctgtcattgacttaaatgacaggcctataggttcaagaaaagtaaaacttgtattagggtagccattcacatcattttttatagggtagatcttcatattgctgtgattaatgcatccagattgttttcctagtatttccaggttagaacctgtggattgtttcaattgcatatagcttggtttccataacatagagcattggttgactgtttacagaagactcactcaccaggataaacattgctgtatgttacagtaaagctatctggagagaacacataaatgattttggcataccattagagaaaccatttgtaaaactcaaatgaccacataaagcttatcaaggagtctagattggttttgttttataccatatgggatgaagaaaatagaaatgtcagtagaactcattgagggtgctcttgccagctgctgaaaatagaagttggctactctcagaatttggtttaaagctggacagatttgctttgttatagggtaaagctttgtctaaagtcctcattttcttttaaaattgaataaaatttctgtatacagattcattgtatgtacctttattgcttcttaagggtccttgctgtatagacagtcctgcttcagaagttgctgctttgtttgtctaattgactcatttgtaaatgagcagaactgttttgttggtttttttccctaaatataaaagtccacacttcgtttgtgctataacctcaaactttgatttctaatgtcacacttaaaactgtgtggaataagacttttgccataaaaataaactatggagtcctttatctaccagagcctttttggtttgaccgccacgatttaggttagtcagtttaaaaattgttcatgttgtttggatggtatcgaaaaccagaaaccacttttaataatgtgtttaagatacttgatttgaagtccttttcatatggactaattgtagtatcaatttcctcctgtcccgattatgtgaaattttggcctttaaacaaagaggggcccattcataagaaagtgttatatctaggtttttaaaactgaagttgaaattatctttgttagcagtagtagtatagaataaaagatccgtatgctggttcgtagattgatacgtgttagtcctgttatttggaggctttttggcatagttgttcgatcaggagcctgtttactaaaagtcttcatacagagtacaagtgcagccgccagaggagaaaattgagattcttgaccctttcatactcttttctttggtattcaggacactaaggcaggaggaccacatgagttctggttggtaagtgtccttgtcatgaaaacacttgccttacaaggctctaattatgatttccctagtcagtgctctgaagatgtgtcacattatattataaacaatacggaaggggagataggtgagatgatatgaaaaacaaattttctcactgtcataaaaggctctaattatggttactttccttgtgatgaaaaacttggccttacagggctctagttatggttactttccctagtcaatgctctgaaaatgtgtcacattataaacaatacagaaggagagatagatgagagatcatgaaaaccaaattttatcttttacatggcccctttgtcttcgtttgaaacatccccaacatttcctacaaatcagcgtagttacaaaggggtcagtcttttaaaataagtatttcctattaaactatatatatatacagtgcctttttggtgttgtgagtcagtggaacactgaaatacagcggttgtgtaatttaagagtggcaacagtttcatttgataagatttgaaaaggctttttatcactacaatcttagaggattgacagtacaggatttttgtttaagagaaggattgtttagactcaagaggtgactatgttgtgggtcttttgataattcatgaatacagatttgctttgaccgatcactagatactgcctcctcaatttcaaaagcaatataacgtttgtatatgctgtttaatttaagttaatgttaagtaatcatttctcattccaaagacaatgcaaaaaacttcagcactgcttgagagttgtatttcagccacagatattttctccattggaaagctattttcattttagaaaaatgggttgtttgaagatgaaagtcttttatcttttttcacaatttattttggttatatgttcgtacattcttattaaatatttcatacactttattgcaactactttgttatttctacatcttagataaatgctgaaaaggaaaacgatttcattgttcatctaattaaataaattaaaagagcggtttgtgtagaaattggagagaactatgttttatatgaatcacaacagtgctcgttgtggactgtaattaaatgctttgccctctggaacttgatttttgtgtatctgagatttattaacagtgctaactgctaaggatactgtttatcttgttctgggcattggagtttcagtttttaaaaaattcttgaaaatgtattctgtgaaactactcatacctctcttcctgcgaattttctcctaagaactaggtttggggtagaaatgaattgacattattttctcatttgctttgtatggtatgaaggatttgtaaagctttgctcaaagttgtgtgcatttgtaaacactatcatgatattttcaattttatgtgtaaattttattgtctgtttttggtgactctgacattaatggaagagaatattttccattagatttaattttttttcctctcccttctgattttttttttattggtgttcatttttcttttgatttaaaggattagagaaatctacaaatgtatgtcataaataagcaaatttgtaaacttttctgaactttagtgaaacatttagttcacaagcataatttggaggtgtgttctgtgtttacacagtagtttggatgtacaattattattagtggctttttaaaaaatgaaacagtgttaagtgaaatgtagttcctagctttgtactccaagttgtcaaagcatcaacaatgaaaattcgattaggaaactttatttaaaatttcaggtagtaatattcagtgtagttaaggccagtcttaacccactggatgaaaatctaggactgtatggaagtaagcaaacattacatttttaggtggaaatagtcagccttgcataaaaacaaggatgcgtgaaagccttaaattccagctcccttttactggagtctgtggttgtgtacaggtatgggccaagtgtaaaatctcatcaattttaagaacactcgggaaatgagtaaagaaaatgtaaaattgctgctagtcaaatcttttggaaagaatttctggaagtggtcactttaaaaattattttccacccttgcaaaattgccacatttaaattgttttactggcagttctatagtagtccagactttagaaaccaaacacaacaaaatggcttgttgccaatatggccacaacattgccagcaaatactgccttggcatcactcagcagaggtttttgtttataaagatgaagtcttgaatactgttcaataaacttgtcaaaaaataaaacaggctgatgcttttaatgctttaactgcacaaaagtactttactgagctataatattatcttgtcagggtttttgttttgttttgtttttaaacctgaaaatattttgtgcctttggagaggtagatttggtaatcttggagaggtaaaaattgttgcttatccttgcctgctaatgctgaagtgtcaagagaagaggatacttggaacagcagggaggaaacttgattcaagtccatagtatccaccttttcagaattttatgtgtatgatgtgttggcaaacaaagcccttaaatgttgaaaactttttatcttgaaagagtttagcttgtattagaatttggatacccagtgtgttttagagggggctagacatataattccaggtagtagctgagccattattaaataatcgggatttgactaagcaatggacaaatcactgagtgaaatcagctgcctacagatatccaaaatggcttttaccatctgaaaggggtggactgtgtgataatatgtctccttttcttgttcaggagagatcagttatgtaattcattgttacctgctttccagtgttttacagcaagaaatagtttatcaactatgtgcatca

SEQ ID NO: 9706 - protein, 932 aa, Homo sapiens; identical to SEQ ID NO: 1239

SEQ ID NO: 9707 - DNA, 4130 bp, Homo sapiens
tcctgttaaccctatccagatgaactctcagagcagtgtgaagccactccccatcaaccctgatgatctgtatgtcagtgtgcatggaatgcccttttctgcaatggaaaatgatgtcagagatttttttcatgggctccgtgttgatgcagtgcatttgttgaaagatcatgtaggtcgaaataatgggaatggattggttaagtttctctcccctcaagatacatttgaagctttgaaacgaaacagaatgctgatgattcaacgctatgtggaagttagccctgccacagaaagacagtgggtagctgctggaggccatatcacttttaagcaaaatatgggaccttctggacaaactcatccccctcctcagacacttcccaggtcaaaatcgcccagtgggcagaaaagatcaaggtcaagatcaccacatgaggctggtttttgtgtttacttgaaagggctaccatttgaagcagaaaacaaacatgtcattgatttttttaaaaagctggatattgtggaagatagtatttatatagcttatggacccaatgggaaagcaactggcgaaggctttgtagagttcagaaatgaggctgactataaggctgctctgtgtcgtcataaacagtacatgggcaatcgctttattcaagttcatccaattactaagaaaggtatgctagaaaagatagatatgattcgaaaaagatgtttacagaagactcactcaccaggataaacattgctgtatgttacagtaaagctatctggagagaacacataaatgattttggcataccattagagaaaccatttgtaaaactcaaatgaccacataaagcttatcaaggagtctagattggttttgttttataccatatgggatgaagaaaatagaaatgtcagtagaactcattgagggtgctcttgccagctgctgaaaatagaagttggctactctcagaatttggtttaaagctggacagatttgctttgttatagggtaaagctttgtctaaagtcctcattttcttttaaaattgaataaaatttctgtatacagattcattgtatgtacctttattgcttcttaagggtccttgctgtatagacagtcctgcttcagaagttgctgctttgtttgtctaattgactcatttgtaaatgagcagaactgttttgttggtttttttccctaaatataaaagtccacacttcgtttgtgctataacctcaaactttgatttctaatgtcacacttaaaactgtgtggaataagacttttgccataaaaataaactatggagtcctttatctaccagagcctttttggtttgaccgccacgatttaggttagtcagtttaaaaattgttcatgttgtttggatggtatcgaaaaccagaaaccacttttaataatgtgtttaagatacttgatttgaagtccttttcatatggactaattgtagtatcaatttcctcctgtcccgattatgtgaaattttggcctttaaacaaagaggggcccattcataagaaagtgttatatctaggtttttaaaactgaagttgaaattatctttgttagcagtagtagtatagaataaaagatccgtatgctggttcgtagattgatacgtgttagtcctgttatttggaggctttttggcatagttgttcgatcaggagcctgtttactaaaagtcttcatacagagtacaagtgcagccgccagaggagaaaattgagattcttgaccctttcatactcttttctttggtattcaggacactaaggcaggaggaccacatgagttctggttggtaagtgtccttgtcatgaaaacacttgccttacaaggctctaattatgatttccctagtcagtgctctgaagatgtgtcacattatattataaacaatacggaaggggagataggtgagatgatatgaaaaacaaattttctcactgtcataaaaggctctaattatggttactttccttgtgatgaaaaacttggccttacagggctctagttatggttactttccctagtcaatgctctgaaaatgtgtcacattataaacaatacagaaggagagatagatgagagatcatgaaaaccaaattttatcttttacatggcccctttgtcttcgtttgaaacatccccaacatttcctacaaatcagcgtagttacaaaggggtcagtcttttaaaataagtatttcctattaaactatatatatatacagtgcctttttggtgttgtgagtcagtggaacactgaaatacagcggttgtgtaatttaagagtggcaacagtttcatttgataagatttgaaaaggctttttatcactacaatcttagaggattgacagtacaggatttttgtttaagagaaggattgtttagactcaagaggtgactatgttgtgggtcttttgataattcatgaatacagatttgctttgaccgatcactagatactgcctcctcaatttcaaaagcaatataacgtttgtatatgctgtttaatttaagttaatgttaagtaatcatttctcattccaaagacaatgcaaaaaacttcagcactgcttgagagttgtatttcagccacagatattttctccattggaaagctattttcattttagaaaaatgggttgtttgaagatgaaagtcttttatcttttttcacaatttattttggttatatgttcgtacattcttattaaatatttcatacactttattgcaactactttgttatttctacatcttagataaatgctgaaaaggaaaacgatttcattgttcatctaattaaataaattaaaagagcggtttgtgtagaaattggagagaactatgttttatatgaatcacaacagtgctcgttgtggactgtaattaaatgctttgccctctggaacttgatttttgtgtatctgagatttattaacagtgctaactgctaaggatactgtttatcttgttctgggcattggagtttcagtttttaaaaaattcttgaaaatgtattctgtgaaactactcatacctctcttcctgcgaattttctcctaagaactaggtttggggtagaaatgaattgacattattttctcatttgctttgtatggtatgaaggatttgtaaagctttgctcaaagttgtgtgcatttgtaaacactatcatgatattttcaattttatgtgtaaattttattgtctgtttttggtgactctgacattaatggaagagaatattttccattagatttaattttttttcctctcccttctgattttttttttattggtgttcatttttcttttgatttaaaggattagagaaatctacaaatgtatgtcataaataagcaaatttgtaaacttttctgaactttagtgaaacatttagttcacaagcataatttggaggtgtgttctgtgtttacacagtagtttggatgtacaattattattagtggctttttaaaaaatgaaacagtgttaagtgaaatgtagttcctagctttgtactccaagttgtcaaagcatcaacaatgaaaattcgattaggaaactttatttaaaatttcaggtagtaatattcagtgtagttaaggccagtcttaacccactggatgaaaatctaggactgtatggaagtaagcaaacattacatttttaggtggaaatagtcagccttgcataaaaacaaggatgcgtgaaagccttaaattccagctcccttttactggagtctgtggttgtgtacaggtatgggccaagtgtaaaatctcatcaattttaagaacactcgggaaatgagtaaagaaaatgtaaaattgctgctagtcaaatcttttggaaagaatttctggaagtggtcactttaaaaattattttccacccttgcaaaattgccacatttaaattgttttactggcagttctatagtagtccagactttagaaaccaaacacaacaaaatggcttgttgccaatatggccacaacattgccagcaaatactgccttggcatcactcagcagaggtttttgtttataaagatgaagtcttgaatactgttcaataaacttgtc

SEQ ID NO: 9708 - protein, 242 aa, Homo sapiens; identical to SEQ ID NO: 9676

SEQ ID NO: 9709 - DNA, 5359 bp, Homo sapiens
gaatgaatggctctggagcacctatgaatttgaacaataatctgaatcctatgtttcttggtccgttgaatcctgttaaccctatccagatgaactctcagagcagtgtgaagccactccccatcaaccctgatgatctgtatgtcagtgtgcatggaatgcccttttctgcaatggaaaatgatgtcagagatttttttcatgggctccgtgttgatgcagtgcatttgttgaaagatcatgtaggtcgaaataatgggaatggattggttaagtttctctcccctcaagatacatttgaagctttgaaacgaaacagaatgctgatgattcaacgctatgtggaagttagccctgccacagaaagacagtgggtagctgctggaggccatatcacttttaagcaaaatatgggaccttctggacaaactcatccccctcctcagacacttcccaggtcaaaatcgcccagtgggcagaaaagatcaaggtcaagatcaccacatgaggctggtttttgtgtttacttgaaagggctaccatttgaagcagaaaacaaacatgtcattgatttttttaaaaagctggatattgtggaagatagtatttatatagcttatggacccaatgggaaagcaactggcgaaggctttgtagagttcagaaatgaggctgactataaggctgctctgtgtcgtcataaacagtacatgggcaatcgctttattcaagttcatccaattactaagaaaggtatgctagaaaagatagatatgattcgaaaaagactgcagaacttcagctatgaccagagggaaatgatactaaatccagagggggatgtcaactctgccaaattaccctagaagatatgagagagattgagaaaaatccccctgcccaaggaaaaaagggattaaagatgcctgtgccaggtaatcctgcagttccaggaatgcccaatgcgggactgcccggtgtgggactgcccagtgcaggacttcccggtgcaggcctgcccagcacaggactgcctggttcagcaataaccagtgcaggactgcctggtgcgggaatgcccagtgcaggaatacctagtgcaggaggtgaagagcatgccttcctgactgtaggatcaaaggaagccaataatgggcctccatttaactttcctggtaattttggtggatcaaatgcctttgggccaccaatccctcctccaggattaggaggcggggcctttggtgatgctaggcctggtatgccttcagttggaaacagtggtttgcctggtctaggactggatgttccgggttttggaggtggaccaaacaatttaagtgggccatcgggatttggagggggccctcagaattttggaaatggccctggtagcttaggcggtcccccggggtttggaagtggccctcctggtcttggaagtgcccctgggcatttgggtgggccaccagcttttgggcctggccccggccccggccccggccctggcccaatccatattggtggtccccctggctttgcatctagttctggaaaaccaggaccgacagtaattaaagtgcaaaacatgccctttactgtgtctattgatgagattttagatttcttttatggctatcaagtaatcccaggctcagtgtgtttaaaatacaatgaaaaaggtatgcccacaggtgaagccatggtggcctttgagtctcgggatgaagccacagctgctgtcattgacttaaatgacaggcctataggttcaagaaaagtaaaacttgtattagggtagccattcacatcattttttatagggtagatcttcatattgctgtgattaatgcatccagattgttttcctagtatttccaggttagaacctgtggattgtttcaattgcatatagcttggtttccataacatagagcattggttgactgtttacagaagactcactcaccaggataaacattgctgtatgttacagtaaagctatctggagagaacacataaatgattttggcataccattagagaaaccatttgtaaaactcaaatgaccacataaagcttatcaaggagtctagattggttttgttttataccatatgggatgaagaaaatagaaatgtcagtagaactcattgagggtgctcttgccagctgctgaaaatagaagttggctactctcagaatttggtttaaagctggacagatttgctttgttatagggtaaagctttgtctaaagtcctcattttcttttaaaattgaataaaatttctgtatacagattcattgtatgtacctttattgcttcttaagggtccttgctgtatagacagtcctgcttcagaagttgctgctttgtttgtctaattgactcatttgtaaatgagcagaactgttttgttggtttttttccctaaatataaaagtccacacttcgtttgtgctataacctcaaactttgatttctaatgtcacacttaaaactgtgtggaataagacttttgccataaaaataaactatggagtcctttatctaccagagcctttttggtttgaccgccacgatttaggttagtcagtttaaaaattgttcatgttgtttggatggtatcgaaaaccagaaaccacttttaataatgtgtttaagatacttgatttgaagtccttttcatatggactaattgtagtatcaatttcctcctgtcccgattatgtgaaattttggcctttaaacaaagaggggcccattcataagaaagtgttatatctaggtttttaaaactgaagttgaaattatctttgttagcagtagtagtatagaataaaagatccgtatgctggttcgtagattgatacgtgttagtcctgttatttggaggctttttggcatagttgttcgatcaggagcctgtttactaaaagtcttcatacagagtacaagtgcagccgccagaggagaaaattgagattcttgaccctttcatactcttttctttggtattcaggacactaaggcaggaggaccacatgagttctggttggtaagtgtccttgtcatgaaaacacttgccttacaaggctctaattatgatttccctagtcagtgctctgaagatgtgtcacattatattataaacaatacggaaggggagataggtgagatgatatgaaaaacaaattttctcactgtcataaaaggctctaattatggttactttccttgtgatgaaaaacttggccttacagggctctagttatggttactttccctagtcaatgctctgaaaatgtgtcacattataaacaatacagaaggagagatagatgagagatcatgaaaaccaaattttatcttttacatggcccctttgtcttcgtttgaaacatccccaacatttcctacaaatcagcgtagttacaaaggggtcagtcttttaaaataagtatttcctattaaactatatatatatacagtgcctttttggtgttgtgagtcagtggaacactgaaatacagcggttgtgtaatttaagagtggcaacagtttcatttgataagatttgaaaaggctttttatcactacaatcttagaggattgacagtacaggatttttgtttaagagaaggattgtttagactcaagaggtgactatgttgtgggtcttttgataattcatgaatacagatttgctttgaccgatcactagatactgcctcctcaatttcaaaagcaatataacgtttgtatatgctgtttaatttaagttaatgttaagtaatcatttctcattccaaagacaatgcaaaaaacttcagcactgcttgagagttgtatttcagccacagatattttctccattggaaagctattttcattttagaaaaatgggttgtttgaagatgaaagtcttttatcttttttcacaatttattttggttatatgttcgtacattcttattaaatatttcatacactttattgcaactactttgttatttctacatcttagataaatgctgaaaaggaaaacgatttcattgttcatctaattaaataaattaaaagagcggtttgtgtagaaattggagagaactatgttttatatgaatcacaacagtgctcgttgtggactgtaattaaatgctttgccctctggaacttgatttttgtgtatctgagatttattaacagtgctaactgctaaggatactgtttatcttgttctgggcattggagtttcagtttttaaaaaattcttgaaaatgtattctgtgaaactactcatacctctcttcctgcgaattttctcctaagaactaggtttggggtagaaatgaattgacattattttctcatttgctttgtatggtatgaaggatttgtaaagctttgctcaaagttgtgtgcatttgtaaacactatcatgatattttcaattttatgtgtaaattttattgtctgtttttggtgactctgacattaatggaagagaatattttccattagatttaattttttttcctctcccttctgattttttttttattggtgttcatttttcttttgatttaaaggattagagaaatctacaaatgtatgtcataaataagcaaatttgtaaacttttctgaactttagtgaaacatttagttcacaagcataatttggaggtgtgttctgtgtttacacagtagtttggatgtacaattattattagtggctttttaaaaaatgaaacagtgttaagtgaaatgtagttcctagctttgtactccaagttgtcaaagcatcaacaatgaaaattcgattaggaaactttatttaaaatttcaggtagtaatattcagtgtagttaaggccagtcttaacccactggatgaaaatctaggactgtatggaagtaagcaaacattacatttttaggtggaaatagtcagccttgcataaaaacaaggatgcgtgaaagccttaaattccagctcccttttactggagtctgtggttgtgtacaggtatgggccaagtgtaaaatctcatcaattttaagaacactcgggaaatgagtaaagaaaatgtaaaattgctgctagtcaaatcttttggaaagaatttctggaagtggtcactttaaaaattattttccacccttgcaaaattgccacatttaaattgttttactggcagttctatagtagtccagactttagaaaccaaacacaacaaaatggcttgttgccaatatggccacaacattgccagcaaatactgccttggcatcactcagcagaggtttttgtttataaagatgaagtcttgaatactgttcaataaacttgtc

SEQ ID NO: 9710 - protein, 287 aa, Homo sapiens; identical to SEQ ID NO: 9678

SEQ ID NO: 9711 - DNA, 5530 bp, Homo sapiens
ttgcctcctgtgcctcctgtgcccccgattcccccagttccttctgtgccacccatgaccccactgccacccatgtcgggcatgccgcccttgaatccgccacctgtggcacctctacctgctggaatgaatggctctggagcacctatgaatttgaacaataatctgaatcctatgtttcttggtccgttgaatcctgttaaccctatccagatgaactctcagagcagtgtgaagccactccccatcaaccctgatgatctgtatgtcagtgtgcatggaatgcccttttctgcaatggaaaatgatgtcagagatttttttcatgggctccgtgttgatgcagtgcatttgttgaaagatcatgtaggtcgaaataatgggaatggattggttaagtttctctcccctcaagatacatttgaagctttgaaacgaaacagaatgctgatgattcaacgctatgtggaagttagccctgccacagaaagacagtgggtagctgctggaggccatatcacttttaagcaaaatatgggaccttctggacaaactcatccccctcctcagacacttcccaggtcaaaatcgcccagtgggcagaaaagatcaaggtcaagatcaccacatgaggctggtttttgtgtttacttgaaagggctaccatttgaagcagaaaacaaacatgtcattgatttttttaaaaagctggatattgtggaagatagtatttatatagcttatggacccaatgggaaagcaactggcgaaggctttgtagagttcagaaatgaggctgactataaggctgctctgtgtcgtcataaacagtacatgggcaatcgctttattcaagttcatccaattactaagaaaggtatgctagaaaagatagatatgattcgaaaaagactgcagaacttcagctatgaccagagggaaatgatactaaatccagagggggatgtcaactctgccaaagtctgtgcccacataacaaatattccattcagcattacaaagatggatgttcttcagttcctagaaggaatcccagtggatgaaaatgctgtacatgttcttgttgataacaatgggcaaggtctaggacaggcattggttcagaatgcccaatgcgggactgcccggtgtgggactgcccagtgcaggacttcccggtgcaggcctgcccagcacaggactgcctggttcagcaataaccagtgcaggactgcctggtgcgggaatgcccagtgcaggaatacctagtgcaggaggtgaagagcatgccttcctgactgtaggatcaaaggaagccaataatgggcctccatttaactttcctggtaattttggtggatcaaatgcctttgggccaccaatccctcctccaggattaggaggcggggcctttggtgatgctaggcctggtatgccttcagttggaaacagtggtttgcctggtctaggactggatgttccgggttttggaggtggaccaaacaatttaagtgggccatcgggatttggagggggccctcagaattttggaaatggccctggtagcttaggcggtcccccggggtttggaagtggccctcctggtcttggaagtgcccctgggcatttgggtgggccaccagcttttgggcctggccccggccccggccccggccctggcccaatccatattggtggtccccctggctttgcatctagttctggaaaaccaggaccgacagtaattaaagtgcaaaacatgccctttactgtgtctattgatgagattttagatttcttttatggctatcaagtaatcccaggctcagtgtgtttaaaatacaatgaaaaaggtatgcccacaggtgaagccatggtggcctttgagtctcgggatgaagccacagctgctgtcattgacttaaatgacaggcctataggttcaagaaaagtaaaacttgtattagggtagccattcacatcattttttatagggtagatcttcatattgctgtgattaatgcatccagattgttttcctagtatttccaggttagaacctgtggattgtttcaattgcatatagcttggtttccataacatagagcattggttgactgtttacagaagactcactcaccaggataaacattgctgtatgttacagtaaagctatctggagagaacacataaatgattttggcataccattagagaaaccatttgtaaaactcaaatgaccacataaagcttatcaaggagtctagattggttttgttttataccatatgggatgaagaaaatagaaatgtcagtagaactcattgagggtgctcttgccagctgctgaaaatagaagttggctactctcagaatttggtttaaagctggacagatttgctttgttatagggtaaagctttgtctaaagtcctcattttcttttaaaattgaataaaatttctgtatacagattcattgtatgtacctttattgcttcttaagggtccttgctgtatagacagtcctgcttcagaagttgctgctttgtttgtctaattgactcatttgtaaatgagcagaactgttttgttggtttttttccctaaatataaaagtccacacttcgtttgtgctataacctcaaactttgatttctaatgtcacacttaaaactgtgtggaataagacttttgccataaaaataaactatggagtcctttatctaccagagcctttttggtttgaccgccacgatttaggttagtcagtttaaaaattgttcatgttgtttggatggtatcgaaaaccagaaaccacttttaataatgtgtttaagatacttgatttgaagtccttttcatatggactaattgtagtatcaatttcctcctgtcccgattatgtgaaattttggcctttaaacaaagaggggcccattcataagaaagtgttatatctaggtttttaaaactgaagttgaaattatctttgttagcagtagtagtatagaataaaagatccgtatgctggttcgtagattgatacgtgttagtcctgttatttggaggctttttggcatagttgttcgatcaggagcctgtttactaaaagtcttcatacagagtacaagtgcagccgccagaggagaaaattgagattcttgaccctttcatactcttttctttggtattcaggacactaaggcaggaggaccacatgagttctggttggtaagtgtccttgtcatgaaaacacttgccttacaaggctctaattatgatttccctagtcagtgctctgaagatgtgtcacattatattataaacaatacggaaggggagataggtgagatgatatgaaaaacaaattttctcactgtcataaaaggctctaattatggttactttccttgtgatgaaaaacttggccttacagggctctagttatggttactttccctagtcaatgctctgaaaatgtgtcacattataaacaatacagaaggagagatagatgagagatcatgaaaaccaaattttatcttttacatggcccctttgtcttcgtttgaaacatccccaacatttcctacaaatcagcgtagttacaaaggggtcagtcttttaaaataagtatttcctattaaactatatatatatacagtgcctttttggtgttgtgagtcagtggaacactgaaatacagcggttgtgtaatttaagagtggcaacagtttcatttgataagatttgaaaaggctttttatcactacaatcttagaggattgacagtacaggatttttgtttaagagaaggattgtttagactcaagaggtgactatgttgtgggtcttttgataattcatgaatacagatttgctttgaccgatcactagatactgcctcctcaatttcaaaagcaatataacgtttgtatatgctgtttaatttaagttaatgttaagtaatcatttctcattccaaagacaatgcaaaaaacttcagcactgcttgagagttgtatttcagccacagatattttctccattggaaagctattttcattttagaaaaatgggttgtttgaagatgaaagtcttttatcttttttcacaatttattttggttatatgttcgtacattcttattaaatatttcatacactttattgcaactactttgttatttctacatcttagataaatgctgaaaaggaaaacgatttcattgttcatctaattaaataaattaaaagagcggtttgtgtagaaattggagagaactatgttttatatgaatcacaacagtgctcgttgtggactgtaattaaatgctttgccctctggaacttgatttttgtgtatctgagatttattaacagtgctaactgctaaggatactgtttatcttgttctgggcattggagtttcagtttttaaaaaattcttgaaaatgtattctgtgaaactactcatacctctcttcctgcgaattttctcctaagaactaggtttggggtagaaatgaattgacattattttctcatttgctttgtatggtatgaaggatttgtaaagctttgctcaaagttgtgtgcatttgtaaacactatcatgatattttcaattttatgtgtaaattttattgtctgtttttggtgactctgacattaatggaagagaatattttccattagatttaattttttttcctctcccttctgattttttttttattggtgttcatttttcttttgatttaaaggattagagaaatctacaaatgtatgtcataaataagcaaatttgtaaacttttctgaactttagtgaaacatttagttcacaagcataatttggaggtgtgttctgtgtttacacagtagtttggatgtacaattattattagtggctttttaaaaaatgaaacagtgttaagtgaaatgtagttcctagctttgtactccaagttgtcaaagcatcaacaatgaaaattcgattaggaaactttatttaaaatttcaggtagtaatattcagtgtagttaaggccagtcttaacccactggatgaaaatctaggactgtatggaagtaagcaaacattacatttttaggtggaaatagtcagccttgcataaaaacaaggatgcgtgaaagccttaaattccagctcccttttactggagtctgtggttgtgtacaggtatgggccaagtgtaaaatctcatcaattttaagaacactcgggaaatgagtaaagaaaatgtaaaattgctgctagtcaaatcttttggaaagaatttctggaagtggtcactttaaaaattattttccacccttgcaaaattgccacatttaaattgttttactggcagttctatagtagtccagactttagaaaccaaacacaacaaaatggcttgttgccaatatggccacaacattgccagcaaatactgccttggcatcactcagcagaggtttttgtttataaagatgaagtcttgaatactgttcaataaacttgtc

SEQ ID NO: 9712 - protein, 404 aa, Homo sapiens; identical to SEQ ID NO: 9680

SEQ ID NO: 9713 - DNA, 6286 bp, Homo sapiens
caggtgtgtgtggtttcagcgcagcatggctgtggtcatccgtttgcaaggtctcccaattgtggcggggaccatggacattcgccacttcttctctggattgaccattcctgatgggggcgtgcatattgtagggggtgaactgggtgaggctttcatcgtttttgccactgatgaagatgcaaggcttggtatgatgcgcacaggtggtacaattaaagggtcaaaagtaacactattgttgagtagtaagacggaaatgcagaatatgattgaactgagtcgtaggcgttttgaaactgccaacttagatataccaccagcaaatgccagtagatcaggaccaccacctagctcaggaatgagtagcagggtaaacttgcccacaacagtatccaactttaataatccatcacccagtgtagttactgccaccacttctgttcatgaaagcaacaaaaacatacagacattttccacagccagcgtaggaacagctcctccaaatatgggggcttcctttgggagcccaacgtttagctcaactgttccaagcacagcctctccaatgaacacagtcccgccgccaccaattcctccaattccagcgatgccatcttctgtgccacccatgaccccactgccacccatgtcgggcatgccgcccttgaatccgccacctgtggcacctctacctgctggaatgaatggctctggagcacctatgaatttgaacaataatctgaatcctatgtttcttggtccgttgaatcctgttaaccctatccagatgaactctcagagcagtgtgaagccactccccatcaaccctgatgatctgtatgtcagtgtgcatggaatgcccttttctgcaatggaaaatgatgtcagagatttttttcatgggctccgtgttgatgcagtgcatttgttgaaagatcatgtaggtcgaaataatgggaatggattggttaagtttctctcccctcaagatacatttgaagctttgaaacgaaacagaatgctgatgattcaacgctatgtggaagttagccctgccacagaaagacagtgggtagctgctggaggccatatcacttttaagcaaaatatgggaccttctggacaaactcatccccctcctcagacacttcccaggtcaaaatcgcccagtgggcagaaaagatcaaggtcaagatcaccacatgaggctggtttttgtgtttacttgaaagggctaccatttgaagcagaaaacaaacatgtcattgatttttttaaaaagctggatattgtggaagatagtatttatatagcttatggacccaatgggaaagcaactggcgaaggctttgtagagttcagaaatgaggctgactataaggctgctctgtgtcgtcataaacagtacatgggcaatcgctttattcaagttcatccaattactaagaaaggtatgctagaaaagatagatatgattcgaaaaagactgcagaacttcagctatgaccagagggaaatgatactaaatccagagggggatgtcaactctgccaaagtctgtgcccacataacaaatattccattcagcattacaaagatggatgttcttcagttcctagaaggaatcccagtggatgaaaatgctgtacatgttcttgttgataacaatgggcaaggtctaggacaggcattggttcagtttaaaaatgaagatgatgcacgtaagtctgaacgcttacaccgtaaaaaacttaatgggagagaagcttttgttcatgtagttaccctagaagatatgagagagattgagaaaaatccccctgcccaaggaaaaaagggattaaagatgcctgtgccaggtaatcctgcagttccaggaatgcccaatgcgggactgcccggtgtgggactgcccagtgcaggacttcccggtgcaggcctgcccagcacaggactgcctggttcagcaataaccagtgcaggactgcctggtgcgggaatgcccagtgcaggaatacctagtgcaggaggtgaagagcatgccttcctgactgtaggatcaaaggaagccaataatgggcctccatttaactttcctggtaattttggtggatcaaatgcctttgggccaccaatccctcctccaggattaggaggcggggcctttggtgatgctaggcctggtatgccttcagttggaaacagtggtttgcctggtctaggactggatgttccgggttttggaggtggaccaaacaatttaagtgggccatcgggatttggagggggccctcagaattttggaaatggccctggtagcttaggcggtcccccggggtttggaagtggccctcctggtcttggaagtgcccctgggcatttgggtgggccaccagcttttgggcctggccccggccccggccccggccctggcccaatccatattggtggtccccctggctttgcatctagttctggaaaaccaggaccgacagtaattaaagtgcaaaacatgccctttactgtgtctattgatgagattttagatttcttttatggctatcaagtaatcccaggctcagtgtgtttaaaatacaatgaaaaaggtatgcccacaggtgaagccatggtggcctttgagtctcgggatgaagccacagctgctgtcattgacttaaatgacaggcctataggttcaagaaaagtaaaacttgtattagggtagccattcacatcattttttatagggtagatcttcatattgctgtgattaatgcatccagattgttttcctagtatttccaggttagaacctgtggattgtttcaattgcatatagcttggtttccataacatagagcattggttgactgtttacagaagactcactcaccaggataaacattgctgtatgttacagtaaagctatctggagagaacacataaatgattttggcataccattagagaaaccatttgtaaaactcaaatgaccacataaagcttatcaaggagtctagattggttttgttttataccatatgggatgaagaaaatagaaatgtcagtagaactcattgagggtgctcttgccagctgctgaaaatagaagttggctactctcagaatttggtttaaagctggacagatttgctttgttatagggtaaagctttgtctaaagtcctcattttcttttaaaattgaataaaatttctgtatacagattcattgtatgtacctttattgcttcttaagggtccttgctgtatagacagtcctgcttcagaagttgctgctttgtttgtctaattgactcatttgtaaatgagcagaactgttttgttggtttttttccctaaatataaaagtccacacttcgtttgtgctataacctcaaactttgatttctaatgtcacacttaaaactgtgtggaataagacttttgccataaaaataaactatggagtcctttatctaccagagcctttttggtttgaccgccacgatttaggttagtcagtttaaaaattgttcatgttgtttggatggtatcgaaaaccagaaaccacttttaataatgtgtttaagatacttgatttgaagtccttttcatatggactaattgtagtatcaatttcctcctgtcccgattatgtgaaattttggcctttaaacaaagaggggcccattcataagaaagtgttatatctaggtttttaaaactgaagttgaaattatctttgttagcagtagtagtatagaataaaagatccgtatgctggttcgtagattgatacgtgttagtcctgttatttggaggctttttggcatagttgttcgatcaggagcctgtttactaaaagtcttcatacagagtacaagtgcagccgccagaggagaaaattgagattcttgaccctttcatactcttttctttggtattcaggacactaaggcaggaggaccacatgagttctggttggtaagtgtccttgtcatgaaaacacttgccttacaaggctctaattatgatttccctagtcagtgctctgaagatgtgtcacattatattataaacaatacggaaggggagataggtgagatgatatgaaaaacaaattttctcactgtcataaaaggctctaattatggttactttccttgtgatgaaaaacttggccttacagggctctagttatggttactttccctagtcaatgctctgaaaatgtgtcacattataaacaatacagaaggagagatagatgagagatcatgaaaaccaaattttatcttttacatggcccctttgtcttcgtttgaaacatccccaacatttcctacaaatcagcgtagttacaaaggggtcagtcttttaaaataagtatttcctattaaactatatatatatacagtgcctttttggtgttgtgagtcagtggaacactgaaatacagcggttgtgtaatttaagagtggcaacagtttcatttgataagatttgaaaaggctttttatcactacaatcttagaggattgacagtacaggatttttgtttaagagaaggattgtttagactcaagaggtgactatgttgtgggtcttttgataattcatgaatacagatttgctttgaccgatcactagatactgcctcctcaatttcaaaagcaatataacgtttgtatatgctgtttaatttaagttaatgttaagtaatcatttctcattccaaagacaatgcaaaaaacttcagcactgcttgagagttgtatttcagccacagatattttctccattggaaagctattttcattttagaaaaatgggttgtttgaagatgaaagtcttttatcttttttcacaatttattttggttatatgttcgtacattcttattaaatatttcatacactttattgcaactactttgttatttctacatcttagataaatgctgaaaaggaaaacgatttcattgttcatctaattaaataaattaaaagagcggtttgtgtagaaattggagagaactatgttttatatgaatcacaacagtgctcgttgtggactgtaattaaatgctttgccctctggaacttgatttttgtgtatctgagatttattaacagtgctaactgctaaggatactgtttatcttgttctgggcattggagtttcagtttttaaaaaattcttgaaaatgtattctgtgaaactactcatacctctcttcctgcgaattttctcctaagaactaggtttggggtagaaatgaattgacattattttctcatttgctttgtatggtatgaaggatttgtaaagctttgctcaaagttgtgtgcatttgtaaacactatcatgatattttcaattttatgtgtaaattttattgtctgtttttggtgactctgacattaatggaagagaatattttccattagatttaattttttttcctctcccttctgattttttttttattggtgttcatttttcttttgatttaaaggattagagaaatctacaaatgtatgtcataaataagcaaatttgtaaacttttctgaactttagtgaaacatttagttcacaagcataatttggaggtgtgttctgtgtttacacagtagtttggatgtacaattattattagtggctttttaaaaaatgaaacagtgttaagtgaaatgtagttcctagctttgtactccaagttgtcaaagcatcaacaatgaaaattcgattaggaaactttatttaaaatttcaggtagtaatattcagtgtagttaaggccagtcttaacccactggatgaaaatctaggactgtatggaagtaagcaaacattacatttttaggtggaaatagtcagccttgcataaaaacaaggatgcgtgaaagccttaaattccagctcccttttactggagtctgtggttgtgtacaggtatgggccaagtgtaaaatctcatcaattttaagaacactcgggaaatgagtaaagaaaatgtaaaattgctgctagtcaaatcttttggaaagaatttctggaagtggtcactttaaaaattattttccacccttgcaaaattgccacatttaaattgttttactggcagttctatagtagtccagactttagaaaccaaacacaacaaaatggcttgttgccaatatggccacaacattgccagcaaatactgccttggcatcactcagcagaggtttttgtttataaagatgaagtcttgaatactgttcaataaacttgtc

SEQ ID NO: 9714 - protein, 900 aa, Homo sapiens; identical to SEQ ID NO: 9682

SEQ ID NO: 9715 - DNA, 6548 bp, Homo sapiens
gaaatgcctccgaggtccattgctggggaggggctttactcgagggtgtagcagttttgagaagccggcgtctgaagctaggagtctaaaagttggttttaattggttgcccacaggattgacttggcctctacttcttgttaaggaaattcatctcttgttttatcaggtgtgtgtggtttcagcgcagcatggctgtggtcatccgtttgcaaggtctcccaattgtggcggggaccatggacattcgccacttcttctctggattgaccattcctgatgggggcgtgcatattgtagggggtgaactgggtgaggctttcatcgtttttgccactgatgaagatgcaaggcttggtatgatgcgcacaggtggtacaattaaagggtcaaaagtaacactattgttgagtagtaagacggaaatgcagaatatgattgaactgagtcgtaggcgttttgaaactgccaacttagatataccaccagcaaatgccagtagatcaggaccaccacctagctcaggaatgagtagcagggtaaacttgcccacaacagtatccaactttaataatccatcacccagtgtagttactgccaccacttctgttcatgaaagcaacaaaaacatacagacattttccacagccagcgtaggaacagctcctccaaatatgggggcttcctttgggagcccaacgtttagctcaactgttccaagcacagcctctccaatgaacacagtcccgccgccaccaattcctccaattccagcgatgccatctctgccaccaatgccatccattcccccaattccagttcctcctccagtacctacattgcctcctgtgcctcctgtgcccccgattcccccagttccttctgtgccacccatgaccccactgccacccatgtcgggcatgccgcccttgaatccgccacctgtggcacctctacctgctggaatgaatggctctggagcacctatgaatttgaacaataatctgaatcctatgtttcttggtccgttgaatcctgttaaccctatccagatgaactctcagagcagtgtgaagccactccccatcaaccctgatgatctgtatgtcagtgtgcatggaatgcccttttctgcaatggaaaatgatgtcagagatttttttcatgggctccgtgttgatgcagtgcatttgttgaaagatcatgtaggtcgaaataatgggaatggattggttaagtttctctcccctcaagatacatttgaagctttgaaacgaaacagaatgctgatgattcaacgctatgtggaagttagccctgccacagaaagacagtgggtagctgctggaggccatatcacttttaagcaaaatatgggaccttctggacaaactcatccccctcctcagacacttcccaggtcaaaatcgcccagtgggcagaaaagatcaaggtcaagatcaccacatgaggctggtttttgtgtttacttgaaagggctaccatttgaagcagaaaacaaacatgtcattgatttttttaaaaagctggatattgtggaagatagtatttatatagcttatggacccaatgggaaagcaactggcgaaggctttgtagagttcagaaatgaggctgactataaggctgctctgtgtcgtcataaacagtacatgggcaatcgctttattcaagttcatccaattactaagaaaggtatgctagaaaagatagatatgattcgaaaaagactgcagaacttcagctatgaccagagggaaatgatactaaatccagagggggatgtcaactctgccaaagtctgtgcccacataacaaatattccattcagcattacaaagatggatgttcttcagttcctagaaggaatcccagtggatgaaaatgctgtacatgttcttgttgataacaatgggcaaggtctaggacaggcattggttcagtttaaaaatgaagatgatgcacgtaagtctgaacgcttacaccgtaaaaaacttaatgggagagaagcttttgttcatgtagttaccctagaagatatgagagagattgagaaaaatccccctgcccaaggaaaaaagggattaaagatgcctgtgccaggtaatcctgcagttccaggaatgcccaatgcgggactgcccggtgtgggactgcccagtgcaggacttcccggtgcaggcctgcccagcacaggactgcctggttcagcaataaccagtgcaggactgcctggtgcgggaatgcccagtgcaggaatacctagtgcaggaggtgaagagcatgccttcctgactgtaggatcaaaggaagccaataatgggcctccatttaactttcctggtaattttggtggatcaaatgcctttgggccaccaatccctcctccaggattaggaggcggggcctttggtgatgctaggcctggtatgccttcagttggaaacagtggtttgcctggtctaggactggatgttccgggttttggaggtggaccaaacaatttaagtgggccatcgggatttggagggggccctcagaattttggaaatggccctggtagcttaggcggtcccccggggtttggaagtggccctcctggtcttggaagtgcccctgggcatttgggtgggccaccagcttttgggcctggccccggccccggccccggccctggcccaatccatattggtggtccccctggctttgcatctagttctggaaaaccaggaccgacagtaattaaagtgcaaaacatgccctttactgtgtctattgatgagattttagatttcttttatggctatcaagtaatcccaggctcagtgtgtttaaaatacaatgaaaaaggtatgcccacaggtgaagccatggtggcctttgagtctcgggatgaagccacagctgctgtcattgacttaaatgacaggcctataggttcaagaaaagtaaaacttgtattagggtagccattcacatcattttttatagggtagatcttcatattgctgtgattaatgcatccagattgttttcctagtatttccaggttagaacctgtggattgtttcaattgcatatagcttggtttccataacatagagcattggttgactgtttacagaagactcactcaccaggataaacattgctgtatgttacagtaaagctatctggagagaacacataaatgattttggcataccattagagaaaccatttgtaaaactcaaatgaccacataaagcttatcaaggagtctagattggttttgttttataccatatgggatgaagaaaatagaaatgtcagtagaactcattgagggtgctcttgccagctgctgaaaatagaagttggctactctcagaatttggtttaaagctggacagatttgctttgttatagggtaaagctttgtctaaagtcctcattttcttttaaaattgaataaaatttctgtatacagattcattgtatgtacctttattgcttcttaagggtccttgctgtatagacagtcctgcttcagaagttgctgctttgtttgtctaattgactcatttgtaaatgagcagaactgttttgttggtttttttccctaaatataaaagtccacacttcgtttgtgctataacctcaaactttgatttctaatgtcacacttaaaactgtgtggaataagacttttgccataaaaataaactatggagtcctttatctaccagagcctttttggtttgaccgccacgatttaggttagtcagtttaaaaattgttcatgttgtttggatggtatcgaaaaccagaaaccacttttaataatgtgtttaagatacttgatttgaagtccttttcatatggactaattgtagtatcaatttcctcctgtcccgattatgtgaaattttggcctttaaacaaagaggggcccattcataagaaagtgttatatctaggtttttaaaactgaagttgaaattatctttgttagcagtagtagtatagaataaaagatccgtatgctggttcgtagattgatacgtgttagtcctgttatttggaggctttttggcatagttgttcgatcaggagcctgtttactaaaagtcttcatacagagtacaagtgcagccgccagaggagaaaattgagattcttgaccctttcatactcttttctttggtattcaggacactaaggcaggaggaccacatgagttctggttggtaagtgtccttgtcatgaaaacacttgccttacaaggctctaattatgatttccctagtcagtgctctgaagatgtgtcacattatattataaacaatacggaaggggagataggtgagatgatatgaaaaacaaattttctcactgtcataaaaggctctaattatggttactttccttgtgatgaaaaacttggccttacagggctctagttatggttactttccctagtcaatgctctgaaaatgtgtcacattataaacaatacagaaggagagatagatgagagatcatgaaaaccaaattttatcttttacatggcccctttgtcttcgtttgaaacatccccaacatttcctacaaatcagcgtagttacaaaggggtcagtcttttaaaataagtatttcctattaaactatatatatatacagtgcctttttggtgttgtgagtcagtggaacactgaaatacagcggttgtgtaatttaagagtggcaacagtttcatttgataagatttgaaaaggctttttatcactacaatcttagaggattgacagtacaggatttttgtttaagagaaggattgtttagactcaagaggtgactatgttgtgggtcttttgataattcatgaatacagatttgctttgaccgatcactagatactgcctcctcaatttcaaaagcaatataacgtttgtatatgctgtttaatttaagttaatgttaagtaatcatttctcattccaaagacaatgcaaaaaacttcagcactgcttgagagttgtatttcagccacagatattttctccattggaaagctattttcattttagaaaaatgggttgtttgaagatgaaagtcttttatcttttttcacaatttattttggttatatgttcgtacattcttattaaatatttcatacactttattgcaactactttgttatttctacatcttagataaatgctgaaaaggaaaacgatttcattgttcatctaattaaataaattaaaagagcggtttgtgtagaaattggagagaactatgttttatatgaatcacaacagtgctcgttgtggactgtaattaaatgctttgccctctggaacttgatttttgtgtatctgagatttattaacagtgctaactgctaaggatactgtttatcttgttctgggcattggagtttcagtttttaaaaaattcttgaaaatgtattctgtgaaactactcatacctctcttcctgcgaattttctcctaagaactaggtttggggtagaaatgaattgacattattttctcatttgctttgtatggtatgaaggatttgtaaagctttgctcaaagttgtgtgcatttgtaaacactatcatgatattttcaattttatgtgtaaattttattgtctgtttttggtgactctgacattaatggaagagaatattttccattagatttaattttttttcctctcccttctgattttttttttattggtgttcatttttcttttgatttaaaggattagagaaatctacaaatgtatgtcataaataagcaaatttgtaaacttttctgaactttagtgaaacatttagttcacaagcataatttggaggtgtgttctgtgtttacacagtagtttggatgtacaattattattagtggctttttaaaaaatgaaacagtgttaagtgaaatgtagttcctagctttgtactccaagttgtcaaagcatcaacaatgaaaattcgattaggaaactttatttaaaatttcaggtagtaatattcagtgtagttaaggccagtcttaacccactggatgaaaatctaggactgtatggaagtaagcaaacattacatttttaggtggaaatagtcagccttgcataaaaacaaggatgcgtgaaagccttaaattccagctcccttttactggagtctgtggttgtgtacaggtatgggccaagtgtaaaatctcatcaattttaagaacactcgggaaatgagtaaagaaaatgtaaaattgctgctagtcaaatcttttggaaagaatttctggaagtggtcactttaaaaattattttccacccttgcaaaattgccacatttaaattgttttactggcagttctatagtagtccagactttagaaaccaaacacaacaaaatggcttgttgccaatatggccacaacattgccagcaaatactgccttggcatcactcagcagaggtttttgtttataaagatgaagtcttgaatactgttcaataaacttgtc

SEQ ID NO: 9716 - protein, 932 aa, Homo sapiens; identical to SEQ ID NO: 1239

SEQ ID NO: 9717 - DNA, 6032 bp, Homo sapiens
gtgaagcggcgaaggaggtggtggctgcgttgggctccgggaagccgttcgggctggggctgtcggccgcggggcggaggcactcgcgcggggggtaattcggggtctgggttctggtgccgcgcagctttccccgcgtaggaacagctcctccaaatatgggggcttcctttgggagcccaacgtttagctcaactgttccaagcacagcctctccaatgaacacagtcccgccgccaccaattcctccaattccagcgatgccatctctgccaccaatgccatccattcccccaattccagttcctcctccagtacctacattgcctcctgtgcctcctgtgcccccgattcccccagttccttctgtgccacccatgaccccactgccacccatgtcgggcatgccgcccttgaatccgccacctgtggcacctctacctgctggaatgaatggctctggagcacctatgaatttgaacaataatctgaatcctatgtttcttggtccgttgaatcctgttaaccctatccagatgaactctcagagcagtgtgaagccactccccatcaaccctgatgatctgtatgtcagtgtgcatggaatgcccttttctgcaatggaaaatgatgtcagagatttttttcatgggctccgtgttgatgcagtgcatttgttgaaagatcatgtaggtcgaaataatgggaatggattggttaagtttctctcccctcaagatacatttgaagctttgaaacgaaacagaatgctgatgattcaacgctatgtggaagttagccctgccacagaaagacagtgggtagctgctggaggccatatcacttttaagcaaaatatgggaccttctggacaaactcatccccctcctcagacacttcccaggtcaaaatcgcccagtgggcagaaaagatcaaggtcaagatcaccacatgaggctggtttttgtgtttacttgaaagggctaccatttgaagcagaaaacaaacatgtcattgatttttttaaaaagctggatattgtggaagatagtatttatatagcttatggacccaatgggaaagcaactggcgaaggctttgtagagttcagaaatgaggctgactataaggctgctctgtgtcgtcataaacagtacatgggcaatcgctttattcaagttcatccaattactaagaaaggtatgctagaaaagatagatatgattcgaaaaagactgcagaacttcagctatgaccagagggaaatgatactaaatccagagggggatgtcaactctgccaaagtctgtgcccacataacaaatattccattcagcattacaaagatggatgttcttcagttcctagaaggaatcccagtggatgaaaatgctgtacatgttcttgttgataacaatgggcaaggtctaggacaggcattggttcagtttaaaaatgaagatgatgcacgtaagtctgaacgcttacaccgtaaaaaacttaatgggagagaagcttttgttcatgtagttaccctagaagatatgagagagattgagaaaaatccccctgcccaaggaaaaaagggattaaagatgcctgtgccaggtaatcctgcagttccaggaatgcccaatgcgggactgcccggtgtgggactgcccagtgcaggacttcccggtgcaggcctgcccagcacaggactgcctggttcagcaataaccagtgcaggactgcctggtgcgggaatgcccagtgcaggaatacctagtgcaggaggtgaagagcatgccttcctgactgtaggatcaaaggaagccaataatgggcctccatttaactttcctggtaattttggtggatcaaatgcctttgggccaccaatccctcctccaggattaggaggcggggcctttggtgatgctaggcctggtatgccttcagttggaaacagtggtttgcctggtctaggactggatgttccgggttttggaggtggaccaaacaatttaagtgggccatcgggatttggagggggccctcagaattttggaaatggccctggtagcttaggcggtcccccggggtttggaagtggccctcctggtcttggaagtgcccctgggcatttgggtgggccaccagcttttgggcctggccccggccccggccccggccctggcccaatccatattggtggtccccctggctttgcatctagttctggaaaaccaggaccgacagtaattaaagtgcaaaacatgccctttactgtgtctattgatgagattttagatttcttttatggctatcaagtaatcccaggctcagtgtgtttaaaatacaatgaaaaaggtatgcccacaggtgaagccatggtggcctttgagtctcgggatgaagccacagctgctgtcattgacttaaatgacaggcctataggttcaagaaaagtaaaacttgtattagggtagccattcacatcattttttatagggtagatcttcatattgctgtgattaatgcatccagattgttttcctagtatttccaggttagaacctgtggattgtttcaattgcatatagcttggtttccataacatagagcattggttgactgtttacagaagactcactcaccaggataaacattgctgtatgttacagtaaagctatctggagagaacacataaatgattttggcataccattagagaaaccatttgtaaaactcaaatgaccacataaagcttatcaaggagtctagattggttttgttttataccatatgggatgaagaaaatagaaatgtcagtagaactcattgagggtgctcttgccagctgctgaaaatagaagttggctactctcagaatttggtttaaagctggacagatttgctttgttatagggtaaagctttgtctaaagtcctcattttcttttaaaattgaataaaatttctgtatacagattcattgtatgtacctttattgcttcttaagggtccttgctgtatagacagtcctgcttcagaagttgctgctttgtttgtctaattgactcatttgtaaatgagcagaactgttttgttggtttttttccctaaatataaaagtccacacttcgtttgtgctataacctcaaactttgatttctaatgtcacacttaaaactgtgtggaataagacttttgccataaaaataaactatggagtcctttatctaccagagcctttttggtttgaccgccacgatttaggttagtcagtttaaaaattgttcatgttgtttggatggtatcgaaaaccagaaaccacttttaataatgtgtttaagatacttgatttgaagtccttttcatatggactaattgtagtatcaatttcctcctgtcccgattatgtgaaattttggcctttaaacaaagaggggcccattcataagaaagtgttatatctaggtttttaaaactgaagttgaaattatctttgttagcagtagtagtatagaataaaagatccgtatgctggttcgtagattgatacgtgttagtcctgttatttggaggctttttggcatagttgttcgatcaggagcctgtttactaaaagtcttcatacagagtacaagtgcagccgccagaggagaaaattgagattcttgaccctttcatactcttttctttggtattcaggacactaaggcaggaggaccacatgagttctggttggtaagtgtccttgtcatgaaaacacttgccttacaaggctctaattatgatttccctagtcagtgctctgaagatgtgtcacattatattataaacaatacggaaggggagataggtgagatgatatgaaaaacaaattttctcactgtcataaaaggctctaattatggttactttccttgtgatgaaaaacttggccttacagggctctagttatggttactttccctagtcaatgctctgaaaatgtgtcacattataaacaatacagaaggagagatagatgagagatcatgaaaaccaaattttatcttttacatggcccctttgtcttcgtttgaaacatccccaacatttcctacaaatcagcgtagttacaaaggggtcagtcttttaaaataagtatttcctattaaactatatatatatacagtgcctttttggtgttgtgagtcagtggaacactgaaatacagcggttgtgtaatttaagagtggcaacagtttcatttgataagatttgaaaaggctttttatcactacaatcttagaggattgacagtacaggatttttgtttaagagaaggattgtttagactcaagaggtgactatgttgtgggtcttttgataattcatgaatacagatttgctttgaccgatcactagatactgcctcctcaatttcaaaagcaatataacgtttgtatatgctgtttaatttaagttaatgttaagtaatcatttctcattccaaagacaatgcaaaaaacttcagcactgcttgagagttgtatttcagccacagatattttctccattggaaagctattttcattttagaaaaatgggttgtttgaagatgaaagtcttttatcttttttcacaatttattttggttatatgttcgtacattcttattaaatatttcatacactttattgcaactactttgttatttctacatcttagataaatgctgaaaaggaaaacgatttcattgttcatctaattaaataaattaaaagagcggtttgtgtagaaattggagagaactatgttttatatgaatcacaacagtgctcgttgtggactgtaattaaatgctttgccctctggaacttgatttttgtgtatctgagatttattaacagtgctaactgctaaggatactgtttatcttgttctgggcattggagtttcagtttttaaaaaattcttgaaaatgtattctgtgaaactactcatacctctcttcctgcgaattttctcctaagaactaggtttggggtagaaatgaattgacattattttctcatttgctttgtatggtatgaaggatttgtaaagctttgctcaaagttgtgtgcatttgtaaacactatcatgatattttcaattttatgtgtaaattttattgtctgtttttggtgactctgacattaatggaagagaatattttccattagatttaattttttttcctctcccttctgattttttttttattggtgttcatttttcttttgatttaaaggattagagaaatctacaaatgtatgtcataaataagcaaatttgtaaacttttctgaactttagtgaaacatttagttcacaagcataatttggaggtgtgttctgtgtttacacagtagtttggatgtacaattattattagtggctttttaaaaaatgaaacagtgttaagtgaaatgtagttcctagctttgtactccaagttgtcaaagcatcaacaatgaaaattcgattaggaaactttatttaaaatttcaggtagtaatattcagtgtagttaaggccagtcttaacccactggatgaaaatctaggactgtatggaagtaagcaaacattacatttttaggtggaaatagtcagccttgcataaaaacaaggatgcgtgaaagccttaaattccagctcccttttactggagtctgtggttgtgtacaggtatgggccaagtgtaaaatctcatcaattttaagaacactcgggaaatgagtaaagaaaatgtaaaattgctgctagtcaaatcttttggaaagaatttctggaagtggtcactttaaaaattattttccacccttgcaaaattgccacatttaaattgttttactggcagttctatagtagtccagactttagaaaccaaacacaacaaaatggcttgttgccaatatggccacaacattgccagcaaatactgccttggcatcactcagcagaggtttttgtttataaagatgaagtcttgaatactgttcaataaacttgtc

SEQ ID NO: 9718 - protein, 771 aa, Homo sapiens; identical to SEQ ID NO: 9686

SEQ ID NO: 9719 - DNA, 6066 bp, Homo sapiens
gtgaagcggcgaaggaggtggtggctgcgttgggctccgggaagccgttcgggctggggctgtcggccgcggggcggaggcactcgcgcggggggtaattcggggtctgggttctggtgccgcgcagctttccccgtctaaaagttggttttaattggttgcccacaggattgacttggcctctacttcttgttaaggaaattcatctcttgttttatcaggtgtgtgtgtgttccaagcacagcctctccaatgaacacagtcccgccgccaccaattcctccaattccagcgatgccatctctgccaccaatgccatccattcccccaattccagttcctcctccagtacctacattgcctcctgtgcctcctgtgcccccgattcccccagttccttctgtgccacccatgaccccactgccacccatgtcgggcatgccgcccttgaatccgccacctgtggcacctctacctgctggaatgaatggctctggagcacctatgaatttgaacaataatctgaatcctatgtttcttggtccgttgaatcctgttaaccctatccagatgaactctcagagcagtgtgaagccactccccatcaaccctgatgatctgtatgtcagtgtgcatggaatgcccttttctgcaatggaaaatgatgtcagagatttttttcatgggctccgtgttgatgcagtgcatttgttgaaagatcatgtaggtcgaaataatgggaatggattggttaagtttctctcccctcaagatacatttgaagctttgaaacgaaacagaatgctgatgattcaacgctatgtggaagttagccctgccacagaaagacagtgggtagctgctggaggccatatcacttttaagcaaaatatgggaccttctggacaaactcatccccctcctcagacacttcccaggtcaaaatcgcccagtgggcagaaaagatcaaggtcaagatcaccacatgaggctggtttttgtgtttacttgaaagggctaccatttgaagcagaaaacaaacatgtcattgatttttttaaaaagctggatattgtggaagatagtatttatatagcttatggacccaatgggaaagcaactggcgaaggctttgtagagttcagaaatgaggctgactataaggctgctctgtgtcgtcataaacagtacatgggcaatcgctttattcaagttcatccaattactaagaaaggtatgctagaaaagatagatatgattcgaaaaagactgcagaacttcagctatgaccagagggaaatgatactaaatccagagggggatgtcaactctgccaaagtctgtgcccacataacaaatattccattcagcattacaaagatggatgttcttcagttcctagaaggaatcccagtggatgaaaatgctgtacatgttcttgttgataacaatgggcaaggtctaggacaggcattggttcagtttaaaaatgaagatgatgcacgtaagtctgaacgcttacaccgtaaaaaacttaatgggagagaagcttttgttcatgtagttaccctagaagatatgagagagattgagaaaaatccccctgcccaaggaaaaaagggattaaagatgcctgtgccaggtaatcctgcagttccaggaatgcccaatgcgggactgcccggtgtgggactgcccagtgcaggacttcccggtgcaggcctgcccagcacaggactgcctggttcagcaataaccagtgcaggactgcctggtgcgggaatgcccagtgcaggaatacctagtgcaggaggtgaagagcatgccttcctgactgtaggatcaaaggaagccaataatgggcctccatttaactttcctggtaattttggtggatcaaatgcctttgggccaccaatccctcctccaggattaggaggcggggcctttggtgatgctaggcctggtatgccttcagttggaaacagtggtttgcctggtctaggactggatgttccgggttttggaggtggaccaaacaatttaagtgggccatcgggatttggagggggccctcagaattttggaaatggccctggtagcttaggcggtcccccggggtttggaagtggccctcctggtcttggaagtgcccctgggcatttgggtgggccaccagcttttgggcctggccccggccccggccccggccctggcccaatccatattggtggtccccctggctttgcatctagttctggaaaaccaggaccgacagtaattaaagtgcaaaacatgccctttactgtgtctattgatgagattttagatttcttttatggctatcaagtaatcccaggctcagtgtgtttaaaatacaatgaaaaaggtatgcccacaggtgaagccatggtggcctttgagtctcgggatgaagccacagctgctgtcattgacttaaatgacaggcctataggttcaagaaaagtaaaacttgtattagggtagccattcacatcattttttatagggtagatcttcatattgctgtgattaatgcatccagattgttttcctagtatttccaggttagaacctgtggattgtttcaattgcatatagcttggtttccataacatagagcattggttgactgtttacagaagactcactcaccaggataaacattgctgtatgttacagtaaagctatctggagagaacacataaatgattttggcataccattagagaaaccatttgtaaaactcaaatgaccacataaagcttatcaaggagtctagattggttttgttttataccatatgggatgaagaaaatagaaatgtcagtagaactcattgagggtgctcttgccagctgctgaaaatagaagttggctactctcagaatttggtttaaagctggacagatttgctttgttatagggtaaagctttgtctaaagtcctcattttcttttaaaattgaataaaatttctgtatacagattcattgtatgtacctttattgcttcttaagggtccttgctgtatagacagtcctgcttcagaagttgctgctttgtttgtctaattgactcatttgtaaatgagcagaactgttttgttggtttttttccctaaatataaaagtccacacttcgtttgtgctataacctcaaactttgatttctaatgtcacacttaaaactgtgtggaataagacttttgccataaaaataaactatggagtcctttatctaccagagcctttttggtttgaccgccacgatttaggttagtcagtttaaaaattgttcatgttgtttggatggtatcgaaaaccagaaaccacttttaataatgtgtttaagatacttgatttgaagtccttttcatatggactaattgtagtatcaatttcctcctgtcccgattatgtgaaattttggcctttaaacaaagaggggcccattcataagaaagtgttatatctaggtttttaaaactgaagttgaaattatctttgttagcagtagtagtatagaataaaagatccgtatgctggttcgtagattgatacgtgttagtcctgttatttggaggctttttggcatagttgttcgatcaggagcctgtttactaaaagtcttcatacagagtacaagtgcagccgccagaggagaaaattgagattcttgaccctttcatactcttttctttggtattcaggacactaaggcaggaggaccacatgagttctggttggtaagtgtccttgtcatgaaaacacttgccttacaaggctctaattatgatttccctagtcagtgctctgaagatgtgtcacattatattataaacaatacggaaggggagataggtgagatgatatgaaaaacaaattttctcactgtcataaaaggctctaattatggttactttccttgtgatgaaaaacttggccttacagggctctagttatggttactttccctagtcaatgctctgaaaatgtgtcacattataaacaatacagaaggagagatagatgagagatcatgaaaaccaaattttatcttttacatggcccctttgtcttcgtttgaaacatccccaacatttcctacaaatcagcgtagttacaaaggggtcagtcttttaaaataagtatttcctattaaactatatatatatacagtgcctttttggtgttgtgagtcagtggaacactgaaatacagcggttgtgtaatttaagagtggcaacagtttcatttgataagatttgaaaaggctttttatcactacaatcttagaggattgacagtacaggatttttgtttaagagaaggattgtttagactcaagaggtgactatgttgtgggtcttttgataattcatgaatacagatttgctttgaccgatcactagatactgcctcctcaatttcaaaagcaatataacgtttgtatatgctgtttaatttaagttaatgttaagtaatcatttctcattccaaagacaatgcaaaaaacttcagcactgcttgagagttgtatttcagccacagatattttctccattggaaagctattttcattttagaaaaatgggttgtttgaagatgaaagtcttttatcttttttcacaatttattttggttatatgttcgtacattcttattaaatatttcatacactttattgcaactactttgttatttctacatcttagataaatgctgaaaaggaaaacgatttcattgttcatctaattaaataaattaaaagagcggtttgtgtagaaattggagagaactatgttttatatgaatcacaacagtgctcgttgtggactgtaattaaatgctttgccctctggaacttgatttttgtgtatctgagatttattaacagtgctaactgctaaggatactgtttatcttgttctgggcattggagtttcagtttttaaaaaattcttgaaaatgtattctgtgaaactactcatacctctcttcctgcgaattttctcctaagaactaggtttggggtagaaatgaattgacattattttctcatttgctttgtatggtatgaaggatttgtaaagctttgctcaaagttgtgtgcatttgtaaacactatcatgatattttcaattttatgtgtaaattttattgtctgtttttggtgactctgacattaatggaagagaatattttccattagatttaattttttttcctctcccttctgattttttttttattggtgttcatttttcttttgatttaaaggattagagaaatctacaaatgtatgtcataaataagcaaatttgtaaacttttctgaactttagtgaaacatttagttcacaagcataatttggaggtgtgttctgtgtttacacagtagtttggatgtacaattattattagtggctttttaaaaaatgaaacagtgttaagtgaaatgtagttcctagctttgtactccaagttgtcaaagcatcaacaatgaaaattcgattaggaaactttatttaaaatttcaggtagtaatattcagtgtagttaaggccagtcttaacccactggatgaaaatctaggactgtatggaagtaagcaaacattacatttttaggtggaaatagtcagccttgcataaaaacaaggatgcgtgaaagccttaaattccagctcccttttactggagtctgtggttgtgtacaggtatgggccaagtgtaaaatctcatcaattttaagaacactcgggaaatgagtaaagaaaatgtaaaattgctgctagtcaaatcttttggaaagaatttctggaagtggtcactttaaaaattattttccacccttgcaaaattgccacatttaaattgttttactggcagttctatagtagtccagactttagaaaccaaacacaacaaaatggcttgttgccaatatggccacaacattgccagcaaatactgccttggcatcactcagcagaggtttttgtttataaagatgaagtcttgaatactgttcaataaacttgtc

SEQ ID NO: 9720 - protein, 751 aa, Homo sapiens; identical to SEQ ID NO: 9694

SEQ ID NO: 9721 - DNA, 5972 bp, Homo sapiens
gtgaagcggcgaaggaggtggtggctgcgttgggctccgggaagccgttcgggctggggctgtcggccgcggggcggaggcactcgcgcggggggtaattcggggtctgggttctggtgccgcgcagctttccccgtctaaaagttggttttaattggttgcccacaggattgacttggcctctacttcttgttaaggaaattcatcttctgccaccaatgccatccattcccccaattccagttcctcctccagtacctacattgcctcctgtgcctcctgtgcccccgattcccccagttccttctgtgccacccatgaccccactgccacccatgtcgggcatgccgcccttgaatccgccacctgtggcacctctacctgctggaatgaatggctctggagcacctatgaatttgaacaataatctgaatcctatgtttcttggtccgttgaatcctgttaaccctatccagatgaactctcagagcagtgtgaagccactccccatcaaccctgatgatctgtatgtcagtgtgcatggaatgcccttttctgcaatggaaaatgatgtcagagatttttttcatgggctccgtgttgatgcagtgcatttgttgaaagatcatgtaggtcgaaataatgggaatggattggttaagtttctctcccctcaagatacatttgaagctttgaaacgaaacagaatgctgatgattcaacgctatgtggaagttagccctgccacagaaagacagtgggtagctgctggaggccatatcacttttaagcaaaatatgggaccttctggacaaactcatccccctcctcagacacttcccaggtcaaaatcgcccagtgggcagaaaagatcaaggtcaagatcaccacatgaggctggtttttgtgtttacttgaaagggctaccatttgaagcagaaaacaaacatgtcattgatttttttaaaaagctggatattgtggaagatagtatttatatagcttatggacccaatgggaaagcaactggcgaaggctttgtagagttcagaaatgaggctgactataaggctgctctgtgtcgtcataaacagtacatgggcaatcgctttattcaagttcatccaattactaagaaaggtatgctagaaaagatagatatgattcgaaaaagactgcagaacttcagctatgaccagagggaaatgatactaaatccagagggggatgtcaactctgccaaagtctgtgcccacataacaaatattccattcagcattacaaagatggatgttcttcagttcctagaaggaatcccagtggatgaaaatgctgtacatgttcttgttgataacaatgggcaaggtctaggacaggcattggttcagtttaaaaatgaagatgatgcacgtaagtctgaacgcttacaccgtaaaaaacttaatgggagagaagcttttgttcatgtagttaccctagaagatatgagagagattgagaaaaatccccctgcccaaggaaaaaagggattaaagatgcctgtgccaggtaatcctgcagttccaggaatgcccaatgcgggactgcccggtgtgggactgcccagtgcaggacttcccggtgcaggcctgcccagcacaggactgcctggttcagcaataaccagtgcaggactgcctggtgcgggaatgcccagtgcaggaatacctagtgcaggaggtgaagagcatgccttcctgactgtaggatcaaaggaagccaataatgggcctccatttaactttcctggtaattttggtggatcaaatgcctttgggccaccaatccctcctccaggattaggaggcggggcctttggtgatgctaggcctggtatgccttcagttggaaacagtggtttgcctggtctaggactggatgttccgggttttggaggtggaccaaacaatttaagtgggccatcgggatttggagggggccctcagaattttggaaatggccctggtagcttaggcggtcccccggggtttggaagtggccctcctggtcttggaagtgcccctgggcatttgggtgggccaccagcttttgggcctggccccggccccggccccggccctggcccaatccatattggtggtccccctggctttgcatctagttctggaaaaccaggaccgacagtaattaaagtgcaaaacatgccctttactgtgtctattgatgagattttagatttcttttatggctatcaagtaatcccaggctcagtgtgtttaaaatacaatgaaaaaggtatgcccacaggtgaagccatggtggcctttgagtctcgggatgaagccacagctgctgtcattgacttaaatgacaggcctataggttcaagaaaagtaaaacttgtattagggtagccattcacatcattttttatagggtagatcttcatattgctgtgattaatgcatccagattgttttcctagtatttccaggttagaacctgtggattgtttcaattgcatatagcttggtttccataacatagagcattggttgactgtttacagaagactcactcaccaggataaacattgctgtatgttacagtaaagctatctggagagaacacataaatgattttggcataccattagagaaaccatttgtaaaactcaaatgaccacataaagcttatcaaggagtctagattggttttgttttataccatatgggatgaagaaaatagaaatgtcagtagaactcattgagggtgctcttgccagctgctgaaaatagaagttggctactctcagaatttggtttaaagctggacagatttgctttgttatagggtaaagctttgtctaaagtcctcattttcttttaaaattgaataaaatttctgtatacagattcattgtatgtacctttattgcttcttaagggtccttgctgtatagacagtcctgcttcagaagttgctgctttgtttgtctaattgactcatttgtaaatgagcagaactgttttgttggtttttttccctaaatataaaagtccacacttcgtttgtgctataacctcaaactttgatttctaatgtcacacttaaaactgtgtggaataagacttttgccataaaaataaactatggagtcctttatctaccagagcctttttggtttgaccgccacgatttaggttagtcagtttaaaaattgttcatgttgtttggatggtatcgaaaaccagaaaccacttttaataatgtgtttaagatacttgatttgaagtccttttcatatggactaattgtagtatcaatttcctcctgtcccgattatgtgaaattttggcctttaaacaaagaggggcccattcataagaaagtgttatatctaggtttttaaaactgaagttgaaattatctttgttagcagtagtagtatagaataaaagatccgtatgctggttcgtagattgatacgtgttagtcctgttatttggaggctttttggcatagttgttcgatcaggagcctgtttactaaaagtcttcatacagagtacaagtgcagccgccagaggagaaaattgagattcttgaccctttcatactcttttctttggtattcaggacactaaggcaggaggaccacatgagttctggttggtaagtgtccttgtcatgaaaacacttgccttacaaggctctaattatgatttccctagtcagtgctctgaagatgtgtcacattatattataaacaatacggaaggggagataggtgagatgatatgaaaaacaaattttctcactgtcataaaaggctctaattatggttactttccttgtgatgaaaaacttggccttacagggctctagttatggttactttccctagtcaatgctctgaaaatgtgtcacattataaacaatacagaaggagagatagatgagagatcatgaaaaccaaattttatcttttacatggcccctttgtcttcgtttgaaacatccccaacatttcctacaaatcagcgtagttacaaaggggtcagtcttttaaaataagtatttcctattaaactatatatatatacagtgcctttttggtgttgtgagtcagtggaacactgaaatacagcggttgtgtaatttaagagtggcaacagtttcatttgataagatttgaaaaggctttttatcactacaatcttagaggattgacagtacaggatttttgtttaagagaaggattgtttagactcaagaggtgactatgttgtgggtcttttgataattcatgaatacagatttgctttgaccgatcactagatactgcctcctcaatttcaaaagcaatataacgtttgtatatgctgtttaatttaagttaatgttaagtaatcatttctcattccaaagacaatgcaaaaaacttcagcactgcttgagagttgtatttcagccacagatattttctccattggaaagctattttcattttagaaaaatgggttgtttgaagatgaaagtcttttatcttttttcacaatttattttggttatatgttcgtacattcttattaaatatttcatacactttattgcaactactttgttatttctacatcttagataaatgctgaaaaggaaaacgatttcattgttcatctaattaaataaattaaaagagcggtttgtgtagaaattggagagaactatgttttatatgaatcacaacagtgctcgttgtggactgtaattaaatgctttgccctctggaacttgatttttgtgtatctgagatttattaacagtgctaactgctaaggatactgtttatcttgttctgggcattggagtttcagtttttaaaaaattcttgaaaatgtattctgtgaaactactcatacctctcttcctgcgaattttctcctaagaactaggtttggggtagaaatgaattgacattattttctcatttgctttgtatggtatgaaggatttgtaaagctttgctcaaagttgtgtgcatttgtaaacactatcatgatattttcaattttatgtgtaaattttattgtctgtttttggtgactctgacattaatggaagagaatattttccattagatttaattttttttcctctcccttctgattttttttttattggtgttcatttttcttttgatttaaaggattagagaaatctacaaatgtatgtcataaataagcaaatttgtaaacttttctgaactttagtgaaacatttagttcacaagcataatttggaggtgtgttctgtgtttacacagtagtttggatgtacaattattattagtggctttttaaaaaatgaaacagtgttaagtgaaatgtagttcctagctttgtactccaagttgtcaaagcatcaacaatgaaaattcgattaggaaactttatttaaaatttcaggtagtaatattcagtgtagttaaggccagtcttaacccactggatgaaaatctaggactgtatggaagtaagcaaacattacatttttaggtggaaatagtcagccttgcataaaaacaaggatgcgtgaaagccttaaattccagctcccttttactggagtctgtggttgtgtacaggtatgggccaagtgtaaaatctcatcaattttaagaacactcgggaaatgagtaaagaaaatgtaaaattgctgctagtcaaatcttttggaaagaatttctggaagtggtcactttaaaaattattttccacccttgcaaaattgccacatttaaattgttttactggcagttctatagtagtccagactttagaaaccaaacacaacaaaatggcttgttgccaatatggccacaacattgccagcaaatactgccttggcatcactcagcagaggtttttgtttataaagatgaagtcttgaatactgttcaataaacttgtc

SEQ ID NO: 9722 - protein, 731 aa, Homo sapiens; identical to SEQ ID NO: 9692
